United States Patent Application Publication US 2019/0348154 A1 - sequence listing, part 23

SEQ ID NO: 86920 - DNA, 1200 bp, Enterobacter aerogenes
atgaagacctctttcaccgctcgtttactcgttacggccctctccgttgcggcactgtctaccgctgcccgcgccgatgacctgaatatgaaaaccatgatcccaggcgctccgcagatcgatgctgaatcctgggttcttatcgattacaactcaggtaaagtactggcggaaaacaacgccgacgcccgtcgcgatccggcgagcctgaccaaaatgatgaccagctacgtcattggccaggccatgaaggcggggaaattcaaagaatccgatctggtcaccgtgggtaacgacgcgtgggcaaccggtaatccggtgtttaaaggttcttccctgatgttcctgaaaccgggcatgcaggtgccggtttctcagctgatccgcggcatcaacctgcaatccggtaacgatgcctgcgtggcgatggccgactacgttgccggcagccaggacgcatttgtcagcctgatgaacaattacgttaacgcgttgggcctgaaaaacacccatttccagaccgttcacggcctggatgccgacggtcagtacagctccgcgcgtgacatggcgctgatcggccaggcgctgatccgcgacgtaccgaatgagtactccatctaccgtgagaaagagttcacctttaacggtattcgccagctgaaccgtaacggcctgctgtgggataacagcctcaacgtcgacggtattaaaaccggccataccgataaagcaggttacaacctggtcgcttctgctaccgaaggccagatgcgcctgatctccgcggttatgggtggacgtacctataagggtcgtgaatccgagagcaagaaactgctgacctggggcttccgcttcttcgaaaccgtaaaccccattaaagcaggtaaagagttcgcctctgaaccggcctggttcggcgatagcgatcgcgcctctctgggcgtagataaggatgtttatctgactatcccacgcgggcgcatgaaagatctgaaagccagctatgtgttgaataacaccgagctgcacgcgccgctgcagaaaaaccaggtagtcggtaccatcaacttccagttagatggcaaaactatcgatcagcgtccgttagtggtgctgcaggaaattccggaaggtaatttcttcggcaaaatcattgattacattaagttaatgttccatcactggtttggttaa

SEQ ID NO: 86921 - DNA, 264 bp, Enterobacter aerogenes
atgaaaaccaaacttaacgaactgcttgaattccctactccatttacttacaaagtaatggggcaggcgttgcctgagctggttgatcaggtggtggaagtggtacagcgccatgcgcctggtgattactctccgtcagtaaaaccgagcagcaaaggtaactaccactcggtctccatcaccattaacgctacccacattgagcaggtcgaagccctgtacgaagagctgggcaatatcgaaatcgtgcggatggtgctgtaa

SEQ ID NO: 86922 - DNA, 642 bp, Enterobacter aerogenes
ttgcagcacaataccattcttattcgacaactcggcctgcaaccttacgaacccatctcgcaggcaatgcacgaatttaccgacagtcgtgacgacacgacgctggatgaaatctggctggtagaacatcacccggtctttactcagggtcaggccggtaaagccgaacacgtgctggtgccaggcgatatcccggttattcagagcgatcgcggcggtcaggtgacctatcacgggccaggccaacaggtgatgtatgtattgctgaatcttaaacggcgtaaactcggcgtacgtgaattagtgacgctactggagcagaccgtggtcaatactctcgcagagtatcagattgaatcccacccacgcgccaatgcgccgggggtttacgttggtgaacagaaaatctgttcactggggctgcgtattcgcaagggctgctcgttccacggactggcgctgaatgtggcaatggatttgacgccattcctgcgtattaatccgtgcggctatgcaggcatggagatgacgcaaatgcgccactggcagccgcaggccactacggaaaacgtcgcgccgcggctggtcgccaacctgctggcgctgctgaataacccgccgcatgaatatgtcgccgcttga

SEQ ID NO: 86923 - DNA, 951 bp, Enterobacter aerogenes
gtggccgacaatcatcctccattggaaagcaacgaacagccagaagatcggcagatctttcgtattctgcgtaatatcgatcttaacctgttaactatcttcgaagccgtgtacgtgcacaaaggcatcgtcaatgcggcgaaggtattaaatatcacgccttcggcgataagccagtccatcaataaactacgggctctattccccgacccgctctttattcgtaaaggtcagggagtcacgcccacggcttatgcgacccacctgcatcaatatatcagccaggggatggaagcctttctcaatgcgctggatttgggcagcggctcacatcagcagcgtgtgctcactattgccaccgcgccgaccgtcggcgctctggtgataccgaaaatagccaatgcgttgaaatcgcgctttcctcaggtattactgcacaatatggcgattaccgatgccgccagtcagcttaatcagcgacaggttgacttactgatcgacagctatccccatagcgggctggctattgcacaccaggtgctgttctccgaaccggttgtcatcttttgccgcgaaaatcaccccattttgcaccttcccctgacgaaggaaaatctgcagcagtatgagttcgcgctattgctaccggaagggcagcgctaccctaccctgcatcgccagctagaagagtacgtcggcgaacgccgctgcggctttagcagctataacctgttgacccaggcggcaatgatgaataatagcgatttgctggggctgacgccggagagtatgttcgcgctggtggcgaaaatctggcctttacaagcgatttcgtttccacctctgcaggaccagcgtattgatatttcgctccattacaaccggcaaagcgcacaggagccgttactgaaagagattatcgacaccattgtgcaaacttatgcctgctaa

SEQ ID NO: 86924 - DNA, 966 bp, Enterobacter aerogenes
atgagtaaacccattgtgatggaacgcggtgttaagtaccgcgacgccgataaaatggcccttatcccggtgaaaaacgtggcaactgagcgtgaagctctgctcagaaaaccggaatggatgaaaatcaaacttccggctgactcgtcccgtattcaggggatcaaggcagcgatgcgtaagaatggcctgcactccgtgtgcgaagaagcctcttgcccgaaccttgccgagtgcttcaaccacggtaccgcgacctttatgatcctcggcgctatctgtactcgccgttgtccgttctgcgacgttgcccacggtcgtccggtgacgcctgatgccaatgagccgcaaaaactggcacaaaccatcgccgatatgggtctgcgctacgtggtagtgacttccgttgaccgcgacgatcttcgtgacggcggcgcgcaacacttcgctgactgtatcagcgctatccgcgagaagagcccgaatatcaagattgaaacgctggtgccggatttccgtggccgtatggatcgcgcgctggatattctgaaagtgacgccgccggatgtgtttaaccacaacctggaaaacgtaccgcgtctgtatcgccaggtgcgtccgggcgcagattacaactggtcgctgaaactgctggagcgctttaaagaagcgcatccggaaatcccgaccaaatcgggtctgatggtcggtcttggcgaaaccaatgaagagatcatcgaagtgatgcgcgatctgcgccgtcatggcgtcaccatgctgacgctgggtcagtatctgcagccgagccgtcaccaccttccggtacagcgttatgttagcccggaagagtttgaagagatgaaagctgaagccatggcgatgggctttacccatgctgcctgcggcccgttcgtccgctcttcctatcatgccgatctgcaggcaaaaggtatggaagtaaaataa

SEQ ID NO: 86925 - DNA, 207 bp, Enterobacter aerogenes
atgggtgagattagtattaccaaactgctggtagtcgcagcgctgattattttagtgtttggtaccaaaaaattacgcacgctgggtggagacctgggttcggctatcaaaggcttcaagaaagccatgaatgatgacgatgatagtgccaaaaagaccagcgctgaggaagacgcgccggcacagaagctctctcataaagagtaa

SEQ ID NO: 86926 - DNA, 789 bp, Enterobacter aerogenes
atgcgggtagcagcagggcaatttgccgtcacggcgcagtggcaaactaatgcgcagatctgcgttgaactgatgcgtcaggcggcagaatgcggggtatcgttactggtcttacccgaggcgttgctggcgcgggccgataacgatcctgatatgtcggtaaaatcagcgcaggcgctggacggcggcttcatgcagcaactgctggccgaaagccggagtaatgacttaaccacgatattaacgctgcacgtgccctctggcgaagggcgcgcgagcaacaccctggtcgcaatacgacaggggatgattagcgcacaataccagaaactccatttgtacgatgcgtttaatatgcaggagtcgcggctggtggatgccggcgaacaaattccgccgttaattgatgtaaatgggatgcgaatcggcttaatgacctgctacgatttacgctttcccgaattagcgctatcgttagcgttaaagggtgccgatgtgttggtgcttcctaccgcgtgggttcgcgggccattgaaagaacatcactgggcgacgctgctggcggcaagagcgctggataccacctgctacattattgcggcaggcgaatgtggaacgcgtaatatcggtcagagccggattatcgatccgctcggtaccaccattgctggcgctgctgcccagccgcagctgatttttgctgagatatccgcagattatattcgtcaggtgcgtgagagtttgccggtgctgcgtaatcgcagatttgcgccaccgcaattattgtga

SEQ ID NO: 86927 - DNA, 384 bp, Enterobacter aerogenes
gtgttacaactccttttagccgtttttgttggcggcggaaccggcagcgtgttgcgctggtggctgggcatgaaatttaaccccatgcatcatgcgattcccattggcacgctaatcgctaacctgctgggcgcatttattatcggcgccgggctggcgtggttcaatcgcctgacgaatgtcgatccgatgtggaaactgcttatcactaccggtttctgcggcggcctgacgactttctccaccttttcagcagaagtggtcttcctgctccagcaggggcgtttcagttgggcattgttaaacgtgctggtcaatctactgggttctttcgccatgaccgcgacggcattctggctgttctcacagtcagccgcccgctaa

SEQ ID NO: 86928 - DNA, 210 bp, Enterobacter aerogenes
atgtctaagattaaaggtaacgttaagtggtttaatgagtccaaaggattcggtttcattactccggaagatggcagcaaagatgtattcgtacacttctctgcaatccagtccaacggtttcaaaactctggctgaaggtcagcgcgtagagttcgaaatcactaacggtgccaaaggcccttctgctgcaaacgtaatggctatctaa

SEQ ID NO: 86929 - DNA, 675 bp, Enterobacter aerogenes
atggcgcaattcaggattttgccttattccgttaacagtctattaagattacatttgttactttacttcgtttttaaaattgcaatcggtaatagagaagtgtttaaactacgtcaatttacattatttatgcttgcgctgtccggcctgctgctgtcgtccggctatgctaacgcctcgttctcgtcaacgctccgcgatggctacaatacgctgacggacaatgtcgcgcaaacctggaacgagcctgagcactacgatctctacatcccggcgatcacctggcacgcgcgctttgcctatgacaaagagaaaaccgataagtataacgaacgcccatggggcgcgggatttggcatgtcgcgttgggacgataaaggtaactggcacggcctttatctgatggcgtttaaagattcctttaataagtgggagccgattggcggctatggctgggaaaaaacctggcgcccgctggccgacgacaacttccatcttggccttggttacacccttggcgtaacggcgcgcgacaactggaactatatcccgatcccagtggtgctgccgctggcatcgattggctacggcccggcgacgttccagatgacctacatccccggcacttataacaacggcaacgtttattttgcctgggcacgcattcagttttaa

SEQ ID NO: 86930 - DNA, 1374 bp, Enterobacter aerogenes
atgcttacgcttgttgagatccttatcggggtcgtggttattgtgggcgtcgcccgctacattataaaaggttattccgcgacaggagtgctgtttgtcggcggtttaatcttgcttatcgccagcgccattatggggcataaagttctccctgccagcgccgccagtacgggttacaccgcaaccgacatctttgaatatattaaaatactgctcatgagccgcggcggcgacctcggcatgatgattatgatgctctgcggtttcgccacctatatgacccatatcggcgccaacgatatggtggttaaactggcctctaagccgctgcaatatattaactcgccttatctgttgatgattgccgcctacttcctcgcctgcctgatgtcgctggcggtctcctcggcaactggccttggggtgctgctgatggcgacgctatttccggtaatggtcaatgtcggcatcagccgcggcgccgcggcggcgatttgcgcctcccctgccgcgttgatcctgtcaccaacctccggtgacgtagtgctggcggccaaagctgccgaaatgccgctgattgatttcgctttcaaaaccactttacctatctcgattgccgctatcgtctgtatggccatcgctcacttcttctggcagcgctacctcgataaaaaagagaacgcctcgcacgagatgctcgacgtcaatgagataaccaccaccgccccggcgctgtacgccattctgcctttcacaccgattatcggcgtgctgatttttgacggcaaatgggggccggagttacacatcatcacgattctggtgatctgtatggtgctggcttcagtactggaattcctgcgcagttttgacactaaaaaggtcttcaccgggctggaagccgcctatcgcggcatggcggacgccttcgccagcgtcgtcatgctgttggtcgcggcgggcgtatttgcccagggtctgagcactatcggttttatcgacggtcttatctctattgcgacctcgttcggatccgccagcatcatcctgatgttggtattagtcgtcctgaccatgctggcggcgatgaccaccggttccggcaacgcgccgttttacgccttcgttgagatgatcccgaagcttgcccactcttccggcatcaacccggcctatctgtcgatccctatgttgcaggcatcgaatctgggacgcaccatttcaccggtttccggcgtggtggtggcggtggcgggaatggcgaagatttctccgttcgaagttgttaaacgcacctcggttcccgttatcgtcggcctgttagtggtgatcatcgccaccgagattctggtccccggcgccgcgattcaataa

SEQ ID NO: 86931 - DNA, 798 bp, Enterobacter aerogenes
atgttcaggaaggatgtcgtcgccattgcccttttactcggcgcaacacaggttggcgcagaaccgcttaccgcgacgaaatacggtgatttcgatcgttacgtgctggcattgtcctggcaaaccggtttttgtcagagcatgctggatagaaatcgtaatgaaccagaggagtgccggctacagcaggaagaacgcaacaaagccgattttctgacggtacacggcctgtggccgggcctgccgaagtcgatcgcctcgcgcggcgtcgatgagcgccgctggatgcgctacggctgcgcgacgcgccctatccccaatatgccggaagtcagagccgggcgtaaatgccaggccgcggaaaccgggctatcgctggaaatggccaataagctgaatagcgtgatgccggggtccggcggcaactcctgcctggaacgctatgagtatgccaaacatggcgtctgtttcggcttcgatccggatagctacttcggcacgatggtgcgcctgaatggcgaagtgaagcaaagcgcaatcggcgattttctggcgaaacattacggacaaaccgttagccgtagcgattttgatgccgccgtcgccaaagcctatggcgcgcaaaacgtgaaagcctttaaattaacctgtgacggcaatcccgcttatttaacggaaatgcaaatctccatcaaagctagcgcgatcaatgctccgctgggcgcagattcgttcctgccgcagccgcatccgggcaactgcgctaagcagtttgtgctggacaaagtcggttcttga

SEQ ID NO: 86932 - DNA, 411 bp, Enterobacter aerogenes
atgaccagacccgcaatcattattaatgaattcgatgctgaacgtatcgatagactgcttgaacagccggcatacgcgaattcgccggtcgccgatgccctgaacgacgaactggaccgcgcgcaaatgctggcgccggaagcaatgccgcacgacgtcgtcagcatgaacagcaaagtccgcttccgcgacttaaccagcggtgaagaacgcgtgcggactctggttttcccggcgcaggcgaccgatagcgccactcagctttcggttctggcgccggttggcgcagcgctgctcgggctgaaagtcgggacctccattcattgggagttacccggcggcgcatcggcgcatctggaagtgctggaactgctgtaccagccggaagccgcaggcgaattccaccgctaa

SEQ ID NO: 86933 - DNA, 429 bp, Enterobacter aerogenes
atgtataaaactatcattatgccggttgatgtctttgaaatggagctgagcgacaaggctgtccgccatgcagagtttctcgcccaacaggacggtattattcatttacttcacgtcttacccggttcatccagcttcaccatgagccgttttaccgccgatctgcgccgctttgaagagcatttgcagcatgaagcggaaacccgcttgcagaccatggtcggccacttcagcatcgacccttcacgcatcaagagccatgtgcgtttcggcaacgtccgcgatatggttaatgaactggccaatgaaatcaaagctgacgtggtagtcattggttcacgtaatccgtcgatcagcacccatttgctgggttcaaacgcctcaagcgtgattcgtcatgcccatattccggtaatggtcgtgagataa

SEQ ID NO: 86934 - DNA, 1566 bp, Enterobacter aerogenes
atgctcgacaccaacatgaaaacccagctcaaggcctatcttgagaagctgaccaaacctgttgagctgattgccacgctggatgacagcgctaaatcggcagagatcaaggaactgttggctgaaatcgctgaactgtcagacaaagttacctttaaagaagacaacacgctggcggtacgtaagccatcgttcctgattactaacccaggttccaaccaggggccgcgttttgctggttctcccctgggacatgagttcacctcattagtgctggcgctactgtggaccggcggtcatccgtcgaaagaagcgcagtcgctgctggagcagatccgcaaccttgacggtgattttgaattcgagacttactactcgctctcttgccacaactgcccggacgtggtgcaggcgctgaacctgatggcggtgctgaacccgcgcatcaaacacacggcgattgatggtggaaccttccagaatgaaatcaccgatcgcaacgtgatgggcgtaccggcggtgtttgtgaatggtcaggagtttggtcaaggtcgtatgacgctgactgaaatcgtcgccaaagtggataccggcgcggaaaaacgcgcggcggaagagctgaacaaacgcgatgcttatgatgttctgatcgtcggttccggcccgtctggtgccgcggcggcggtatactccgcgcgtaaaggcattcgtaccggcctgatgggcgaacgtttcggcggccaggtgctggataccgtagatatcgaaaactatatttccgtaccgaaaaccgaaggccaaaaactggctggcgccctgaaagcgcacgtcagtgaatatgatgttgatgtgattgattcacaaagcgcggcaaaactgatcccggcagccgtcgaaggcggcctgcatcagatcgaaaccgcctccggcgcggtgctgaaagcgcgcagcgtgatcatcgcaaccggcgccaaatggcgtaacatgaacgtacctggtgaagaccaataccgcactaagggcgtaacctactgcccgcactgcgacggcccgctgttcaaaggtaaacgcgtggcggtgattggcggcggtaactctggcgttgaagcggcaattgatttggcgggcgtcgttgaacacgtgacgttgctggagttcgcgccaggaatgaaagccgaccaggtgctgcaggataaagtacgcagcctgaaaaatgtcgatattattctcaacgcccagaccactgaagtggttggcgacggtagtaaggtgacggggctacagtaccgcgaccgcgtcagcggcgatgagcatcatgtcgcgttagccggtatttttgtccagatcggcctgttgccgaataccaactggctggaaggtacggttgagcgtaaccgcatgggtgaaatcatcattgatgccaaatgtgaaaccaacgtgaagggcgtgtttgccgccggcgactgcactaccgtgccgtacaaacaaattattatcgccactggcgaaggtgcgaaggcttctttgagctcatttgattatctgattcgcaccaaaaccgcataa

SEQ ID NO: 86935 - DNA, 564 bp, Enterobacter aerogenes
atgtctttaattaataccaaaatcaaacctttcaaaaaccaggcattcaaaaacggtgaattcatcgaagttaccgaaaaagacactgaaggccgctggagcgtcttcttcttctacccggccgacttcactttcgtttgcccgaccgaactgggcgacgtggctgaccattacgaagagctgcagaaactgggcgtagacgtttactctgtttctaccgacacccactttacccacaaagcgtggcacagcagctctgacaccatcgctaaaatcaaatacgcgatgatcggcgacccgactggcgccctgacccgtaacttcgacaatatgcgtgaagatgaaggtctggctgaccgcgcgaccttcgtcgttgacccgcagggtatcatccaggcaatcgaagttaccgctgaaggtatcggccgtgatgcgtctgacctgctgcgtaaaatcaaagccgctcagtacgttgcttcccacccaggtgaagtgtgcccggctaagtggaaagaaggcgaagcgacgctggctccttctttagatctggttggtaagatctaa

SEQ ID NO: 86936 - DNA, 753 bp, Enterobacter aerogenes
atgttaaaacgactgctttttctgagcctgctgccgttgtgtagctatgccgaagacctccccgcccccgtaaaagcaatagaaaaacagggtattactatcattaagccctttgaagcccccggcggcgtcaaaggctggctcggaaagtatcaggatatgggcgttgctatttatctcacccccgacggtaagcacgccatttccggctacatgtacgacgaaaaaggcaacaatctgagcgaacagcttttccagaaagaactctataccccggccggacaggcgatgtggaaaaaactcgagtccgctgactggctacgggaaggtaaaaaagaggcgcccatcgtcctttatgtgtttgccgaccctttctgcccctactgtaaacagttctggcaacaggcgaggccgtgggttgaatccggtaaggtgcaactacgcaccttattggtcggcgtgattaaaccagagagcccggccaccgcggcagcgattctggccagcaaagacccggcgcaaacctggcatgattacgaacagtccaacggcaaactgaagctgaacgtaccgacagatatccctgcggccttgatgaggaccctgaatatcaaccagcagctgatggatgaccttggcgctaacgccacgccggctatttactatatgaataaagataacatgttgcagcaggtagtgggactacccgataaagagaaactgcaggtgatgatgggtgaaaagcagcagtaa

SEQ ID NO: 86937 - DNA, 903 bp, Enterobacter aerogenes
atggccaacctttatgatttaaaaaaattcgatctaaacctgttggttatcttcgagtgcatttatcaacatcttagtatcagtaaagcggcggaaacgctgtttattactccttccgcggtaagccagtcactgcagcggttacgtaatcaattaaacgatccgctatttgtgcgttccggtaaaggaattaccccgacgaccgtgggcatgaacttacatcatcacctggaaaaaaacctcaaccaattagaaaaaacaattaatatcgccaatcattctgaattaagtaaacgatttgtaatttacagcccgcaacttcttatatcaccagcaaccatggatttaattaataaattgcacatggacccgaatctgcaaatcgatcaccgcgatctactcctgtcgccagaaagcgttgaagatctgatggcctatcgtaaagcggatctgatttatagtattacgcctctttctaatcacagtactatttgccagccttttcaggaattagaaattgcgctggtttgtcgggaaggccaccctcgtgcagatcatcttaattcatttgaagaggtgtctcgggaaggatttacgctttacacctcatctgacccgaatgtaaaggcctttcaacagcacgggagcgatctcatgcctgaaagaagaattgcgtttcgcagcaactcgctaatagctattttaacgatgatcaatcagagcgatcttattggttttgtcccgaagcacgcattaagttattttagcgcgtcatttaaattccgcgaaatcattttgcctgacccgatccctccggtaatggcctatatgatttataatcgttcatcattaaacaaccccaaatttgccgaatttattacgcaaaataccgcagtcaactaa

SEQ ID NO: 86938 - DNA, 1224 bp, Enterobacter aerogenes
atgtctttggtaaaaattccattacccgagtccgttcttcaggctagccagcagcggatacagtgggtattagaaaatttttcacgcatttgcatctctttctccggcggaaaagactccaccaccatgctgcacctggcggcgctttgcgcccggcaaatgggaaaaaaattcaacgtgttgtttattgattgggaggcgcaattttcctgcaccattcagcattgcgaaaatatccgtaccgaataccaggatgttattgagaaattttattgggtcgccctaccactcaccacgcaaaattcactgactcagttttcgccggagtggcaatgctgggagccgggtgtcaactgggtacgccagccgcccgctgacgccattaccgatcccggctatttcccgttttatagcagcggaatgagcttcgaagagttcgtccgtgatttcgccgactggttttcacaaaaccgtccggcggcgatgatggtgggtatccgggcagatgaatcgcttaatcggtttatgaccatctcatctcagcgcaaactgcgctttgccgatgataagccatggacgacatcggcgccgggcggccatacctggtacatctacccgatttatgactggaaaaccgccgatatctggacgtggtttagcaaaagcggtcatacctataaccccctttacgatctgatgtatcaggccggggtgccgctgcgctatatgcgcatctgcgaaccctttggcccggagcagcgccagggtctctggctgtatcatgtgctggagccagaacgttgggcagccatttgccagcgcgtaaacggcgtgcacagcggtggtatttacgcagggtacgacaacaaattttatggccaccgcaaactcgataaacccgggcaccacagctggaagagttacgccctgttcctgctggatagcatgccgcggccaaccgccgagcattatcgtaataaaatcgcggtctatctgcattggtatcaaaaacagggaatggaggatatccccgatagccaggagagcgacatcggcacccgggatatcccttcatggcggcgcgtctgcaaagtgttattaaacaatgattactggtgtcgccagctctcatttagcccaactaaagccacccgctataaaagctactgcaagcgcataagtaaaaaacgccaacaatggggactgctatgcaacaacgactaa

SEQ ID NO: 86939 - DNA, 627 bp, Enterobacter aerogenes
atgcaacaacgactaattacccaaatagaagagtatctggcagcgctgccggaagaggaaaaaatcgacgcgctgaatcactttcgccaggctctgcaccgccatagcccctttcacaaccagccggttgactgcgtgctatgggttaaagaggaagaggtggttcccaacgattacaaccctaataaccttgcgccgccggaaaagcggctgttattaacttcgctggaggccaatggtttcacgcaaccgatcgtggtgcagaatcaacagtcaaaacgctataccatcgttgacggttttcaccgctacgaactggcgggcagcaagctgtcgctgaaaaaacagctcaagggatatttgccggtaacctgtctgtcggcgaacagccccccgcgcgatgccctgatggccgctactatccgccacaaccgggcgcgcgggcgccatcagatccacgcgatgtcggaaattgtccgcgagctggccaatctcggctggagcaatagcaaaatcagcaaagagctggggatggatgccgatgaagtgctgcgcctgaagcaaattaacggcctggccgagatgttcgccgaccgtcaattttctcaggcatggacggtgaaatag

SEQ ID NO: 86940 - DNA, 1161 bp, Enterobacter aerogenes
atgagcaataagccactgattcctgagagtaaactccctgcattaggcaccaccatttttacccagatgagcgcgctggcgcagcagcatcaggccatcaatctatcacaaggtttcccggattttgacggcccgcggtacctacaggaacggttggcctggcacgtcgcccaggggtctaaccagtacgctccgatgaccggcgtaccggcgctgcgcgaagccattgccgataaaaccgctgagctgtatggctatcgcccggatgcgaatagcgatgtcaccgtcaccgcgggggcgaccgaagcgctgtatgcggcgatcaccgcgctggtcagagccggcgatgaggtgatctgctttgacccgagctatgacagctacgcgccggcggtagaactttccggcggggtgctgaaacgtattgctctgcagccgccgcatttccgcgttgactggcagcagtttgccgccacgttaagcgaccgcacccgtttggtcattcttaatacgccgcataatccatcagccacggtctggcagcgggaagattttgccgcgctgtggcaggcgatctctgaacgggaaatctacgttattagcgacgaagtgtatgaacatatctgttttgcagagcagggccataccagcgtgctggcccatccgcagctgcgcgagcgggcggtagcggtctcttctttcggtaaaacctttcacatgaccggctggaaagtggggtattgcgtggcgcctgccgccatcagcgccgagctgcgtaaggtgcaccagtatttgacgtttgccgtcaatacgcccgctcaattggcgctggcggatatgctgcgcgcgcagccggagcactaccgcgagctgcctgcgttttatcggcagcgtcgggatctgtttatcgatgcgctgcgtgatagccggctggagattttgccttgtgaagggacctacttcttgctggccgactatagcgcgatctctgaccttgatgacgtcagcttctgtcgctggctgaccactgaagtcggcgtggcggcgatcccgctgtcggtattctgtgccgatccgttcccgcataagctgattcgcctgtgcttcgccaagcagccggagaccctgcaggcggcagcagagcggctgcgtcgcctgtag

SEQ ID NO: 86941 - DNA, 690 bp, Enterobacter aerogenes
atgatccgcgctatcgtgaccgatattgaaggcaccaccagcgacattcgcttcgtccataacgtcttattcccctacgcccgcgagcggctggccgcttttgtcagcgcgcagcagtatgtcgagccggtcagtaccattctcgacaatctgcgtacagaaatcgccgctcccgaagccagtaccgcagcgcttatcgagacgctattccgcttcatggacgaagatcgtaaatccacggcgctgaaagcgctgcagggcattatctggcgcgagggctatctgaacggcgactttaccggccatctttatcccgatgtactcccggcgctggagaagtggaaggcgatgggcattgatttatatgtatattcctcaggctcggtcgccgcgcagaaattgttatttggctacagcgacgaaggtgatattactcatctcttcagcggctatttcgataccctggtcggcgccaaacgcgaagttcaatcctatcgcactatcgccgaacaactggggcatagcccggcgagcattctgttcctctctgatatccatcaggaactggacgccgccgaagcggcaggtttacgcaccctgcagctggtacgcggcgaccgcgacccggccagccatcatccacaggttcagcgttttgacgacatcgacccggagcaacttcccgcatga

SEQ ID NO: 86942 - DNA, 543 bp, Enterobacter aerogenes
atgagcgaattaactattttttccgttaacgacgccagccatccacgctggcacagcagcaacgccgatgagatccagcagcaattgcgcgcaaaaggggtgcgcttcgagcgctggcaggccgatcgctacctgggcccggcgccaaccgctgaaaccgttattgcggcctatcagcacgcgattgataaactggtggctgaaaagggctaccagagctgggatgtcattagcctgcgggcggataatccgcagaaagaggcgctgcgggctaaattcctcaatgagcatacccatggcgaagatgaagtacgcttctttgtcgaaggcgccgggctgttttgcctgcatatcggcgatgaagtctttcaggtgctgtgcgaaaagaacgatctgatctccgtcccggcgcatacgccgcactggttcgatatgggttcggagccgaatttcaccgccattcgtatttttgacaatccggaaggctggatagcgcaattcaccggcgatgctatcgccgatgcctatccgcgcttaccctaa

SEQ ID NO: 86943 - DNA, 606 bp, Enterobacter aerogenes
atgtggcaagagcgactcgcacaactggtgaccacctgtcactggattggcgcaaaagggtgggcgccggcgaccggcggcaatatgtcagtacgcgaggatgcgcgctggtgttggttaagtgaatcggggcgcgataagggcagcctgaccagcgacgattttttacaggtggacatcgccagcaatcgcgcgccgtcgggccgtaaaccgtcggcggagaccggcttgcatacgctggtttatcgcctgtttcctgaagcgaacgtcgtgctgcacgtgcataccgtgcacgctacggtgctctcacgtcttgaaaccagcgataccctgcagctgcagggctatgaaatgcaaaaaacgctgagcgggcagcatagccatctcgatagcgtaccggtggcgatttttgataacgatcaggatattgaggcgctggcggagcgggttgaagcgtatgcccgtagccatcctttgcgttatggatttttgatccgcggccacggcttaacctgctggggcagggatgttagcgaggcgcggcgtcagctggaagggctcgagtttctcttcgaatgcgagctgctgcgccgccgctatgcataa

SEQ ID NO: 86944 - DNA, 1026 bp, Enterobacter aerogenes
atgcagacactacagaccaccagcctgcgggtaagcgaaaatcagctttttattctcgatcaacaggcattgccgcaggaaaaacgctggctggcggcggataacgttgcgctgctggtggaccatattcatgctttgcgggtgcgcggcgcgccgttgattggtctctccgccagtctgctgctggcgctgttggcgcagcgcggcttatcccgcgacgagctcactcaggcgctggaaaccctgcgcgcggcgcggccgacggcggtcaatctaatgaataatctcgatcgtatgaagcaggcgctggcgcaggaagactatccgcaggcgctggagagcgaagcgctgcgcctgattgcggaagataaacagctgtgcgccagcattgccgaagctggcgatgcgctggtaacgccgggtagccgtttgttgacccactgtaataccggtggcctggcgacggcgggggttggcaccgcgctgggggttatcgctttggcctatgaacagggcaaggtggttaacgtctgggtcgatgagacgcggccgctgctgcagggcgggcgcctgaccgcctgggaattgggggagctgggtgtgccgtatcagcttattaccgactcgatggccgccagcctgatggcgcaggggcaggttgatgcggtatgggtcggcgcggatcgtatcgccgccaatggcgacgtggcgaataaaattgggacctattcgctggcggtgctggctcactatcatcgtattcctttctacgtggcggcgccgcaaaccactctcgatcgctactgcccgaacggcgcggcgatcccgattgaacagcgtgcggcgcaagaggtgaccggcgtaaaaggcagctttggcgccgtgcagtgggcgccagaaaacgcgccggtttataacccggcctttgacgtgacgccagctgcgttaatcagcggttgggtgctggatagcggcgtggtcacgccacagcaggtggcggacggtatttttgcgccgctggcgtaa

SEQ ID NO: 86945 - DNA, 1200 bp, Enterobacter aerogenes
atgtcgcaataccataccttcacggccagcgatgcggtggcttacgcacaacaatttggcgggctcgacgatccgtctgagctggtgtcggcgcaggaggtaggcgacggcaatctcaatctggtgttcaaaattttcgatgctcagggcgtgagccggattattgttaagcaggcgctgccctacgtgcgctgcgtcggcgaatcctggccactgaccctcgaccgcgcgcgcctcgaagcacagaccctggtcgcccactatcagcacagcccgcagcatacggtacacattcttcatttcgatcccgctctggcggtgatgataatggaggacctttccgatcaccgtatctggcgcggcgagcttatcggcaacgtctactatccgcaggcggcaggccagttgggcgaatatctggcgcagacgctgttccacaccagcgatttctatctccatccgcatgagaaaaaagcgcaggtggcgcaatttatcaatccggaaatgtgcgagatcaccgaggatctgttttttaacgatccgtatcagatccacgagcgcaataactatccggcggagctggaagaagaggttgccgccctgcgtgaggacgctcagcttaaactggcggtcgcggcgctgaagcaccgctttttctcacaggccgaagccctgctgcacggcgatattcatagcggctccatcttcgtcgctgaaaatagccttaaagccatcgatgccgaatttggctatttcggccctatcggttttgacgtcggcaccgccattggcaatttgttgcttaactattgcggtctacctggccatctcggcattcgcgatgccgccgccgcgcgcgaacagcggctcaacgatatacagaccttgtggcacactttcagcgagcgtttccaggcgttagcaacggagaaaacacgcgatgcggcgctggcctgccccggttacgcctcagtattcctcaaaaaagtatggtgcgatgccattggattctgcggaactgaactgatacgccgcagcgtcgggctttcacacgtcgccgatatcgattcgattccggacacggccatgcgccacgaatgcctgcgccatgcaattacgctcggcaaagcgctgatcgtcatcgccgagcgtatcgatagcgtggacgaacttatcgcccgcgtacgtcagtacagctaa

SEQ ID NO: 86946 - DNA, 1065 bp, Enterobacter aerogenes
atgaaaaagatagcactttctcttatggcgctgggcctgctgcagtcgatggcagcgttggcgcagaccccgacgccggttccggcggcgattgctgagcataacggcccgatccgcatcgcggtgattcgcaatctcggttctgacgataacactacccagtttgtcgccggggcgattcaggaaggtaaaaagctcggttttaaagtcagcgccttcctgagcaacggtgatgacgccaaattccaggacttcgtcaatcaggccattagccaaaaatatgacggtattattctttcccaggggcgcgatccctactcgaccgcgctggtgaaaaaagcggtcgatgccgggatcaaagtggcggtgttcgataccgcggtgcagggatccgtccccggcgtgacggttagccagcaggatgacgcctcgttgaccgagctctcttttggccaactggtaaaagacttcaacggcaaggccaacattatcaagctatgggtggcaggcttcccgccaatggagcgccgccaggcagcctaccagacgctgcttaaacaaaatccggggattaaagagctggagtctatcggcgccgtatcatccgacgtgcagggcgacacggccaacaaagttggcgcgattctggctaagtatcctaaaggtaaaattgacgccatctgggggacatgggatgcctttagccagggagcctataaggcgctgaaagaaaatgggcgcagcgaaatcaaactctacagcatcgatatttccaatcaggatttacagctgatgcgggaggcagatagtccgtggaaggttagcgtggcggtcgacccgaaactcattggcgccaccaacgtacgcttgattgccaataagattgccggggaaagcaccccggctacctacgatttcaaagcggcggccattccgcaggcgctgctggcggcacagccgggggcggtcaacgtggcgtcgctggggaaaatcatcccaggctgggggcagaccgaagtttttattgccccgtggtttgccacgctggaagcccaacataaataa

SEQ ID NO: 86947 - DNA, 999 bp, Enterobacter aerogenes
gtgagcaaggccctggcagtcaacgcgacggtatcgggccgtcagcggtttttcgattttctctataaatggggcatgttgctgaccgtggtgctgctggttggcgtctttggtttagcctcagataactttcttgacccctttaacatcatcaacattctgcgctccatcgctatcgtgacggtgattgccattggggtgtcgatttcgctcactatcggcggtttcgatctgtcggtggggtcgacggcgtcgctggcgaatgcgttagtgatttcgttgtttgtctggcacggcctgaacaccactgaagccattctgattaccctcgcgctctgtacgctggtggggttattcaacgcgtttctgatcgtggtgctgcgcattcctgacatgctcgccacgcttgccagcctgtttgtgattcagggggtggcgatgacctacagctacggcggctcgatcaccgaaaatatggtgttgccgagcggcgatatggctgaaggcacgattccggcggcgtttggcgcgctggggcaggtaccgaccatcgtcattatcatgctggtggtaacgctaatcgcgcagctggcgctgtcgttcaccacccacgggcggcggatgtacgccatcggcggcaacccggaggcggcgagactctccggcctgcggatcacgcgctataaagtggcggcctacgtgattgcctcgctgctggccgggctgggcggcattctgctggcatcaaggattggttcttcccaggtgaacgccggcggcggttacctgatggacgcggtcgcggcggcgtggatcggcttttcgctggcgggctccggcaagccgaatgcgctgggaacgctggtgggagcggttatccttggcgtgctttccaatggcctggtgatgctgtcggtgccctattacgcgatggacattattaaagggctggtgctggctggcgcgctggcactgacctattttcagcgccgtacctaa

SEQ ID NO: 86948 - DNA, 1503 bp, Enterobacter aerogenes
atgagcgtgaatcgccttgagatgcataacattagcctggccttttccggctttcaggcgctgagcaaggtggcgtttacccttaagggcggaacggtgcatgcgctgaccggcgccaacggcgcaggcaaatcgacgctgatggcggtgttgtgcgggacgcatgccgattacgaaggtgaagtggtgatcaataaccagccggttagcattcgttcgccgcgcgatgcaaagcaactggggattcatctggtgcagcaggaggtggatgttgcgctggttccggggctgagcattgcggaaaacatcatgctggacaggctggctgaaccgggtgcggtttttcgctggtcgcgggtgcgtcagcaggcgcgcgaagcgctggcgcagcttgatattgcgctggacgttcgacgttcaatcgatagctgtacccttgccgaaaagcagcaaattctgctggctcgcgcactgtcgcaccactgccgttttttgattcttgatgaacccaccgcgcccttggatcagcacgaaagcgaacgcttatttgcggtggttcgtcgtctgcagcagcaggggatcggcgtggtctttatttcgcatcgtattcatgaactgaaagcgatttgcgacaccctgacggtgctgcgcgatggccgtttaatcgaaagcgggccgatggccgaactcagcggcgaacagatcgtcgaaaaaatgctcggccacgagttgagcgatattttcccgcctgcgcgtccgccgcatggcgaagaggtgctgttaaaggttgacggtttgcatgacgaagcgctgttgcaggatatctcgctacgcctgcataagggggaaattctcggtatcgccggcttggcgggcgcggggaaaactgaactctgcaaagccttattcggcgccagcaaaagccgactgcgctacggcgaacttaacggccagccgtggcggccgcgcgatccggccgattccgtcctccaggggctggcgctggtgccggaagagcggcgcaaagaggggatattcatcgatgaggcgatcgccatgaatctggcggtcagcgccgataacagcttttcgcgctggaacctgttcggccatcggcaggcgtggcggtgggcgcaggaggttattgcccgtatcggcgtgcgcgccaccgggccggggcagacgctacgtcggctttccggcggtaatcagcaaaaagtagccatcggtaaatggctgcgcggcagcgcaaacgtgctgattttcgacgagccgacgaaaggggtggacgtgaaagcgaaaaccgatctgtttcagttaattgatggcctggcgcgggaggggcggggcgtgatttacgcctccggcgaattttccgagctggtgggcctgtgcgatcgcatctgcgtgttatgggatgggcgcattgtggcggaaattcccggcaccgaagcgcgggaagagacgattctttattactccaccggaggagcggcagcgtga

SEQ ID NO: 86949 - DNA, 744 bp, Enterobacter aerogenes
atgcagatcgatttaacaggtaagaaggcgctggttaccggcgccagccgtgggttgggtcgcgctattgcgctgtcgctggcgcgcgccggcgccgatgtggttattacgtatgaaaaatcggccgataaagcccaggcggtcgccgatgaaattaaggcgctgggtcggtacggcgaagcggtgcaggccgacagcgccagcgcgcaggccattcaggatgccgtcacccatgcggcccgggccctcggcgggctggacattctggtcaacaacgctggcatcgcccgcggcggtccactggaatccatgacgctggcggacattgacgaccttatcaacgtcaatattcgtggggtggtcatcgctatccaggaagcgctggtgcatatgtccgatggcggacggatcatcaacatcggcagctgtctggccaaccgcgtagccatgccgggcatcgcggtttacgccatgaccaagtccgccctcaactccctgacccgtgggctggcgcgtgatttaggccctcgcgggatcaccgttaaccttgtccatccagggccgaccaacagcgatatgaacccggaggatggggaacaggcggaagcccagcgccagatgattgcggtcggtcactacggccagccgcaagacatcgccgcggcggtcaccttcctggccagcccggccgccgggcagatctccggtacggggctcgacgtggatggcggcctgaacgcctga

SEQ ID NO: 86950 - DNA, 303 bp, Enterobacter aerogenes
atgaagattgtctggtcaaaaacggcaaataagcaattttctaaaatcgataatcggtataagaaccgcattaaatccaggctggagaagatgaatgataaagcttcacctatctcggatatcaaaaaattgtcctttcccgaaaaccactacaggctgcgattaggtgattacagagtcatctacacctttggggatccgccggacgatacctgctacgtagtggcggttaaacgccgaaccaccaccacctaccttcatgaggaacataccgaatatgactattcagtacatcaaggatga

SEQ ID NO: 86951 - DNA, 405 bp, Enterobacter aerogenes
atgactattcagtacatcaaggatgaagaaggaaaagaccagtatgtcgtcattccttacagtgattactttcgtatgcgcctggctctgctggagtacgacgacgaggatgaaaacaattgggaagatatttcttatgaatcagatatctatgataacgtaatgctgccaggggatgtctgcgacgtgatgcataaagaaaacgtcagcctgcaggccgcgtggcgtatcctgcgcggactctcacagcgggaggtcgcggctaaactcggcatcagccagtccgcggtgtcacagctggaagcgctggactcccgtccgcagaagcggacccgcgaaaaactggcggcgatttacggctgtacccaggagcaaatcagcctctacttaccgaaagaaggctag

SEQ ID NO: 86952 - DNA, 198 bp, Enterobacter aerogenes
atgttcgacaccctttcaaaagcaggaaaatatttaggccaggcggcgaagatgatgatcggcgtgccggattacgataactacgtcgaacacatgcggatcacgcatccggaccagacgccgatgacctatgaagagttctttcgcgaacgccaggacgcgcgctatggcggtaagggcggggcgaagtgctgctag

SEQ ID NO: 86953 - DNA, 2106 bp, Enterobacter aerogenes
atgaataattcagggaaataccttatctggacactgctctccgtgatcggagcctttgccctcggctatatcgccttaaaccggggtgagcagataaatgcgctgtggattgtcgtcgcggcggtctgcgtttatctgatcgcgtatcgtttctacggcctgtatatcgccaaaaccgtcctcggcgttgacccaacgcggatgacgccggcggtacgacataacgacggcctcgattatgttccgactgacaaaaaagtgctgttcggtcaccattttgcggcgattgccggcgcagggccgctggttggcccggtgcttgccgcgcagatgggctacctgccggggatgatctggatcctcgccggcgtggtgctggccggcgccgtgcaggactttatggtgctgtttgtttcgacccgtcgcgatggccgttcgcttggcgaactggttaaagaggagatggggccaaccgctggcgtactggcgctggtggcctgttttatgatcatggtgatcatcctcgcggtactggcgatgatcgtggtgaaagcattgacccacagtccgtgggggacatacaccgtcgcctttaccatcccgctggcgatttttatgggcatctatattcgctatctgcgcccggggcgcatcggcgaggtgtcggtgataggcctggtgatgctggtgttcgcgatcatttccggcggctgggtggcggaaagcccgacctgggcgccgtggtttgattacaccggcgtacagctgacctggattctggtgggttacggctttgtggctgcggtactgccagtctggctgctgctggcgccgcgcgactatctctccacgttcctgaaaatcggcaccatcgttgggctggcgattggcatcctgattatgcgcccgacgttgaccatgccggcgctgacgaagttcgttgacggcaccggcccggtatggaccggcaacctgttcccgttcctgtttatcaccatcgcctgcggcgcggtttccggcttccacgcgctgatctcctccggcaccacgccgaaaatgttggccaacgaagggcaagcctgctttatcggctacggcggcatgttgatggaatccttcgtcgccattatggcgctggtggcggcttgtattatcgatccgggcgtctacttcgcgatgaacagcccgatggcggtgctggcgccggcgggaaccaccgatgttgtggcctcggcggcgcaggtggtgagcggctggggctttagcataaccccggatacgctgcgccagattgccagcgaggtcggcgaacagtcgattatttcacgcgccggcggcgcgccgacgctggcggtggggatggcttacattctgcacggctcgctgggcgggctgatggatgtctctttctggtaccacttcgccattctgtttgaggcgctgtttatcctgacggcggttgatgccggcacccgcgcggcgcgattcatgctgcaggatctgctgggcgtggtgagtccggggttgaaaaaaaccagctcgctgccagctaacctgctggcgaccgcgctgtgcgtcctggcgtggggctacttcctgcatcagggggtggtcgatccgttgggcggcatcaataccctgtggccgctgttcggtatcgccaaccagatgctggcggggatggcgctgatgctgtgcgcggtggtactgttcaagatgaaacgccagcgctatgcgtgggtggcgctgctgccgacaagctggctgctgatttgtacgttgaccgctggctggcagaagtcgtttagcccggataccaaagtcggtttcctggccatcgccaataaattccaggcgatgatcgacagcggcgccattccgccgcagtatacggaatcgcagctggcgcagctggtgtttaataaccgtcttgatgccgggctgactatcttctttatgattgtggtggtggttctggcgctgttctcgattaaaaccgcgctggcggcgctgaaagaggataaaccgacggcgaaagagacgccgtatgaagcgatgcccgcggatgcgcagggcttaacggcgcaggcaaaacgcgcgcattaa

SEQ ID NO: 86954 - DNA, 414 bp, Enterobacter aerogenes
atggcctggaaacgagagctcacgcttgcggcgctgaacgccagtagcgaaaacaccatggtggcgcatctgggtattgtctacacccggctggaggaggcgctgctggaggcggagatgccggtggatgcgcgcacgcatcagccgtttggtctgctgcacggcggcgcttccgcggcgctggcggagacgctgggctcgatggccggttggctgatgaccgaagaagggcaatgtgtggtgggcaccgagcttaacgctacccaccatcgtccggtctccagcggtaaagtgcgcggcgaatgccgaccgctgcatcttggccgccagagtcagagctgggaaattgtggtgtatgacgaaaaagggcggcgctgctgcacctgtcgtctgggaaccgcggtgcttggctaa

SEQ ID NO: 86955 - DNA, 756 bp, Enterobacter aerogenes
atggcggcgctggattttcacggccagaccgtgtgggtgactggcgcaggtaaaggcattggctatgccaccgcgttggctttcgtcgaggccggggccaacgtcaccggtttcgaccttgcctttgacggcgaaggttatccgtttgccaccgaaatgctcgacgtcgccgatgccgaccaggtacgcgacgtttgcgcgcgtctgctcaacgatatcgaacgactggacgtgctggtgaatgccgccgggatcctgcgcatgggggcgaccgatcaattgagcgcggaggactggcagcagactttcgcggtgaacgtcggcggcgcgtttaatctgtttcagcagacgatggcgcagttccgccgtcagcggggcggggcgatcgtcaccgtcgcctccgatgccgcgcatacgccgcgtatcggcatgagcgcctatggcgcctcgaaagcggcgctgaaaagcctggcgttgaccgtcgggcttgagctggcaggcagcggcgtgcgctgcaacctggtatcgccgggctccaccgacaccgatatgcaacgtaccctgtgggtcaatgaagatgctgaacagcagcggatccgcggatttggcgagcagtttaagcttggcatcccgctgggcaaaatcgcccgaccgcaggagatcgccaataccattttgttcctcgcctcttctcacgccagccatattacgctgcaggatattgtggtcgatggcggctcgacgctgggggcgtag

SEQ ID NO: 86956 - DNA, 852 bp, Enterobacter aerogenes
atggcaatccctaaattacaggcttacgcgctgccggaagccagcgatattccggccaacaaagttaactgggcctttgagccgtcgcgcgccgcgctgctgatccacgatatgcaggagtatttcctcaacttctggggcgaaaacagcgcgatgatggaaaaagtggtggccaatatcgccgccctgcgcgacttctgcaaacaaaacggcattccggtgtactacaccgcccagccgaaagagcagagcgatgaagaccgcgccctgctgaatgatatgtggggaccggggttgacccgatcgccggagcagcagcaggtgattgccgcgctggcgccggatgaacaggatacggtgctggtgaaatggcgctacagcgcgtttcatcgctcaccgcttgaagagatgctgaaagagaccggccgcgaccagctgatcatcaccggcgtttacgcccatatcggctgcatgaccaccgccaccgacgcttttatgcgcgatatcaaaccgttctttgtcgccgacgcgctggcagatttcagccgcgaagagcatttgatggcgcttaaatacgtcgccggccgttctggacgcgtggtgatgaccgaagaattgttgccgctgccggcctccaaagcggcgctgcgcgcgctaattctgccgctgctcgacgaatccgacgaaccgctggatgatgaaaacctgatcgactacggtctggattcggtgcgtatgatggcgctggccgcccgttggcgcaaagtacacggcgatatcgacttcgtgatgctggcgaaaaacccgaccatcgacgcctggtgggcgctgctctcccgcgaggtgaaataa

SEQ ID NO: 86957 - DNA, 1608 bp, Enterobacter aerogenes
atgattgcatttacccgttggccggaagagtttgcggcccgctatcgtcaaaaaggctactggcaggatctgccgttaaccaatctgattactcgtcatgcggacaatgacgccgtggcgattatcgacggcgagcggcagattagctaccgccagtttaaccaactggtggataacctcgcgtcctccctgcagcatcagggactcaagcgcggagaaaccgcgctggtgcagcttggcaacgtcgccgagttctacattactttctttgcgctgctgcgcatcggcgtcgcaccggttaacgctttgtttagccatcagcgcagcgaactcaacgcctatgccgcgcagattaaaccggtgctgctgattgccgatcgcgagcacgcgctgtttgctgacgatagtttccttaatggttttatcgctgagcatccttcgctgcgtgtcgcgctgctgcgtaacgatggcggcgagcgcgacctggcaacggaaattaaccgcacggcggataactttgtcgccaatccgacgccggctgacgaagtggcttttttccagctctccggcggcagcaccgggacgccgaagcttattccgcgaacccataacgattacgactacagtatccgccgcagcaacgagatctgcggtattaacgccgacacgcgctatctcaacgcgctgccggcggcgcacaactatgcgatgagctcgccgggatcgctgggcgtctttctcgccggcggccgggtgatcctcgccgctgacccgagcgccacgttgtgtttcccgctgatcgaaaaacatcagattaacgtcgcgtcgctggtgccgccggcggtcagcctgtggctgcaggctattcatgaatggggcagcaacgcgcaactgcaatcgctgcagctgctgcaggttggcggagcgcgcctgtccgcgacgctcgccgcgcgtatcccggcggaaatcggctgccagctgcagcaggtgttcggcatggcggaagggctggttaactacacccgcctcaacgatagcccgcagcgaattatcaacacccagggttgcccgatgtgtcctgacgacgaagtgtgggtggcggatgccgacggtaacccgctgccgcgcggcgaagtgggccgtctgatgacccgcggcccttataccttccgcggctattacaacagtccgcaacataacgctgaagcctttgatgccgatggattttactgctccggcgatctgatttcgatcgatgaagatggctatatcaccgtccagggccgggaaaaagatcagatcaaccgcggcggcgagaagatcgccgctgaagagatagaaaacctgctgctgcgccatgaggcggtgatccacgccgcgctggttagcattgaagacaatctgctgggcgagaagagctgcgcttatctggtggtgacatcgccgctgcgcgccgtcgcggtgcgccgtttcctgcgcgagcagggcgtggcggaatttaaattgccggatcgcgtggagtgcgttgccgcgctgccgctgacgccggtgggcaaagtcgataaaaaacaattacgtcagtggctggccgaaggcaagctgggctga

SEQ ID NO: 86958 - DNA, 1176 bp, Enterobacter aerogenes
atggaaacgtcactggctgaggatgtacaggaaaaaacgcagaccctgtcgccgcaaagcttcttctttatgtcgccgtaccgcagcttcagtaccaccggctgttttagccgtttttcccagcctgccgtcggcggtgattcgctgaacggcgagttccagcagaaaatggcagccgcttttgccgaagcccgcgcggcggggatccgcaagccggtcatggtcggggcgattccgttcgacaccaatcagccttccgagctctatattcccgaacgctgggaaaccttctcccgtaccgacaaacagcagtccgcgcgttacgcggcgccgctcaaggcgatggatgttgtcgatcgtcaggagatcccggaacaggacgagtttttggcgatggtggaacgcgccgccgcgctgacggcgactccggaagtcgacaaagtggtgctctcaaggctgattgatatcacgacccgcgaccgggtcgatagcggcgcgctgctggagcggctgatcgcccagaacccggcgagctttaacttccatgttccactgtccaatggtgatgtgctgctgggcgccagcccggaactgctactgcgtaaagaaggactgcacttcagttcgctgccgctggccggctccgcccgccgccagcctgacgatgtgctggaccgggaagcgggtaacaagctactggcgtcgagcaaagatcgccatgagcacgagctggtgacgcaggcgatgaagagcgtgcttggcccgcgcagcagtcatctgtcgctaccagagtcgccgcagctgattaccaccccgacgctctggcatctggcgacgccaatcgaaggtacggcgctggcggaagaaaacgccatgtcgctggcctgtctgctgcatccgactccggcgctgagcggcttcccgcaccaggtggcgaagcggctgattgccgagctcgaaccgttcgatcgccagctgtttggcggcattgtcggctggtgcgatgacgaaggcaacggcgaatgggtggtgaccatccgctgcgcgcgcttacatcaacgctcgctgcgcctgttttccggcgcgggtatcgtcccggcctcttcgccgctgggcgaatggcgtgaaaccggcgtcaaactcaccaccatgctcaacgtatttggcttgaattaa

SEQ ID NO: 86959 - DNA, 960 bp, Enterobacter aerogenes
gtgaattttgccactttttgccgtcgtactttactcgccagcgggctgtgccttttaggaattaactcagcgctggcggcagactggccgcgtcagatcgtcgatagccgcggcactcatacgctggagagcaaaccgcagcgcatcgtctcgaccagcgtcaccctcaccggatcgttgctggctattgatgcgccggtggtcgccagcggcgcgaccacgccgaataaccgcgtggcagacgcgcagggctttctgcgccagtggggcgatgtcgctaaaaagcgcaacctggcgcgactctatattggcgaacccagcgccgaagcggtggcggcgcagatgccggatctgattctgataagcgccaccggcggcgattccgcgctggcgctgtacgaccagctgtcgactatcgcgccgacccttatcatcaactacgacgataaaagctggcagacgcttcttacccaattagggcatattaccggtcacgaaaagcaggcggacgcacgcattgccgagttcaataaacagctcgtttcgttaaaagagaaactaaagttgccgccgcagccggtcaccgcgctggtttataccgccgcggcgcacagcgccaatatctggacgccggaatcagcgcagggtcagatgctggaacagttaggctttaagctggcgacgctgccgggtaacctgcacgccagccagagccagggtaagcgtcacgacatcgtacagttaggcggcgagaatctggcggcgggtatcaacggcgaaagcctgttcctgttcgccggcgaccagaaagacgccgaggccatttacgccaacccgctactggcgcacctaccgtcggttgccgctaaacgcgtttatccgctggggaccgaaaccttccgtctggactactacagcgccatgctggtgctgcagcgtttatcagcgctctttgcctga

SEQ ID NO: 86960 - DNA, 2133 bp, Enterobacter aerogenes
gtgaccactagcaaattgatcaagggcgataccctgaccgaaaccagcaatgcggcagatggttttaacccggcaactgaagtcagcaactacagctatacgtcagaccgcgtcgctaaaccggtctataacaaatacaaaagcgcgaccaacaaaccaaaggtcttcggttactacaccgactggtctcagtacgatggccgcctgcagggcagcgatgcgaaagataaccgcggacgcggctacgacctgaccaacgtctcccctaccgcttacgataaaatcatcgttggcttcgtcggcgtaaccggcttccataaagtggatggtctgtatcgcgatgtggtagccgaaggggctgagcagtgcggcaaagtcaaatatgaaccgaccttcctcgacccgtggggcgacttccagtcttacgttaacgttggccacagcgtcagcggctgggatgtcgatccgaaaaccgtaacccagacaaacaccaaaggcctgctcggcggtctgcgcgacctgcaagcgaaagccaaacaacagggccacaacctggtgctgtccatgagcatcggcggctggagcatgagcaacggttttcatgaaaccgcggcatctgattcctcgcgtaaaatcttcgctaaaggcgtggtgaagctgttcaaacagttcccgatgttcagcgaagtggatatcgactgggaatacccgaacgccgaaggcgccggcaacccctacggcccggaagatggtgaaaactatgcgttacttattgccgaactgcgtaagcagctggattctgccggcctgagcgatgtcaaaatctctatcgccagctccgccgtggtgaagacctttgattattccaacgtcaaagcgctgatgaatgccggtctgtacggcatcaacgtcatgacctatgacttcttcggcaccccgtgggcggaaagcatcacccaccacaccaatctgaaagccattgagcaaggcggctgggcgattaacaccatcgttgaacatctgctggcggaaggtttcccggctgagcgcatcaacatcggttacgccggctatacccgtaacggccgcaacgccgagctggaatcgctgtctccgctgaaaggcacctataacccgggtaacggcaccaccgtcggtacctttgaatccggtaccaacgaatggtatgacgtcatttataactacctggatctggaaaaccagaaagggcgtaacggctttaacgtttataccgaccaggtggctgacgctgatttcctctacaatcctgaatccaaactgtttatgtcgctggataccccgcgcaccgtcaaagccaaaggggaatacgctgccagcctggggctgggcggtctgtttacctggactatcgaccatgataacggcgtgctggttaacgccgcccgtgaaggtctgggctacgaaatcgcctctgaagttatcgatatggacccgttctatttcgaaggcattaacgttgtgcctgctgatgaacaagaagacgataagtcagaagatgagccaactgaaccgacggtaaaccatgcgccggaagcggcaattgaaatgatggtcgtaggcggctcccgcgtacgcctgtccggggaaaaatcgtctgatgaagatagcgacgagctgagctacagctggggcgtgccggcagccattgatgttgcggataaaaccgccgcggttattgagttcgatgtaccggaagtcaccgcggataccgagttcactttcacgctgttcgttcgcgatacctggggcgaaccgtcaacccagcagcgctttatcctctccgtcgtcgtggcttccggggacggtcagagtgatgacaagccagccgatgagccggcagatgaacctgctgacgaagaaaaagagactgatgacaccacgcctgcgcaggatgatgacgtggtaccatctgacgacgccacgccttacccgctgtgggatgccaaaaccgtttatggcggcaactggggtacctttgaaaccgtgagttggaaaggccacaactatcaggtgaaatggtggtctcagggcaaccagcctgacctgtactgcggccagttcgacgtctggaaagatctcggcgcgtactaa

SEQ ID NO: 86961 - DNA, 1242 bp, Enterobacter aerogenes
atgaaccgaccttcccggctgcttgatgtcagcctcctgcgcacccatccggcgttccgcgccgtctttatcgctcgctttatttctatcctgtcgcttggcctgctaggcgtggcgatcccggtacaaatccagatgatgacccattcgacctggcaggtggggctctcggtgatgctgaccggctgttcgatgttcattgggctgatggtcggcggcgtgctggccgaccgttatgaacgcaaacgcctgatcctgctggcgcgtggcacctgcggcgtgggcttcgtcggcctgtgcctgaacgctatgctaccggaaccctcgctggcggcaatttacctgctggggatctgggatggcttcttcgcctctttgggcgtgaccgcgcttctggcggcaacgccggctttagtcggccgcgaaaacctgatgcaggccggagcgatcaccatgctgaccgtgcgtctcggttcggtgatatcgccgatgatcggcgggctattgctggcgaccggcggcgtggcctggaactatggcctggcggcggcggggacgttcattaccaccctgacgctgctacgcctgccgcggctgccgccaccgccgcagccgcgcgagcatccgctgaaatcgttgctggcggggctgaaatttctctttaatagcccgcttattggcggcattgcgctgctcggcggcctgttgacgatggccagcgcggtgcgggtgctttatccggcgctggcggaaggctggcagatgtcaaattcgcagattggcctgttgtatgccgccattccgcttggcgcggcgctgggggcgttaaccagcggacaactggcgcataccgcgaagccgggggcgctgatgctgataacgacggtagggtcgtttgtggcgattgcgctgttcagcgtgatgccgttctgggcgctgggcgcgctctgtctggcgctgtttggttggctgagcgcgataagctcgctgctacagtacacgttgatccaaacgcaaacgccggaaaatatgctggggcgcattaatggcctgtggaccgcgcagaacgtgaccggcgatgctattggcgcggcgctgttgggtggattaggggcggtaatgaccccggtggcttcagccagcgccagcggctgggcgctggtgattgttggcgtattactgattggcttattgcgcgagctacgccgttttcagcgtccggagcaggcctgcgaaagttaa

SEQ ID NO: 86962 - DNA, 1008 bp, Enterobacter aerogenes
atgtcgttttctacgaccacggtgcgcgccgtcgccgtgcctggtctcttgttacttttagctctcgcgattgcgctcagcctgcttatcggcgccaaacctctgccgccttcggtgattgtcgatgccttctccggcagctgtcagagcgccgactgcactatcgtactggatgcccgcctgccgcgtacgctggccggattgctggccggctgcgcgcttggcctcgccggcgcgctaatgcaaaccctcacccgtaacccgttggccgacccgggcctgctcggcgtcaactccggcgccagcttcgccatcgtgctcggtgcggcgctgttgggcatcacttcgccgcaggagcagttgctgatggccttttgcggcgccttcgccgcgtcgctactggtcgcgtttaccggcagccagggcggcggccagcttagcccggtgcgcctgaccctcgcgggcgtggcgctggcggcggtcctggaaggcttatctaacggcatcgccctgctcaacccggacgtgtatgaccaactgcgcttctggcaagccggctcgctggatattcgcaccctgcaaacgctgaaaatcgtcctgctaccggtgctgattgccgccgtggtaaccctttttctcagccgggcgctgaacagcctgagtctcggcgccgacaccgccaccgcgctcggcagccgggtcgcgcgcacccagttaatcggcctgctggcgataaccgtcctgtgcggcagcgcgacggcgctggtcggccctatcgcctttatcggcctgatgatgccgcatatggcgcgctggctggtgggggcggatcaccgctggtcattgccggttacgctgctcgccacccccgccctgttgctgtttgccgacgtgcttggccgcctgttggtgcctggtgaattgcgcgtttcggtggtcagcgcctttatcggcgcgccggtgttgatctggctggttcgccgtcagccgcgaggaggtgcgctgtga

SEQ ID NO: 86963 - DNA, 990 bp, Enterobacter aerogenes
atggctccctcccgccgcctgatgttctgctgcctgctgctgatcgccgccagtctgctggtgtccctgctcggtctgggtaatggcctggtgccgctcagcattgaacaggtggtttccgcgctgctcggcgacgcgccgcgcaacgtcagcatggtggtcaccgaatggcgcttgccgcgcgtgctgatggcgctgctgatcggcgccgggcttggcgtcagcggcgccatttttcagtcattgatgcgtaacccgctgggtagcccggacgtgatgggcttcaacaccggcgcctggagcggcgtgctggtggcgatggtgatgttcggccagaacctgaccgccatcgcgctggcggcgatgcttggcggcgtgctgacctcgctggtggtgtggctgctggcgtggcgcaacggcattgaaaccttccgcctgatcattatcggcatcggcgtgcgcgccatgctggtggcattcaatacctggctgctgctgcgcgcgtcgcttgagactgccctttccgccgggttgtggaatgccggttcgctcaacggcctgacgtggggcaaaacctggccatcggcgccgctgatcctgctgatgttagcgtgcggcgcgctgctggcgcggcggatgcggctgctggagatgggcgacgataccgcctgcgcgctgggggttcgagtcgaacgttcacgcctgctgctgatgctggtggcggtgctgctgaccgcttccgccaccgcgctggccgggcctatttctttcgtcgcgctggtagccccgcatatcgcccgacggataagcggcaccgcacgctgggggttaacccagtcggcgctgtgcggcgcgctgctgctggcgctggccgattactgcgcccagcgcctgttcatgccttatcagttaccggtaggggtggtcaccgtcagtcttggcggtatctacctcatcgcgttattaattcaggagtcccgcaaaaaatga

SEQ ID NO: 86964 - DNA, 795 bp, Enterobacter aerogenes
atgaccgctgtaacttcccgtttgcgcggcgaccagttgaccctggcctacggcaaaaagaccatcgccgaatcgctgaacgtcacgattcctgacggccatttcacggcgattatcggccccaacggctgtggtaaatcaaccctgctgcgcaccctcagccgcctgatgaccccgtccagcggccacgtttatctcgatggcgagcagatccagcactacgccagcaaagaggtggcaaagcggattggcctgctggcgcagaatgccaccacgcccggcgatatcaccgtacaggagctggtggcgcgcgggcgctatccgcaccagccgatgtttacccgttggcgtaaagaagacgaagcagcggtaaataacgcgatgcgggcgacgggtattgtcgacctcgcgctgcagagcgtggataccctctccggcggccagcgccagcgagcgtggattgcgatggtactggcgcaggagacggcgattatgctgcttgatgagccgacgacctggctggatatcagccatcagatcgacctgctggaactgttaagcgagctgaatcgcgagaagggatatacgctggcggcggtactgcacgatctcaatcaggcctgtcgttacgccacccatctgatcgccctgcgcgacggtaagatcgtggccgaaggcgcgccgaaagagatcgtcacggcggatctgattgagcgtatctacggtctgcgctgcacgatcatcgacgatccggtggcgcatacgccgctggtagtgccgctgggtcgccgataa

SEQ ID NO: 86965 - DNA, 3882 bp, Enterobacter aerogenes
atgagtacacgtttaccgctggttgcggcgcagccgggaatttggatggctgaacgcctctccacgctacccggcgcctggagcgttgcccactatgttgaactgcgcggcaatcttgatccggcgctgctgagtaaggcgatcgtcgccgggcttaagcaggccgataccctgagcatgcgcttttgcgaagataatggcgaagcgtggcagtgggttgatgacgcgcgcgagtttgccgagccgcaaagcgttgacctgcgccagcaggccgatccgcatatgtccgcgctgacgctgatgcaaagcgatctcgggcagaatctgcgcgtcgacagcggtaatccgctggtctgccatcagctcatgcgcgttggcgacgactgctggtactggtatcagcgctatcaccatttactggtcgatggttttagtttcccggccattacccgccagatcgccgctatttatcgtgcctggcaacgcggcgaagagacgccggattcaccgtttacgccgttcgccgaagtggtggaagagtatcagcgctactacggcagcgaggcgtggcagcgcgataaagccttctggcaggcgcagcgtcaggcgttgccgtctccggcctcgctatcagacgcgccgctggccgggcgggcgaccagcagcgatatctggcgcctgaaactggaggccgatccggctgtcttcagccagctcgcggccagcgcgccgcagtgccagcgcgccgatctggcgttggcgctgacgacgttgtggctggggcggttgtgcggccgaatggattacgcggctggctttatctttatgcgccgcatgggatcggcggcgctgaccgccaccggcccggtactcaacgtactgccgctggcggtgaatatcgacgcgcaggagacgctggcgcaactggcgacgcgtctctccggacaactgaaaaaaatgcgccgccatcagcgctacgatgccgagcaaattgtccgcgatagcggtaaagcggcgggcgacgaaccgctgtttggcccggtgctgaacatcaaagtctttgattaccagttggatatcgacgacgtgcaggcgcagacgcatactctcgccaccggcccggtgaatgacctcgagctggcactgttcccggacgaacgcggcggtctgtcgctggagatcctcgccaataaagcgcgttatgatgaggcgacgctgaaccgccacgtgtcgcggctgaccgcgctgctggcgcagttcgccgccaacccggcgctacgctgcggcgaggcggagatgctgtcggcggaagaaggcgcgcagctggcattgatcaacaataccgcgatgccactgccgaccactaccctcagcgcgctggtagcggaacaggcgcggaaaacgccggatgccccggcgctggcggatgccaactggcgctttagctaccgcgaaatgcgccaacaggtggtggcgctggccaacctgctgcggcaacgcggcgtgaagccgggggatagcgtggcggttgccttaccgcgttcggtgttcctgacgctggcgctgcacggcattgtcgaagccggcgccgcctggctgccgctggacaccggctacccggatgatcgtctgcggatgatgctggaagatgcgcggccttcgctgctgattacctctgacgatcaactggcccgttttagcgatattcctgggctgagcagcttgtgttatcagcagccgctggctgctgaagatgatacgccgctggcgctgtcaaaaccggaacataccgcatatatcatcttcacctccggttccaccggacggccgaaaggggtgatggtcgggcagaccgccatcgtgaaccgcctgctgtggatgcaaaatcactatccgttaaccgccgccgatgtggtggcgcagaagacgccgtgcagctttgatgtctcggtatgggagttctggtggccgtttatgaccggcgcccagctggtgatggcggcgccggaggcgcatcgcgatccacaggcgatgcagcggttcttcacggattatggcgtgaccaccacccactttgttccgtcgatgctggcggcgtttgtcgcctcgctggatagcgataatgtgtcgtcctgccggacgctaaaacgcgttttctgtagcggcgaagcgctgccgacggaactgtgtcgcgaatgggagcgcttaaccggcgcgccattgcataacctgtacgggccgacggaagccgcggtggatgtcagctggtatcccgcctgcgggccagagctggcggcggtaaccggcaacagcgtgcctatcggctggccggtatggaacaccggattacgtattcttgatgccgccatgcgcccggtgccgccgggcgtggcgggtgatttgtacttaacgggcattcagctggcacagggatatatggggcgacctgatctcaccgccagccgctttattgccgacccgtttgcccccggcgagcgcatgtaccgcaccggcgatgtggcgcgctggctggataacggggcggtagagtatcttggccgcagcgacgatcagttgaaaattcgcggccagcgcattgagcttggcgagatcgaccgggtgatggcggcgttgccggacgtcgcgcaggcggtgtgccacgcctgcgtcttcaatcaggcggcggccaccggcggcgatgcccgccagctcgtcggttatctggtgagcgagtccggccagccgctggacgtggcggcgctgaaggcccgtcttagcgaacagctgccgccgcacatggtgccggtggtgttaatccagctggaatccttcccgctcagcgccaacggtaagctggaccgtaaagcgctaccgctcccctccttaagcagcgagcgcagcggtcgcccgccgcaatcggctaccgaaatggccgttgccgcggcgttcagtcagctgctgggctgcgaggtaaatgacatcgacgccgatttcttcgccctcggcggccattcgctgctggcgatgcggctggcggcgcagcttagccgcgagctggcgcggcaggtgacgccggggcaggtgatggtcgcttcgacagtcggcaagctgagcgcgctgctggcttccgacctgagcgacgagcaggcgcagcgcctgggcttcgatgcgctgttgccgctgcgcgagagcgagggtccgacgctgttctgcttccatccggcctccggttttgcctggcagttcagcgtgctggcgcgttatcttaacccgcgctggtcaattaccggtattcagtcgccgcgtccgacggggccgatggcttccgccgccaacctcgacgaagtttgcgagcaccatctgcgcacgcttttagcgcagcagccgcatgggccttactatctgtttggctattcgctcggcggaacgctggcgcaggggattgccgcccgtttacgccagcgcggcgaagaggtggcgttcctcggcctgctggatacctggccgccggagacgcaaaactgggcggagaaagaggcgaacggcctggatcccgaggtgctggcggaaatcgcccgcgagcgcgaagcgtttctcgctgctcagcaggggcaggcttccggcgagctgttcagcgcgatcgaaggtaactacgccgatgcggtgcgcctgttgacgaccgcacacagtgcgaagtttgacggcaagacaacgctatttgtggcggagaaaacgcgccagaaagggatggatccgcaggtcgcatgggggccatgggttggcgagctggaggtgttcagccagaactgcgcccacgtcgagattatctcgccgcaggcctttgaagcgataggcccggtagtgcgggagattctggggtaa

SEQ ID NO: 86966 - DNA, 204 bp, Enterobacter aerogenes
atgcaattcagcaaccccttcgacaatccgcaagggcagttttacattctgcgcaacgcacaggggcaatatagtttgtggccgcatcactgcgcgctgccgacaggctggacggtggagtgtccgccgcagtcattagaggcctgtaacgcctggcttgccgccaactggtcaacccttatcccagcgcactacgcctcctga

SEQ ID NO: 86967 - DNA, 1221 bp, Enterobacter aerogenes
atgcaaataacgggaagtgacgactggtggcgggggatcgccggcccgcagacagaggcgctgggcgacgcatatcgggtgaccttctggtggcgcgatccggcaggcagcgaaaccacgtcgccgattcggcgggtgtggatttacattaccggcgtcaccgatcatcaccacaacgcggcgccgcaaaccctgcaccgcatcccaggtaccgatgcctggtgctggcaaaccacgctccccgccagctggcgcggcagctactgttttattccctccgaacgcgacgacgatttttccccgcagctctttaacggtgaagcgccggaccgcgcgctgctgcgcgaaggctggcgcaaactgctgccgcgggcggttgccgatccccgcaatccgcaaagctggaagggggggcgcggccacgcggtctcagcgctggaactgccgcaggcgccggaacagccgggttggcattatcgcgagccggtttcgccagcgccgcgctgtattgaatggcgcagccagcgattaggaaaccagcgacgagtgtggatttacaccaccggcagtggggcggatcgcccgctggcggtcctgcttgacggccagttctgggccgaaagcatgcctgtctttgcgccgctggcggggctgacgcgggaaggccgcctgccgccggcggtctatgtgctgatcgacgttatcgacaatcaacaccgcggcgtggagctgccctgcaatcgtgatttctggctggcggtacaggaagaactgctgccgctggtgcaggccgtggcgccattcagcgatcgcgccgacaggacggtagttgcggggcagagcttcggcggtctggcggcgatgtatgccgcgctccactggccgcagcgttttggctgcgttctgagccagtcggggtcgtactggtggccgcagcgcggcagtagccagccgggagtgatacttgaacaactgcagcgcggcgagcttcgaccgcaggggctgcgtatctggctggaagccggcgtgcgcgagccgattatttttcgcgccaaccaggcgcttttcgcgcaactacggcagaccacgccgtccgttttctggcgccaggttgacggcggtcatgacgcgctatgctggcgcggcgggctgacgtccgggcttatccagctgtggcagcctttgcgccgcgggcaacaacacgcgcttaatgaggagtga

SEQ ID NO: 86968 - DNA, 2229 bp, Enterobacter aerogenes
atgaataacaggattaagtccctggccttaatggtcaatctgggtatctacggggtggcattcccgctgtgcgcggcggaagaaaccaccgacagtaaacaagccgccggtgaagaaacgatggtggtcaccgccgaggtgcaaaacctacaggcgccgggcgtttccaccattaccgccgatgaaattcgcaaacgtccgccggcgcgcgacgtctctgaaatcatccgtaccatgccgggcgtcaacctgaccggcaactccaccagcggccagcgcggcaacaatcgccagattgatattcgcggtatgggcccggaaaacactttaatcctgattgatggtaagcccgtgaccagccgtaactctgttcgtctcggctggcgcggcgaacgcgacacccgcggcgataccagctgggtaccgccggaaatgatcgaacgtatagacgttatccgcggcccggcggcggcgcgttacggtaacggcgcggcgggcggcgtggtcaacatcattacgaaaaaattcgacaaccagtggcatggttcgtggaacgcctacatgaacatgccggagcataaagacgaaggcgcgaccaagcgtaccgactttagcctcagcggcccgctgggcggcgatttcagcttccgcatgtacggtaatctcgataaaactcaggctgacgcctgggatatcaaccagggccatcagtctgaacgtaccggcatttacgccgataccctgcccgccgggcgtgaaggggtagaaaacaaaaacatcaacggcgtggtccgctgggatttcgcgccgatgcagtcgctggagtttgaagctggctatagccgccagggcaacctgtacgccggtgatacgcaaaacaccaacagcaacgatctggtgaaagagaactacggtaaagagaccaaccgtctctatcgcaatacttactccgtgacctggaacggcggctgggataacggcgtgaccaccagcaactgggcgcagtacgaacacacccgcaactcgcgtaaaggcgaaggcctggcgggcggcaccgaggggatcttcagcagcaaccagttctcggatatcgatctctccgacgtgatgctgcacagcgaagtcaatatcccgttcgatctgtgggttaaccagaacctgacgctgggtaccgaatggaaccagcagcgcatgaaggacaacgcctctaatacccaggaactctccggcggtgaaatcccgggctacgacagcaccggccgcagcccctattcaaaagcggaaatcttctcgctgttcgccgagaacaacatggaagtgaccgataccaccatgctgacgccggcgctgcgtttcgatcaccacagcatcgttggtaataactggagcccgtcgctgaacctgtcgcagggcctgggcgacgactttaccctgaaaatgggtatcgctcgcgcctataaagcgccgagcctgtatcaaaccaaccccaactatattctctacagtaaaggccagggctgctatgcgagtaaatccggctgctatctgcaagggaatgatgacttaaaagcagagaccagcatcaacaaagagatcggcctggaattcaaacgcgacggctggctggcgggcgtcacctggttccgtaacgattaccgcaacaagattgaagcaggctatgctccggtttataccaacggcaaaggcaccgatctgtacaaatgggaaaacgtgccgaaagcggtagttgaagggctggaaggcacgttgaacgtgccggtcagcgagacggtgaactggaccaacaacatcacctacatgctgcagagtaagaacaaagagaccggcgatcgcctgtcgattattccggaatacacgctgaactcaacgctgagctggcaggtttatcaggacgtttctgtgcaatcgaccttcacctggtacggcaagcaggaaccgaagaagtacaactacaaaggccagccggtcaccggcagcgagaagaacgaggtcagcccgtatagcatcctcggcctgagcgcgacctgggacgtgaccaaaaacgtcagcctgaccggcggcgtggataacgtcttcgacaagcgccactggcgcgcgggtaacgcccaaaccaccggcggcgacaaaggttatatgtacggcgctggcgcggagacctataacgaatccggccgtacctggtatatgagcgtcaacacccacttctga

SEQ ID NO: 86969 - DNA, 942 bp, Enterobacter aerogenes
atgagtaatgcagaacacctggcgaacgtgatggtcgaggcgtttatcgccgcggtggaaaagggcgtcgatctggtgccggtggtcgcggactccacctcaacggccaagatcgctccctttattaagcaattccccggacggctggttaacgtcggtatcgccgagcagagcatggtcggcaccgccgcggggctggcgcttggcggtaaagtggcggtgacctgtaacgccgcgccgttccttgtctcccgcgctaacgagcagattaaagtcgatgtctgctacaacaacaccaacgtcaagctctttggccttaacgccggggccagctatggcccattggccagtacccaccatgctattgacgacctggcggtaatgcgcggtttcggcaatatccagattttcgccccctccacgccgcgcgaatgtcggcagattatcgactacgccctggcgtatcaggggccggtttatatccgccttgacggcaaggcgctgccggagttgcatgacgaagcgtaccgttttgtgcccggcgcggtgctgaccctgcgcgaaggcgcagcggtggcgctggtggcgaccggttcaaccgtgcacgaagtggtggaggcggcgcagcagcttgccgacctcggcattgaggcgaaagtggtcagcgtgccgtcgattcgtccctgcgataccgcggcgctgctggcggcgctgcagtcatgccgttcagttattaccgtcgaagaacataacgtcaacggcggtctggggagcctggtcgccgaagtgctggcggaagcgggcgcggggattgccttgcagcgtctggggatcccggatggcgagtatgcggcggccgccgatcgcggatggctgcgtcaacatcacggttttgacgcggcgtcgattgtcgcgcgggtacagaaaatagcgcagtgttga

SEQ ID NO: 86970 - DNA, 831 bp, Enterobacter aerogenes
atgaatccctacagatttgatatccagacgcttgagcgcaaagcgcgcgccgtgcgccgccacattgtccgcttaaacgccaatagtccggctggcggtcacaccggggctgacctgtcgcaggtcgaattgttaaccgcgctctatttccgcgtactcaatgcggcgcccgatcgtcttgacgacccgcagcgcgatatctatatccagtcgaaaggccatgcggtgggctgctactactgcgtactggcggaagccggtttcttcccgatcgattggctggagacctaccagcacgcgaactcgcaccttcccggtcatccggtgcggcagaaaacgccgggcattgagcttaacaccggcgcgctgggccacggtttgcctgttgcggtggggctggcgctggccgcaaagaaaagcaacagcccccgccgcatctttttaatcaccggcgacggcgaactggcagaaggcagtaactgggaggcggcgctggcggcggcccattatggcctcgataacctggtcattattaatgataagaacaatcttcagctggccgggccaacccgtgaaattatgaataccgatccgctggccgataaatggcgggccttcggcatggaggtcagcgaatgcgacggcaacgatatggcctcggtggtcgcggctatcgaagggctgcagcagaacggtaaacctaacgtcattattgccaacaccacgaagggcgcgggcatctcctttatccaggggcgcccggagtggcaccaccgggtgccgaaaggcgaggaaatcgcacaggcgctggaggaactgaaagatgagtaa

SEQ ID NO: 86971 - DNA, 951 bp, Enterobacter aerogenes
atggctaagcaggatgaacaacggctattggtgaagattgccacgctttactatctggaaggacgaaagcagtctgatatcgcccaacttctctcgctgtctcagtcatttgtctctcgtgcgattacccgctgccaaaaagagggcgtcgtcaaaatcagcgtcgtgcagccatcgaatatctttctcaatctcgaaaaggggcttgaggatcgctacgggcttaaacaggcggtggtggtcgataccgaagaagaggccagcgaccataccatcaagcgggcgattggctccgccgccgcgcactacctggaaacccgcctgcggccaaaagatctgattggcgtctcttcatggagttcgaccatccgcgcgatggttgatgaggttcacgcgcaaaacctgaaggccagcggcgtcatccaactgcttggcggcgtcgggcccaacggcaacgtgcaggcgacgatcctcacccagacgctggcccagcgtcttaactgcgatgcctggctgctgccgtcgcagagcatcgaaggctccatggaagagcgcaatcgcctgctggccagcaaagatgtcgccgacgtggtttcacgctttgacgaggtcgatatcgccattgtcggcattggaattctcgaaccttcccagttgctgaaaacgtcgggtaactattatcacgaagatatgctgcaggtgctggcggcgcgcggcgcggttggcgatatctgcctgcactactacgacaaatacggccagccggtgttacgcgaagatgaagatccggtgatcggcatggcgctggagaaagtcaaaaaatgcccgaacgtggtcgcgctggccggcggcaccgacaaagtcgcggcaattaaaggcgcgcttaccggcggctatatcgatgttttaatcaccgattaccccaccgccagactactggttagcgactaa

SEQ ID NO: 86972 - DNA, 1521 bp, Enterobacter aerogenes
atgcaggcgacagccaaagagttcatcattgcgctggatgaaggcaccaccaacgcgaaagccgtggtgctggacggcaaaggcaaggttagcgtcaagttctcgcagccgctggcgatccaaaccccgcgcgaaggttgggtggaacaatccggcgaggcgctgatggcggcctcgctggcggtgatcgccaaagcggtggctcacgtcggcgcggaaaacgtcgcggcgctggctatcagcaatcaacgcgaaaccgccatcggctggtatcgcgccagcggcgaacccattaacgccgccatcacctggcagtgcacccgcagcgccgcgttctgcgacacgctgcgtcgcgatcgtcaggagcagcgcattaagcacgccacgggcctgccgattgcgccgctgttttccgcctccaaaatgcgctggctgctggacgccactcccgatggctatcagcttgccgcacgcggcgagatttgcctcggcactatcgacagctggctgctgtggaatttaaccggcggacaatctttcttctgcgattactccaacgctgcccgcacccaattgctgaatctgcaccgcggcgagtgggatgacgaaatgctgacgctgtttggtattccgcgcgcggcgctgccggagattaaaccgtcgagcgggctgttcggctacaccaaagggctggcggcgatccccgacggtatcccggtgatggcgatgattggcgactcccacgccgcgctattcggccacgcccttggcgaagctggctgtgtgaaagccacctacggtaccggctcctcggtgatggcgccggtccaatcggcccagtgcgatattgccgccctggcgaccaccgtcgcctggcacgatggcgaccagctggtgtggggactggaaggcaacatcccccataccggcgatgcggtagcatggatggcggacagcaccggactgagcgaactctccgcagccgacctggcccatgagctgaataccctgcccgcctccgtcgattcgactttaggggtctacttcgtaccggcgctaaccgggctcggcgccccctggtgggacgacagcgcccgcggggtaatctgcggccttagccgcggggtcaagcgcgcgcacctgatccgcgcggcgctggaatccattacctatcaaatcgccgacgtggtggcggcgatgcgccagcacgctgaattcaccctgacggcattaatggtcgacggcggtccaaccaacaacgactggctaatgcaataccaggccgacctgctcggctgcccggtgatgcgcagcgatatcccggagctgtccgccatcggcgcggcgctgctggcgcgaaaagccctcactccgggtgaaaccgctgacctgcaagccttcttaaccgaacacagcgcttttcaacccgacatggcccgccaccagcgactacagcagcgctggcgggagtggcgccatgcggtaaacagaacattatggaaaccggattcgccagcctga

SEQ ID NO: 86973 - DNA, 936 bp, Enterobacter aerogenes
atgaaattacgtttaactcttttaaccgctgcgaccctgactgccttttcctttgccgcgcatagcgccgaaaaaggcaccattatgataatggttaactcgctggataacccttattacgcctcggaagccaaaggcgccagcgaaaaagcgcaagccctcggctataaaacgaccgtgctctcgcatggcgaagatgtcaaaaagcaaaatgagctgattgataccgccattggtaaaaaggtgcaggggattattctcgataacgccgactccaccgccagcgtcgccgccattgaaaaagccaaaaaagcgggcattccggtggtattaattaaccgtgaaattccggttgatgatgtcgcgctggaacaaattacccacaataacttccaggccggttcagaagtcgccaacgtatttgttgagaaaatggcggaaaaaggcaaatacgccgaactgacctgcaacctcgccgataataactgcgtcacccgttctaaatccttccaccaggtgattgaccagtacccggatatggtcagcgtggcaaaacaggatgccaaaggcaccctgatcgacggcaaacgcataatggatagcattctccaggctcacccggatgtcaaaggggtgatctgcggtaacggcccggtggcccttggcgccatcgcggcgctaaaagcggccaatcgtaacgatgtgatcgtcgtcggtatcgacggtagcaacgatgaacgcgatgcggtgaaggccggtacgctacaggcgaccgtgatgctccaggcgcaggccatcgccgcccagggcgttaccgatctggataactacctgcaaaaaggcgagaagccggcgaagcagcgcgtgatgttccgcggcattctgattacccaggataacgcagataaagttcaggacttcaacatcaagtcctga

SEQ ID NO: 86974 - DNA, 621 bp, Enterobacter aerogenes
atgtacaagaaaacctgtctcgcgcttgccgttctggcgcttggcggctgccgcatcgtctcgcagcaggagctggcagacctgaaatccccgcccaatccgcatatggcgaacatcgataaaacctggcagcagagcatcgtgccgcaggtggtcgccaacgcccgcccggcggcggagttgatgagcgcgctgaaggcgcaaaaagatatcgatagcgcctgcaaagcgctgggctaccgcgcccaggacgaaaacccgtgcatcttttacgttaaggtgacaggcgccgtcagcaagctggatagcgcctcgcgtagcggcaaaatgaccctcgccgatggcagcatcggtaatgtgatggtgcagattggccctaccctgcgcggcaccctgctgcgtgacggttatcgcgacgccagctaccaggactttaacgaccaggtgctgtttggcgaatacagcaaaaatattaatagtcaggcggtcaaaatgattcaggcggccaacctgaaaaccggcgacaacgtagaagtgtatggcgtcttttcggcctgggatattccacaaactattccggaaatcaccccggcgaaaatcgttcatccgggaggtcaataa

SEQ ID NO: 86975 - DNA, 1545 bp, Enterobacter aerogenes
atgacgccgcaagatatcgtcgctccccaaccagtcgaatctgaagtgattatcgaaacccgtggcctttcgcgcatttatcccggcgtgaccgcgctggataacgtgaattaccgggtctatcgaaataaggttaacgttctgatcggagaaaatggtgcgggtaaatccaccatgatgaaaatgcttgccggcgttgaaacgccctcctccggtcaaattattctcgatggcgaggcggtgactttaaactctacccatcaggcagagaaattcggcatcagcattattttccaggaactgaatttattccccaatatgaatgtgatggacaacatattcatggctaatgaattctttcagaaaggacgcatcaacgaaaaatatcaatatgcgttagccaaatcgctactggagcggctggagctcgacgtcgatccctacacgcagctgggcgaactggggattggccatcagcagttggttgaaatcgcccgtgcgctatcaaaagacacccgcgtgctgattatggatgaacccacctcggcgctgagccagtccgaggtcaaagtgctgtttaaggtcatcgagcagcttaagcgccgcggcgtcaccattatctatatttcgcatcgcctcgaagagctgatggagattggcgacaacatcaccattttccgcgatggtcgctttatcagcgagcgcaacgtcagcgacgccagcgtgccgtggatcatcgagcagatggtcggcgataagagaaagcactttgattatcagcccgcgccaaaaggcaacgcggtgcttgacgtcaaggggctgaccgcgctgcatccgagcggcggctacaaactcaatgatgtcacctttaccctcagcaaaggcgaagtgatcggcatttacggcctgctgggcgccgggcgcaccgagctgtttaaagggctggttggcttgatgccctgccagaacggcgagatacatcttaacggcgaaagcatcggcaaatctcgctttcaacaccgtctgaaaaaggggctggcgctggtgccggaagaccgtcagggcgaaggcgtggtgcagatgatgtcgattcaatccaacatgacgctctctgattttagcctgcagggttttcgccgcgcctggcgctggctgaatccgcagaaagaagagtcctgcgtaaaagagatgattcagcaattggctatcaaggtgagcgacgccaatttgcccatcacctcgctgagcggcggcaatcaacaaaaagtggtgctgggtaaggcgctgatgacccagccgcaggtggtgttcctcgacgaaccgacgcgcggtatcgacgtcggcgcaaaaaccgatgtctatcacctgatcggcaaaatggcccagcaggggctggcggttatgttctcctcttcggagctggatgaagtgatggcgctggccgaccgcatcctggtgatggccgatggccgcattaccgccgatttaccgcgccatgcggtgacccgcgaaaagttaatcgcggcttcaacacctcaagattaa

SEQ ID NO: 86976 - DNA, 1068 bp, Enterobacter aerogenes
atgaaccagaaatatatgatttatatgtacctgctgaaggccagaaccttcatcgccctgctgctggtgatcgcattcttcagcgtgatggtaccgaacttcctgaccgcctctaacctgctgatcatgacccagcacgtggcgattaccggcctgttggccatcggtatgacgctggtgatcctcaccggcggcattgacctgtccgtcggcgcggtggcgggtatctgcgggatggtcgcgggggcgttgctgaccaacgggttgcctctatggaacggcaacatcatcttctttaacgtcccggaagtgatcctttgcgtcgcggtcttcggcgtgctggtggggctggttaacggcgcggtgattacccgcttcggcgtcgcgccgtttatctgcaccttagggatgatgtacgtcgcccgcggctccgccctgctgtttaacaacggcagtacctacccgaacctcaacggcatggaagcgttgggcaataccggtttcgccacgctgggctccggtaccctgcttggagtttatctgccgatctggttgatgatcggcttcctggtattgggctactggctgaccaccaaaacgccgcttggtcgctacatctacgctatcggcggcaacgaatccgccgctcgcctcgccggcgtaccgatcgtcaaagctaaaattttcgtctacgccttctccggcctgtgcgccgccttcgtcggcttgatcgtcgcctctcagctacaaaccgcgcacccgatgaccggcaacatgtttgagatggacgccattggcgccaccgtgctcggcggaaccgcgctggcaggaggccgcggccgggtgaccggctcgattatcggcgccttcgtgatcgtcttccttgccgacggcatggtgatgatgggagttagcgacttctggcagatggtcattaaaggcctggtgatcgtcaccgccgttgtcgtcgaccagttccagcagaagctgcagaacaaagtcattctgatgcgccgccacgaagagaagctggccgcgatccccccgaacggcgccacctccagctaa

SEQ ID NO: 86977 - DNA, 798 bp, Enterobacter aerogenes
atgcaacgagatttccataataaaacagtggttatcaccggcgcttgccgcggcatcggcgcaggtattgcggagcgctttgcccgcgatggcgctaatctggtgatggtctccaacgccgagcgcgttcatgagaccgccgaaaccctgcgtcagcgttatcaggcggatattttatcgctgcaggtcgatgtgaccgacgaagcgcaggtacagtccctgtatgagcaggccgctgcgcgcttcggcagcattgacgtctccattcagaacgccggggtgatcaccatcgattactacgatcggatgccaaaagccgattttgaaaaagtgctcgcggttaacaccaccggcgtgtggctgtgctgccgcgaggccgctaaatatatggtgaaacagaaccatggcagcctgattaacacctcttccggccaggggcgtcagggctttatctacacgccgcactacgccgccagcaaaatgggcgtgatcggtattacccaaagcctggcgcacgagctggcgccgtggaacatcaccgtcaacgccttctgccccggcatcatcgaaagcgaaatgtgggattacaacgatcgcgtgtggggagaaattctcagcaccgagcagaagcgttacggcaagggcgaactgatggcggaatgggtcgaagggatcccgatgaagcgcgccggtaagccggaagacgtggccgggctggtggccttcctcgcctccgacgacgcacgctacctcaccgggcagaccatcaatatcgatggcggtttgattatgtcctga

SEQ ID NO: 86978 - DNA, 786 bp, Enterobacter aerogenes
atgatcggcaaagactttgcacagcaactgtttaacctgcaggagcgcgtcgctttcgtgaccggcgccggcagcggcatcggccaaaccatcgcctgcgcgctcgccagcgccggcgcgcgggtggtctgttttgatcttcgcgacgacggcgggctggcggaaacggtcagccatattgaatccatcggcggtcaggcctgttcttataccggcgatgtccgccagcttgccgacctgcgcgccgccgttgcgctggccaaaagccgctttggccgcctcgatatcgccgttaacgccgccgggatcgccaacgccaatccggccctggagatggaaagcgagcagtggcagcgggttatcgatatcaacctcaccggcgtatggaactcctgcaaagcagaagcggaattgatgcaggagtccggcggcggatcgataatcaatatagcctcgatgtcggggattatcgtgaaccgcggcctcgatcaggcgcattacaactgttcgaaagccggcgttatccatctgtcgaaaagcctggccatggagtgggttgataaagggatccgcgtcaacgccatcagccccggctataccgccacgccgatgaatacccgcccggagatggtgcatcagacccgcgagtttgaaagccagaccccgatgcagcgcatggcgaaggtagaagagatggccggcccggcgctgttcctcgccagcgacgccgcctcattctgcaccggcgtggatctggtggtcgacggtgggtttgtctgctggtaa

SEQ ID NO: 86979 - DNA, 981 bp, Enterobacter aerogenes
atgacagactttacctttacgattaaacgtagtcgttttgatgaacactataacccggcggaaaatacgcgtattaccaccaattttgccaacctggcgcggggcgaaaaccgtcaacagaacctgcgcaatgcgctggcaatgattgataatcgctttaataacctggtgcagtgggacaacccgaacggcgaccgctactccgttgagctcgatatcatctcggtcgaaatgaatattagcgataacggccagaatgcggcattcccggtgattgagattctgcaaaccaatattattgataaagccaccaacgcgcgaatcgaaggtattgttgggaataacttctcctcttatgtgcgcgattatgattttagcgtattactgccggaatataataaagataaagcaacattcagcgtgccggaaaattatggcgttctgcatggcaatattttcaaacatttcatacgctctgccgaataccatgaatgttttaaaaagtcgccggtcatctgcctgagcgtatctaataagcatacctatcgccggaccggcaatcagcaccctattctcggcgtcgagtaccagcaggatggcgtggcgctgaccgaggcctatttcaataagatgggcctgcaggtgcgttactttatgccggccaatagcgtagcgccgctggccttcttctgcgcgggcgatctgctcagcgattacagcaaccttgagcttgccagcaccatcagcaccatggagacgttccagaagatttatcgcccggaaatttataacgctaactccgcggccgggcagtgctaccagccgaacctgaataatcaggatcattcgttgacccggattgtttatgaccgcgaagagcgtagccgcctggcgattgaacagggcaaatttaccgaacaacagtttattaagccgtaccagcatattcttgagcaatggtcagctcattacgctctctaa

SEQ ID NO: 86980 - DNA, 1032 bp, Enterobacter aerogenes
atgaaaacattgctcccgacatccaccgcaggcagtttaccgaaaccgacctggctggcgcagcccgagacgctgtggtcaccgtggaaattacagaatgaagagttggtattaggaaagcgcgatgcgctgcgtttatcgctcgacgatcagctgcgcgcaggcattgatatcgtcagcgatggcgagcagacgcgtcagcactttgtcaccacctttattgaacatctcagcggcgtcgattttgagaaacggcaaacggtgagaattcgcaaccgctatgacgccagcgtgccgaccgtcgtcagcgccgtcgagcgccagcagccggtgtttgtcgaagatgcgaaatacctgcgtcaactcaccaacaaaccgattaaatgggccctgccggggccaatgaccatgatcgatacgctgtatgacaatcactataaaagccgtgaaaagctggcctgggaatttgccaaaattctcaaccaggaagcccgggaattagaagccgccggggttgatattattcagttcgatgaacctgcgtttaacgtcttctttgatgaagtcaatgactgggggatcgccgcgctggaaagagccgttgaggggctgaaatgcgaaaccgccgtgcatatctgctatggctacggtattaaggccaataccgactggaaaaaaacgctcggctccgaatggcgccagtatgaagaggcgttcccgaaactccagacctcctctatcgatattatttcgctggagtgccacaactcgcgcgtaccgatggacctgctggagctcatccgcggcaagaaagtgatggtcggagcaatcgatgtggcgaccaacgccgttgagacgccagaagaggtggccagcacgctacgcaaagccctgcagttcgttgacgccgacaagctctatccatcaaccaactgcggcatggcgccgttatcgcgtcaggtcgccggcggtaagctgcatgcgctaagcgccggggcggaaattattcgccgggagctggcggcgaaatag

SEQ ID NO: 86981 - DNA, 366 bp, Enterobacter aerogenes
atggaaaaatattcagggatcattattcgtgggcccttctatgcgatgatggccgcggttgtcttctgtttttccagaggttttttcctctactggatgatcaaaagggatcctgtagcgacccgcgccagtatcgtgacttactaccctaaaacgccaaacgatcgtggtgaggtgagtattgtattaacgtatagctttagtgccgaaggtaaaatttatagtaaggccaatcagtttatgactattaatacggtggatctcgataaggtttatgtgggaaaagaggtacccgtgatctactaccgggctaatcctaagttcagtcagttagattattatcatcaggagttaagacagagatga

SEQ ID NO: 86982 - DNA, 2034 bp, Enterobacter aerogenes
atgacagacctttcgccgagcagagaaaaggacaaaatcaatccggtggttttttacacttccgcaggactgattttgttgttttccctgatgactatcttcttcagcgatttttccgcggcctggattggccgtaccctgaactgggtttctaaaaccttcggctggtattatttactcgccgccacgctgtatatcgtgttcgtcgtctgtattgcctgttcgcgctttggctcggtgaagctggggccggaacactcgaagccggagttcagcgtgctgagttgggcggcgatgctgtttgccgccggtatcggcatcgacctgatgtttttctcggtcgccgaaccggtcacgcagtatatgcagccgccggaaggggcggggcagaccatggaagcggcgcgccaggcgatggtgtggacgctattccactacggcctcaccggctggtcgatgtacgccctgatgggaatggcgttgggatactttagctatcgttataatttgccgctcaccattcgctccgcgctctatcctatcttcgggaaaaagataaatggccctatcggccacagcgtcgatatcgccgcggtgatcggtacgattttcggtatcgccactaccctcggtatcggcgtggtgcagcttaattacggcctgagcgtgctgttccatattcctgattccctgggcgcaaaggcggcgctgattgtattgtcggtgattatcgccaccatttcggtgacctccggcgtggataagggcattcgtatcctttccgagctcaacgtggtactggcgctggggctgatcttattcattctgtttatgggcgataccgagttcctgctcaatgcgctggtgttgaacgtcggggattacgtcaatcgctttatgggaatgacgctaaacagcttcgccttcgaccgcccggttgaatggatgaataactggacgctattcttctgggcctggtgggtggcgtggtcaccgttcgtcggcttgttcctggcgcgtatttcgcgcgggcgcaccattcgccagtttgtggtcggtacgctgattattccgttcactttcaccctgctgtggctgtcggtattcggcaatagcgcgctgtatgaaattattcacggcaatgcggattttgccgccgaagccatcgctcacccggagcgcggtttctataacctgctggcgcagtatccggcgtttacctttagcgcctcggtcgccaccattaccggcctgctgttttacgtcacctcagcggactccggcgcgctggtgctcggcaacttcacttcgaagctgaaggatattaatagcgatgcgccgaactggctgcgaatcttctggtcggtggtgattggcctgttgaccctcggtatgctgatgactaacggcatttccgcgctacagaacgcgacggtgatcatggggctaccgttcagctttgtgattttcttcgtgatggcggggttatataagtcattgaaggtggaagattatcgccgcgaaagcgccaatcgcgacactgcgccgcgcccgctgggcgtgcaggatcgtctgagctggaaaaagcgcttgtcacgcttaatgaactatcctggcacgcgctatacccgccagatgatggagacggtgtgcttcccggcgatggaagaggtggcgcaggagctgaagctgcgcggcgcttacgttgagctgaaaagcctgccgccggaagagggcgataaccttggtcacctcgatctgctggtgcatatgggcgacgaacaaaacttcgtctaccagatttggccgcagcagtactcgattcctggttttacctaccgggcgcgcagcggcaaatcgacctactaccgtcttgagactttcctgctggaggggagccagggcaatgacctgatggattacagcaaagagcaggtgatcaccgatattctcgaccagtacgagcgacacctgaactttattcatctacacagggaagcgccggggaatagcgtcaccttccctggaatgtaa

SEQ ID NO: 86983 - DNA, 594 bp, Enterobacter aerogenes
atgccaaaactggggatgcaatcgatacgtcagcggcagctgatcgacgccacgctggcggcgattaatgaggtcggcatgcatgacgccaccatcgcgcagatcgcccgccgggcgggcgtatcgacgggcatcatcagccactatttcaaggataaaaacggactgctggaagcgacgatgcgcgacatcaccggccagctacgccatgcggtgttacagcggctgcgggcgctacccggcgccagcgctgaacggcgcctgcgggccatcgtcgccggcaatttcgatgacagccagataagcggcgcggcgatgaaggcctggctcgccttctgggccagcagtatgcatcagccgatgctctaccgcctgcagcaggtcagcagtaagcgtttgttgtcgaacatcgtttatgaatttcagcgtcagctaccgcgcgagcaggcgcaggaagcgggttacggtctggcggcgctgatcgacggcctgtggctgcgggcggcgttaagcggtaaaccgctcgacaaagcgcgtgccgaaaccctcgccgaccatttcatcagtcagtatctgccaccgacttcgcaataa

SEQ ID NO: 86984 - DNA, 1473 bp, Enterobacter aerogenes
atgtcccgaatggccgaacagcagctttatattcacggcaagtttgtcgccgccaccagcggtaaaactttcgagaccatcaaccctgccactggggaagtgctggcaaccgtccaggccgccgggcgtgaagacgtcgaccgcgcggtaaaaagcgcccaacaggggcaaaaagtgtgggcggcgatgagcgcgatggcgcgctcgcggatcctgcgtaaagcggttgatatcctgcgcgaacgtaacgatgagctggcacgtctggagacgcttgataccggcaaaccgctgagcgaaaccgccgccgtcgatatcgtgaccggcgccgatgtgctggagtactacgccggattgatcccggcgctggaaggcagccagatcccgctgcgcgacagttcatttgtctacacccgccgcgagccgcttggcgtggtcgccggtattggcgcctggaactacccgatccagatagcgctgtggaaatcggccccggcgctggccgccggtaacgcgatgatctttaaaccgagcgaagtcactcccctcaccgcgctgaagctggcggaaatctaccgcgaagcgggtctgccggcaggggtcttcaacgtcctgccgggaatcggcgccgaaaccggccagtacctgactgagcatccggatatcgccaaaatctccttcaccggcggtgtcgccagcggcaaaaaagtcatggccaactccgccgcctcttctttaaaagaggtgaccatggagctgggcggtaaatccccgctgattatcgcggaagatgccaacctcgacctcgccgccgatatcgccatgatggccaatttctacagctccggacaggtctgcaccaacggcacccgcgtgtttgtgcccgcgaagtttaaagccgaatttgaacacaaaatcctggagcgcgtgggccgtatccgcgccggagacctgtttgccgatgataccaatttcggcccgctggtcagcttcccgcatcggcagaatgttctgcgctatatcgagagcggcaaaagcgaaggcgctcgcctgctgtgcggcggcgatgtgctgaaaggcgaaggcttcgataatggcgcatgggtcgctccgacggtcttcaccgactgcaccgacgacatgactatcgtgcgcgaagagatcttcgggccggtgatgtcgattctcagctatgacgatgaagcggaagtgattcgccgcgccaacgccaccgagtacggccttgccgctggcgtggtcacgccggatctgaaccgcgctcaccgcatcatccaccagttggaagccggcatttgctggataaacagctggggagaatcgccggcggaaatgccggtcggcggctataagcactccggcattggccgagaaaacggcgtgatgacgctacagagctatacccaagtgaaatccatccaggttgagatgggtcagtttcaatccatattttaa

SEQ ID NO: 86985 - DNA, 1665 bp, Enterobacter aerogenes
ttgcagtttgactacatcattattggcgccggctccgccggcaacgtcctcgcgacgcgtttaacggaagatcccaacaccaccgtcctgctgctggaagcgggcggtccggactatcgttttgacttccgtacccagatgcccgccgcgctggctttcccgctacagggcaaacgctataactgggcctatgagaccgaaccggaaccctatatgaacaaccgccgcatggagtgcggacgcggtaaagggctcggcggctcctcgctgattaacggcatgtgctacatccgcggcaacgccatggaccttgataactgggcagccgcgccgggactggaacactggagctacctcgactgcctgccctattaccggaaagcggaaacccgcgatatcggccccaacgactatcacggcggcgatggtccggtgagcgtcgctacgccgaaacagaataataatccgctgttccatgcgatggtggaagccggcgtgcaggcgggctatccgcgaactgacgatctcaacggttatcagcaggaagggtttggcccgatggaccgcaccgtgacgccacaaggacgtcgcgccagtaccgcccgcggctatctcgatcaggcccgcagccgcgcgaacctgaccatccgcacccatgccatgaccgatcacattatttttgacggcaaacgcgccgttggcgtcgagtggctggagggcgacagcagcgcgccgtcgaaagcaatggccaataaagaagtgctgctctgcgccggtgccatcgcctcgccgcaaattctgcagcgttccggggtcggcaatccggaactcctgcgccagtttgatattccgctggtccacgccctgcccggcgtcggtgaaaatctgcaggaccatcttgagatgtacctgcagtacgagtgcaaagagccggtatcgctgtacccggcgctacaatggtggaatcagccgaaaatcggcgcggaatggctgttcggcggcaccgggatcggcgccagcaaccagtttgaagcgggcggatttattcgcagccgcgagcaattcgcctggccgaatattcagtaccacttcctgccggtggcgattaactacaatggatccaatgcggttaaagagcatggtttccagtgccacgttggctcgatgcgttcaccaagccgcggtcacgtgcgtctgaaatcgcgcgacccgcatgcccatccggcaatcctgttcaactatatgtcgagcgaccaggactggcaggagttccgcgacgccatccgtattacccgcgaaatcatgaaccagccggcgctggataaatatcgcgggcgcgaaatcagccctggcgttgagtgccagagcgatgcggagttagatgagtttgtgcgtaatcacgccgagaccgcgttccacccgtgcggcacctgtaagatggggtacgacgacatggcggtggtcgacggcgaaggccgcgtccacggcatggaagggttgagagtcgtcgacgcgtcgattatgccgcagattattaccggcaacctgaacgccaccacgatcatgattggcgagaagatggccgatgccattcgcgggcgtcagccgttaccgcgcagcatcgcggcctactatgtcgccggcgacgcgccggttcgccgctaa

SEQ ID NO: 86986 - DNA, 1116 bp, Enterobacter aerogenes
atgacgctacccgattttcacgtttcagcgccttttacgcttggtattgagctggagttacaggtcgtcaacccgccgggatacgacctcagccaggatgcctccacgctgattgccgatgtgcaggacgaactgacggcgggagaggccaaacacgacatcaccgaaagcatgctggagatagccaccggcatctgtcgcgatatcagccacgccaccacacagctaggcgccatccatcaggcggtacagcgcgccgctctccatcaccacctgcaaatctgcggcggcggttcgcatcctttccacgcctggcagcgtcaacaaatcagcgataacccgcgctatgtgaaaaccgtcgagcacttcggctatctggcaaagcaggcgacggtgtttggccagcacgttcacgtcggctgtcagagcggcgatgacgccatctatttgcttcacgggctgtcacgctttgtaccgcactttattgccctcaacgccgcctcgccgtggttcgacagcaccgacagccgctttgcctgttcgcgtctgaatcgtttctcttcctatcctgataacgggccgatgccgtgggttgagaactggcaggcctttcagcgtttattccgccgcctgagctacaccagcatgatcgacagcatgaaggatctgcactgggatatccgcccaagcccggtgttcggtaccgtcgaggtgcgggtaatggatacgccgctgacgataggccaggcggtgaatatcgccggatttatccagacgctggcctgctggctgttaaacgaacggccgtttaaacatcaaccggaggattacctcctctaccctttcaaccgctatcaggcctgtcgctacggcctcgacggggtgataaccgatgtctggtccggcgaacagcagagcatccgcgcgaacattctgcagttggccgaccgattggcgccttttgcccacaaggtgcatgccagcgcggcgctggagtcggttgtgcgccaggccaggtcccccatcagcgaagcgcagcagatgcgcgaattcatcgccaacggcggttcgctgattggtctggtacaaaagcattgcgagatttgggcggcataa

SEQ ID NO: 86987 - DNA, 729 bp, Enterobacter aerogenes
atgttattacgccgcctgatccctcttgcgcttcttcccttcaccgcttttacccatgccgcctgtacgctcaccgacccgacgctgaccttgcaaagctatacggttaatccgcagcaggagcgcatcgtgatgtactggcaaaagcaaaatggtaaagcctggggatcgttgcgctcgctgctgtccgatatcgataaagacggcagcgtccagatggcgatgaacggcgggatatacgataaggcctacgaaccgctgggcttgtatatcgaaaacggcgagctgctaaagccgctcaaccgcgcctccggcggcggcaactttttcatccgccccggcggcgtattctggctgaagggccagcgggcgggaataacgcctatcaacaactttaagccatcgcctgagataacctacgccgtgcagtccgggccaatgctgattgaaaacggcgccatcaactggcggctgaagccctccgccagctcgcgcaaactgcgcaacggcgtcggcattgataagcagggacgggtggtatttatgcttagcgagcgcgaaaccaatttctacgatttcgcctgttacgcacagtccaaactccacgtgcgccagatgctctacctcgacggtacgatttcaaaaatgtatcaaaagggcggcagcataccgtggcaataccatccgttcgtcaccatgatcgcggtggaaacccaaaaacctggctaa

SEQ ID NO: 86988 - DNA, 2724 bp, Enterobacter aerogenes
ttgacccggatgattaacccccacaatatcacgccttcgggcgacagcgcgccacagcaggcttatcagcaaacagtcgaagcggtactggcgcaaaaaaagagccatgccgacggtctcagcaccgctgaagccgtcgggcgcctgaaatcatacggccctaacgcgctgccggaaaagaaaggcaaaccggcctggctgcgttttcttgcccacttcaacgatgtcctgatttacgtcctgctggccgctgccgcgctcaccgcggtgatgggccactgggtcgataccctggttattctcggcgttaccgtcattaatgcgttgatcggtcatattcaggagagcaatgccgaaaaatcgctgcaggggatccgcaacatgctctccagcgatgcccgcgtccagcgcaacggcaagcatgaaaccatccccacccgtgacctggtgccgggcgatattgttattttgcgcgctggcgatcgcgtcccggcggatatgcgcctgattgaaagccacaatctacgggtcgaagaggcgattctcaccggcgaatcaacggtggtggataaaaccactgtggcgttgcagggcgagctaccgctgggtgaccgcaccaatatggtcttctccggcaccactatcagcgccggcagcggcgtcggtgtggtcaccgctaccggtcaagagaccgagctaggccacatcaatcagatgatggcggctattgaaaagcaccgtactccgctgctggtgcagatggataagctggggaaagcgatttttgtcatcatcctcgcaatgatggtggcgctgttcttcttcagcctcgcgctgcgcgatatcccgctgggcgagctgctgctgtctctgattagcctcgcggtggcggcggtaccggaaggcctgccggcgattatctcgattatcctgtcgctcggcgtacaggcgatggcgcgcaagcgggcgattatccgcaagctgccgacggttgaaacgcttggcgcgatgaccgtggtgtgttcggacaagaccggcaccctgaccatgaacgaaatgacggtgaaagcagtcatcaccgccgactgctgctaccgtgttgaaggcgacagctatgagccgcaagggcgcattttccaggagggcagcgacgagccggtggtggtccagccgggcagcgttttggaaacctacctgcgcaccatcgatctgtgcaacgacagccagatcgttcaggacgagcgtggcctgtgggggatcaccggcggcccgaccgaaggggcgttgaaggtgctggcgacgaaagcccagttagcgccggtcgccacccggttggtggcgaaaatacccttcgactcgcagtacaaatatatggccacccatcagcagatcggcgatgaggagcgggtgctgattaccggcgcgccggatgtcatctttgccctgtgcggccagcagatgagcaagcaggggccaaggccgtttgaccgtcagtactgggaagacgaaatggcgcgcttcgcccgccaggggttacggatggttgccgccgcctgtaaaccggcaacagtcggcagcgccacattgacccacgatgatctgaaggaaggtctggtgttcctcggcatcgccggaatgatggatccgccgcgtccggaggcgattgacgcgatccacgcctgccagaccgccgggatccgcgtgaagatgatcaccggcgaccacccgcagacggcgatgagcatcggtcagatgctggggatcgccaacagccgccaggcgatgaccggctatcagcttgagcatatggatgatgccgagctggcgaaggcggcggtggagtttgatattttcgcccgtaccagtccggagcataagctgcgtctggtcaaggcgctgcaggatagcggcgaagtggtcggcatgaccggtgacggcgttaacgacgccccggcgctgcgtcaggccgacgtgggcatcgccatgggcattaaaggaaccgaggtgaccaaagaggccgccgatatggtgcttaccgacgacaacttcgccaccatcgccagctcggtgaaggagggacgccgcgtctacgacaatctgaaaaagactatcctgttcatcatgccgaccaacctcgcgcagggactgttgatcatcattgcgctgctggcgggcaatattattccgctgacgccggtgctgattttgtggatgaacatggcgacctcggccacgctctccttcggcctggcctttgaagccgccgagcgcaacgtgatgaaccgtccgccgcgtaagagcggccagcacgtgatggatgggttcgccgtctggcgtgtcgcttttgtcggttcgatgattgccgtcgccgcttttgttctcgaagcctggctggcgccgcgcggccacagcgctgagttcatccgcaccgtactactgcagatgctggtgaccgcccagtgggtctatatgatcaactgccgcagcagcgacagcttctccctgaacaaagggttgctgcgcaacaaaggcatctggctggtgaccggcgttctgttgctgatgcagttggtcatcatctatgtgccgctgatgcagaacatgttcggcaccgaagcactaccgctgcgctactggttcgtgaccctggcgattggcgtggccatgttcctggtggtcgaagtcgagaagcggctaacccgccgtttgcgtaaacctacctga

SEQ ID NO: 86989 - DNA, 249 bp, Enterobacter aerogenes
atgaaacacccgctggaaacgctgttatccgccgccggcattttgctgttagccctgatctcatgcttattgctgccggcgccctcgctcggcctgacgctggcgcaaaaactggtcacatccttccacctgatggatctcaaccagctctataccctgatcttctgcctgtggttcttagcgctgggagtcgtcgagtacctggtattacgctgggtatggcgccgctggttctcactggcagattaa

SEQ ID NO: 86990 - DNA, 342 bp, Enterobacter aerogenes
atgaatatatccgctcaggtgattgacactatcgtggaatggattgatgacaatctacatcagccactgcgaattgatgatattgcgcgccatgccggatactcgaaatggcatctgcaacggctgtttttacagtacaaaggggaaagtctcgggcgctacattcgcgagcgtaaactgctgctggcggcgcgcgacctgcgcgataccgatcagcgggtttatgatatttgcctgaaatacggctttgattcgcagcagactttcacccgtatctttacccgtaccttcaatcagccgccgggcgcgtatcgcaaagagaaccacagccgtgcgcactga

SEQ ID NO: 86991 - DNA, 1173 bp, Enterobacter aerogenes
atgagtgcttactcactcataatcaagttatatcataaagtctcctggatggggctttcgtctggtcaggatatgaaccgtgtcacctttagcgtggtcgccattatgttattagcagcagcaacgacattgccgtttgttcttaatgccggttttggcaaagcgccgcagggtgcgcagctcagtcttgtcgaacagtcgccgaactaccgtgacggccagttccataaccaactgccgacgccgggattcaccggccagaaaaacatgctggccgcgtggtgggattttctggtcacgaaacgagaaaacgcgcgcccgcagcagccgttgccgctggtgaataccgatcttgccggtttgccgtctggtgaagacgtcatggtctggctcggtcactcatcgtggtatctgcagctggcgggtaaacgtatcctgatcgacccggtatttagcgattacgccgcgccgttctctttcatcaataaggctttccccggtgattacccgtggaacgcgcagcggatgccggagatcgatctgctgattatctcccacgatcactacgaccatctcgactacgccaccattaaggcgctgatgccgaaagttaaacgcgtggtgacgccgctcggcgtcggctcgcatctgcgctactggggaatggatgcggcgattattgatgaagtggactggaaccagacgataaaaatcagcgatgaactcaccgtacatgcgctgccggctcgccatttctccggccgtgggctgaaacgcaaccagaccttatgggccagcttcctgttcgtcaccccgcaggaaaagatttattacagcggcgatagcggctatggcccgcattttaaggccattggcgaacagtttggccctatcgatctggcaatcatggaaaacggtcaatatgaccaggactggaagtacatccacatgatgccggaagaaacggcgcaggccgccgatgatttacgcgcccggtcggtattaccggggcatgccggacgctttgtgctggcaaaacacagctgggacgatccgtaccagcggctggcggcagctagcgaaggacgtgagtggcgtttagtcacgccaatgctgggcgaaccggtgtgggtcgctgataagacacaatcatttaacgcctggtggcgctaa

SEQ ID NO: 86992 - DNA, 582 bp, Enterobacter aerogenes
gtggctcgtcctaagagtgaagataaaaaacaagcgttactggaagccgccacggccgctttcgcccagtccggcattgccgcttcaacatcggcgatagcccgcagcgcgggggttgccgagggaacgctgtttcgctatttcgccaccaaagatgagttgctcaacgagttatacctcgccattaagatgcgcttagtacagacaatgatcgccgggctcaatcctgacgaaaaacgcccgaaagagaacgcgcggaacatctggaacagctatatcgactggggaatgcgtaaccctatggaataccgcgccattcgccgtatggcgctgagcgaacgcatcaccgatgaaacgcgcatccaggtcaaagagagttttcccgagcttaacgaaatgtgccagctgtcggtgaaagcggttttccttagcgacgcctatcgcgctttcggcgatgccctgttcctgtcgctggccgaaaccactatcgagttcgccagccacgatccgcagcgcgctcgcgagatcattgccctcggttttgaggccatgtggaatgcgctgcatgagaatgagtcgtaa

SEQ ID NO: 86993 - DNA, 369 bp, Enterobacter aerogenes
atggataacgaagcgctacaccatcacgcgcagcgtatcgcgctaacctaccctttcaccgaacactgctggccgtttggcccggagtatgacgtgtttaaagtcggcgggcgtattttcatgttgaccatgacccttcgcgggcgagccatagtcaacctgaaggccgatccgcaaaaatcgctgctcaatcagcaaatttaccgcagcatcgaaccgggctatcacatgaacaaaaagcactggatcaccgtggtgccgggcgaggatatcagcgaggatttacttgccgagcttattgacgactcgtggaatctggtggtggataagctggcaaaaaaagaccagcgccggctgcgtcccggctga

SEQ ID NO: 86994 - DNA, 654 bp, Enterobacter aerogenes
atggatattatctcagttgccttaaaacgttactccactaaggcttttgatccggcgaaaaaactgacggctgaacaggcggaaaacctgaaaacgctgctgcaatatagcccgtcgagcaccaactctcagccatggcactttatcgtcgccagcagcgatgaaggtaaagctcgcgtcgcgaaagcagccagcggcacctatgtgtttaacgaacgtaaaatcctcgacgcttcccacgttgtcgtgttctgtgcgaaaaccgcaatggacgatgcgtggctggaaaaagtcgttgatcaggaagatgccgatggccgttttgccactccggaagccaaagccggtaaccacaaaggccgcaccttctttgccgatatgcaccgcaaagagctgaaggatgacgatcagtggatggcgaaacaggtttatcttaacgtgggcaacttcctgctcggcgtggcggcaatgggtctggatgcggtgccgatcgaaggcgtcgatttcgccatcctcgacgaagagtttggcctgaaagcgcaaggttataccagcgtggtcgtggtgccggtcggtcatcacagcgtggaagacttcaacgccgcgctgccgaaatcccgcctgccgcagtccaccaccatcaccgagatctaa

SEQ ID NO: 86995 - DNA, 1038 bp, Enterobacter aerogenes
atgaacgtcacccgcaagcagcagcggattcttcaacgcgctattgagcaatggcagcaggagggggttctgaacagcagtgatggccaacggctgtcagcgtcgctatctgtccgtactttcgactggcagcgcctgagccgctatgccttctggaccgcgatagcctgcgtcttgattgcgctggggagtctgttcgccgacgctgaattgattgcggcgattatcaatctgttcagcgattccgctgtcgcgcggattattctgccgacgctgctggccatcgcattttactattgggggttccgccgccagcggcgcgaatcccagtggcactacagcaccgaggcgattttgttcctcggcgtcgtctgtaccgccattgccttgtggcagctaggcgatcggctggacgacggcagcggccatgtggcgccgctaatactgctcggctgcgccatttacggcctgatagggtttttcgcccgctccgggctggtgtggctgttcttcctgctggcgttaggtaactggtttggcgcggaaaccggctatgtatcaggttggggcgcctactggctggggatgagcttcccgattcgtttcgtgctgttcggcggcgtgctgctggcgctgtgctacttgatgcaaaatgtattacaccagcggcagttgtttaccgttagtaaggcgatggggctgacctggctgtttgtcgcgctgtggatcctgtcgattttcggcaactacgattccgatagctggtatggggtgagccaggcgcaactgctgccgtgggggctgctgtttgcgctggcggcggcgatctgtatttatatcagcctgaaaaccgacgatggcatgctgcgtggatttggcctgacgtttcttgccatcaacctctacacccgcttcttcgaattcttctggtatagcctgcacaaggtggtgttcttccttatcctggcggtatcgctggcgatgattggtcgctacgccgagcggatctggcacgccggcgagggggagaaaaagtaa

SEQ ID NO: 86996 - DNA, 870 bp, Enterobacter aerogenes
atgacgctaatgctgcaacgtgaggcgctgaatctcgcgcccgatgatagccgtaaacagctgggagcatttctgcgcgcccgccgcgaaagccttgacccgcagcgtctcggcctgccgcgcgtcgggcggcggcggacgccggggctgcgccgggaagaggtggcgatgctggcggacgtcggcgtgacctggtacacctggcttgagcaggggcgggaagtgaatccgtcggcggcggtattaagcggcgtggccagcgcgctgcagtgcagcccgctggaaacccgccatctgttcgtactggccggcttaacgccgccggagaatacgcaggccacggtttgcgaggggatcagtcccggaacccgacgcatgcttgatagcctgatgccgcagcccgccagcattcagaaaccgaactttgatatcgtcgcctggaatgacagtttttgccgcctgatgggcgttgatttcgcgacgattgccgaagaagaccgcaattgcatctatctctatctcacctgtgaagcctggcgtagccgcattgaaaatcgcgatgtgttgccgacttttgtttcctattttcgcgcggcgatggctgagcatcgcggttcgccagagtgggaagataagctggcgcgctttttcgccgcttcagcggagttcgaagcgctatggcaccagcgctatgaggtgcgcggcgtcgaaaaccaggtgaaaaattttaaccatccgcagctcgggcgctttagcctgcagcaaatgtactggtattccgcgccgcgcaacggttcgcgtctgctggtctatttaccgctggatgaaaccggagaacaggcgctggcctggttggatcaacagggctaa

SEQ ID NO: 86997 - DNA, 1428 bp, Enterobacter aerogenes
atgaattcgtctgctgtttcacccggccgcgccggattactgctgttactgaccggccagatgctgccgttaattgatacctcgataaccaacgtggcgctggactcgatcacccactccctcgacgccagcgccacccaactggagcttatcgtcgcgctgtacggcgtggcctttgccgtctgcctggcgatgggcagcaaactgggcgataactatggacgccgccgcctgtttctgtggggggtggcggtattcggcatcgcctcgctgctatgcggaatggctaactccattaacgccctactcgccgcacgaacgctgcaaggtgccggcgcggcgctgatcgtgccgcaaatcctcgccaccctgcacgtcaccctgaaaggcaccgctcacgcccgggcgatcagcctgtacggcggtatcggcggcatcgcgtttatcgtcggccagatgggcggcggctggctggtctccgccgatatcgccgggctcggctggcgtaacgccttctttatcaacgtgcctatctgcctgctggtgttggcctttagccgccgctatgtgccggaaacccgccgcgaaatccattccagtatcgactgggagggaactttcagcctggcgttaatcctctgctgcctgctgttccctatggcgctggggccggagctacactggccatgggagctacagctgcttttgctggccgtactccccctgctcggctggatgcgcctgagcgcgctgcgtaagcagcagcgcggcgagcaatcgctgttaccgccacggctgttgaaactcaccagcatccgttttggtatggctatcgcactgctgtttttcagcgcctggtccggctttatgttttgtatggcgctgaccatgcaggccgggctggggatggcgccgtggcagtccggcaacagttttatcgctctcggggtggcctattttatctccgcgctgtacgcgccaaagcttatcgctcgctacagcatgggacggattttgctgattggcctggtggtgcagattagcggcctgctgctgctgagcgtcaccttttatcaacttggcctgcggaccacgacgctggcgctggtgccctccaccgcgctgatcggctatggtcaggcgttaatcgtcaacagtttctatcgtatcgggatgcgggacattcgcgcttgcgatgccggagccggtagcgccatcctcagcaccttgcagcaggcgacgctggggctggggccggccattctcggctcactgttcttaaccctggccaagcgcggcggcggtgactatacgcaggcgctgatcgtcttcctgctggtcgaggtggcgatgatgctgctgctgggcgctattgccctttggctgcgccatcacctgaacctgcagccggcggcgacggcgtcctga

SEQ ID NO: 86998 - DNA, 1245 bp, Enterobacter aerogenes
atgcaggaattaatatcgcaaatcgccgcattaggcatcaaaatcacccctaccacctcgctcatcattacttttggcattatttttctgacggcgattgtcgttcatctcattctgcacaaagtggttctacgcacctttgaaaagcgggcgcaggccagcagccatttatggctgcagatcattacgcaaaataaactcttccaccgcctggcgttcaccctgcaggggattatcgtcaacgttcaggccgtgctctggctgcagaaaggcagcgaagcggcggaaatcttatctacctgcgcgcaattgtgggtcatggtttacgccatgctctctttcttctcgctgctggacgtgattttcaacctggcgcaaaaattccccaccgcctcgcagctgccgcttaaaggtatcttccaggggattaagctggtcacggcgattattatcggcatcctgatcatatcgctgctgattggccagtcgccggcgattctgattagcggtcttggcgcgatggccgccgtgctgatgttagtatttaaagacccgattcttggcctggtggccgggatccagctttccgccaacgacatgctcaaactcggcgactggctggagatgccaaaatacggcgccgatggcgcggttattgatatcggcctgacgacggtaaaagtgcgcaactgggataacactatcaccacgatccccacctggtcgctggtctcggattcgtttaaaaactggagcgggatgtcggcctccggcggtcgtcgtattaagcgcagcctgaacatcgataccaccagcatccattttcttgacgagcaggagcagcagcgcctgattcaggccaaattgctgaagccctatatggactcgcgccatcaggaaattaatgagtggaaccaacagcacgctaatgaaccgtcggtgcttaacctgcgcaaaatgaccaatatcggcaccttccgcgcctatctgcaggagtatctgcgtaaccatccgcggctacgtaaggatatgaccatgatggtgcgccagctggcgccggacgctaacggcctgccgattgagatctactgcttcaccaataccgtggtgtgggcggagtatgaaggcattcaggcggacatcttcgaccatatctttgcggtggttgatgagttcggcctgcgtattcaccagacgccaaccggcaacgacattcgttcactgtcgggcgcgctgtcgtcatag

SEQ ID NO: 86999 - DNA, 1377 bp, Enterobacter aerogenes
gtgaaagacgcgtcaacgtcgtcggatgccgtagaagagagcggcccgacgcttcatcgcggtttacagaaccgacatattcaacttatcgcccttggcggcgcgattggcaccggcctgtttcttggcattggtcccgcgattcaaatggctggcccggcggtgttgctgggttacgccgtggccggtattgtcgcttttctgattatgcgccagcttggcgagatggtggtggaagagccggtatccggttcttttgcccactttgcctataaatactggggcccgttcgccggtttcctgtccggctggaactactgggtgatgttcgtgctggtaggaatggcggaactgactgccgccgggatttatatgcagtactggctccccgatgtccccacctgggtttgggcggcggctttcttcatcattattaacgccgtcaacctggtcaacgtacgcctgtacggcgaggcggagttctggttcgcgctgattaaagtgctggcgattatcggcatgatcgcctttggcctgtggatgctgttcggcggccacggcggcagcaaagccggttttgataacctgtggaagcatggcggtttcctcgccactggctggcatggcctggtgctgtcgctggcggtgattatgttttctttcggcggcctggagcttatcggcatcaccgctgcggaagcgcaaaatccggaaaagagcattccgaaagcggttaaccaggtggtttaccgtatcctgctgttttacatcggttcactggtggtgctgctggcgctctatccgtgggtagagattaaatccgatagcagcccgtttgtgatgattttccataatcttgacagcaacgtggtggcttccgcgctgaacttcgtcattctggtggcatcgctgtcggtctataacagcggcgtctattccaacagccggatgctgttcggcctctcggtacagggcaatgcgccgaagtttctcgcccgcgtcagcaaacgcggcgtgccggtgaattcgctattgctgtcaggcgttattacctcgctggtggtggtgctcaactatctgctgccgcatgaagcgctggggctgctgatggcgctggtggtggcgacgctgctgctgaactggatcatgatctgcatggcgcatctgaagtttcgcgccgcgcagcgtcgtaaggggcgtgaatcgaagttcaaagcgttactggcgccagccagcaactacttctgtatcgcctttctcggtttgattctggtgctgatgtgcaccattgacgggatgcgtctgtcggcaatactgctgccggtgtggattatcttcctgtttgccgctttcaaactgctgcgccgcccggcgtaa

SEQ ID NO: 87000 - DNA, 2211 bp, Enterobacter aerogenes
atggggcaaattatgcacaccacgcactattcatccttcccgctgcgtaaaacgctgttggccttagccatcggcgccgccagtcaaacggcgatggccgcggacgctaccgccgcgaagcaacctggcgaagagaccctcatcgtcgaggctaacgaaaccagcgattttaaatccggcggcgacctggtggttccggcattcctcgacgggcagatcgcccacggcggccgtctggggatgcttggcgaacaaaaggcgatggacgtcccgtttaacgtcatcggctatacctcgaagctgattcaggatcagcaggcgaaaaccatcgccgatgtcgtcagtaacgacgctggcgtgcaggccgtacagggctacggcaacttcgccgagacctatcgaatccgcgggtttaagctcgatggcgatgacatgaccatgggcggtctggcgggcgtggtgccgcgtcaggtgatggacactcagatgctggagcgcgttgaaattttcaaaggggctaacagcctgcttaacggcgcggccagcagcggcgtcggcgggatgattaacctcgagccgaaacgggcggaagatctgccgaccgcacgtgttggcgtcgactatacctctgattcgcaggttggcggtaccctcgacctgggacgccgtttcggcgataacaaccagttcggcgcccgggtcaacctggtgcatcgcgagggcgaaggcgctatcgataacgataaacgccgtaccacgctggcttcgctggggcttgattaccgtggcgatcgtttccgctcctcgctcgatttcggctatcagaagaaaacgttccacggcggtacgatgggcgtcaatatcagcagcgtagatttcatcccggcgctgccggacaacagcaaaaactacagccagaagtggggctatagcgatattgaaagcgagttcggcatggcgaaggcggaatatgacctgagcgatagctggacggtatacagcgccctcggcggtcagcattcgcatgaaatcggcacctacagcgcgccgaagctgctcaataaaaacggcgatgcaacggttggccgccttgatactaaccgcatcatcgacgcgatcagcggcatgggcggggtacgcggcgatttcaataccggtgcgatttcgcataaggtgaatctcggctatgcggcgcaggtgcataccgatgcgaccgcctggcggatgtcggcgaagaatccgaccaccaatatctatgacaaccgcgatgtggcaatgccggataacgcctattttggcggcaactaccacgatccgctggtcacctcgcgcagccgtacgcagggctggctgctgagcgacactctcggcttctttaacgataaggtgctgtttaccgcggctgctcgtcatcagaaagtggtcgtgcgcaactacagcaacgccaccggactggaagatacctcttcgcgttatacccaaagccgctggatgccgacgtttggcctggtgtacaagccgtgggagcagctgtcgctgtatgctaaccataccgaagcgctgcagccgggctctgtggcgccgactacggcggccaatgccgggcagagtaccgggatcgcgcactcgaagcaggacgaagtgggcgtcaagatcgactacggaacgatcggcggatcgctggcgctgtttgaaatcaaaaaaccgaacgccatttccgataccgctggcaattacggcctcgacggcgagcagcgtaaccgcggcgtagagatgaacgtcttcggcgagccgatgctggggctgcgtcttaacgccagtacggtgtggctggatgccaaacagactaaaaccgctaaaggcgcaaccgatggtaaagatgccatcggggtggctaatttctacgcggtgctcggcgccgagtatgatattaagccggtggaaggcctgaccgcgacagcgcgtgtcaatcatagcggctcgcagtatgccgatgcggccaacaccaagaagctggatagctacaccaccctggatttaggcctgcgctatcgtatgcgcctgaacgccgaccagaacgaaatgacctggcgcatcggggtgaccaacgtgaccaacgagaagtactggtccggcattgacgataccggaacctatctgttcgaaggcgatccgcgtaccgttcgcgtctcaatgagctacgacttctaa

SEQ ID NO: 87001 - DNA, 1083 bp, Enterobacter aerogenes
atgaaatacactcttccggcgttggcgctggccatcagcgcgacgttaggcggctgcgcgactcaccattccgctgccgtcgcgcaaccggttgttaactctcctgcggctaacgtggcgcaaccgctgcagcgccagctagcggaagggttgtacgagatggcgctaagcccgcagggtgatgcgctgtacgtcgccagcgccgaaggctttaaagatgtgcagggcggggcggtttacaagctggatccgcaaacccttaataccatcggcctgacgcataccgatctgaaaaacttcgctttgcagctctctgcggatggtaaaacgctatacgtcagcaattcgcttgacggcggcatcagcgctatcgacaccgccaccggcaaggtaaaaaaccgcctgctgttcagcgagcgcaatgaaaaagggttcccctatggggcgcgtcagctgctgctgttaaataataccctctacgttggcgcggtcgccgacccggcgcaaatctgggtggttgacgccgctaccatgaagctgaaaacgcggattaaaaacaccggtaaatggatgaccggcctgcactattccgcacaaaccgggcgcgtatacgccgccaacggcagcggtgaaattctggtgattaacccgcgtaaccaacgcattgaacagcgctggaagccgctgggcgacaagccggcgctgctgcttaatatggccgaagatagcgacaccggtcgtctgttcgtgaccgataactcgaaagcgaaaaccaccctggtgctggatatccacagtggcaaactgcttaaacagctcgaggtcggcgattcgctggcggtgcagttcaatgggaaacgccacgaaatttatatttcacagcgtgaatccggcaaggttatcagccttgacgacagccgctacacgctgaagaaaagctgggcgctgccggccaatcccaacagcctgctgctttccgccgatggtcagacgctgtttgtcaccgtcaaacagcccttcaataaagaccactccactaaaggcccggacagcgtcgtacgcatcgacctgaacgagcaataa

SEQ ID NO: 87002 - DNA, 1305 bp, Enterobacter aerogenes
ttgactacgccattaaaagagatcgttattgtcggcggcggcgccggtgggctggagctagcgacccaactgggacgtaaattagggcgccgagggaaagcgaatatcactctcgtagaccgcagccagagccatctgtggaagccgctgctgcacgaagtcgccactggttcgctggatgaaggcgtggatgcgttaagctttcttgcccatgccagcaaacaccacttttccttccagcacggttcggtaatggatatcgatcggcagaataaaacgattactatcgccgcgctgcgggatgaacaaggcgaggtgttggtgccggagcgtaaattatgttgggacactctggtaatggcgctgggcagtacttccaatgatttcaatacgccgggtgttaaagagcactgtatttttctcgacagttctgagcaggcaaaagtatttcatcagcaaatgctgaaccaatttctgcgctattctgccgaccctcagacgtcaggtaaggtcaatattgccattgttggcgggggcgctaccggggttgaattatctgccgaattacataatgcggtaaaagaactgcgtagctacggttataaagatctgaccaacgaagcgttaaatgtcagcctgatagaagccggcgacggtattttacctgcgctgccaaaacggatttccagcgctgtgcacgaaaagctgacccaacttggcgtgaatgtgatgaccaataccatgatcaccggcgttgaagaaggcggcctgcataccaaagatggccagtttatcgaggcgagtttaatcgtctgggcggcggggataaaagcgccggacttcatgaaggatattgccgggctggagaccaaccgtattaatcaactggtggtgaccccgacgctgcaaaccacgcgcgacgctgatatttttgctttcggcgactgcgcggcgtgcccgcgtccggaaggtggatttattccaccgcgcggccaggcggcgcatcaaatggcgctcttcactgccgacaatattatcgcccggatgaaggggcataagttgaaatcgttctcctatcgcgatcgcggttcgctggtttcgctctccggctacacgacctttggcagcatcatggggcatctaccgatcggcccgatgatggtcgaaggccgtattgcgcggatggtttacgattcgctgtatcggatgcaccaggtgacgctgcacggttatttaaaaaccggcctgatgatgttgtccggcgggattaaccggattattcgcccgcgcctgaaattgcattaa

SEQ ID NO: 87003 - DNA, 1485 bp, Enterobacter aerogenes
atgagcgaaataaccttactggcggaagtgaccgcctttttacgccagccgcacgggcagtttattgccggtcatcgggaggcgggccacggcgcgccgttcgcggtgataaacccggcgaccggagaggcgattgccgaaatcacggcggcggatgtcggccaggcggaccgagccatggaaagcgcccgccaggcgtttaatcagtggcgcgagatgccgacgctggcgcgcggcgcgttgctgctgaaactagcggacacgctggcagagcatcgcgaagagctggcgcagttggaaagcctttgctccggtaaaaccatcatgctggcgcgaatgctcgagctggatcagtcggtggcgtttttgcgctacttcgccggctgggcggggaaaatcaccggcgaaaccctggatgtctcgctgccgtcgatggccggggagaaatataccgcctttacccgccgccagccgttgggcgtggtggtcggcatcgtaccgtggaacttctcgattatgattgccatctggaagatggcggcggcgatggtctgcggctgcactatcgtcctcaagccgagcgagtatacgccgctgacgctgctgcgggtggcggaactagcgaaagcggtaggtatcccggatggcgtcattaacgtggtcaacggcgccggcggcgagattgcccaacgccttatcacgcatccggcctgcgccaaggtgagcttcaccggctcggtggcgaccggggaaaaagtccagcactcggccagtgcgtcaggtaaacgggttacgctggagctgggcggtaaaaacgccgcgctgtttctcgatgacctgacgccggaggccatggtgaacggcattatcgaagccggttacctcaaccaggggcagatttgcgccgccgctgagcgcttttatctgccgcagggcaaactggatgcggtgctggcgctgctgaaagacaggctcagcgctttcgcgccggggtcgccgctggatgaacaaacgctgatggggccgctggccaaccgccagcagtatgacaaggtcttgcggctcattcagaccgcacgcgaagagggggataccatcgtctgcggcggcgaagcgctgcccggcgagggctatttcctgcagccgacggcggttaaggtgcgcagcgaagagagcaccctgatgcgcgaggagaccttcggcccggtatgcagctttattggttatcgcagtgaagaagaggcgctggcccgaattaatgcttcgccgtatggactggcggccagcgtctggtcggataatatccgccaggcgctgcgctattcgcaggccattgacgccgggatcgtctgggtcaacatgcataccttcctcgacccggcggtgccgttcggcggcatgaaaggatcgggtattggccgtgagtttggtagcgcgtttattgatgattatactgaacttaaatcggtgatgatgcgttattaa

SEQ ID NO: 87004 - DNA, 1302 bp, Enterobacter aerogenes
atgaatattaaaatcgatgcgctgaactactacggcgcgacgaagaaataccagctccattttccggcgctgcgggaagatatcgaagccgatgtggtgattatcggcggcggcttctccggcattaacaccgcgctggaactggcggaacaggggatcaccaacgtggtggtgctggaagcgcgccatcttggctatggcggcaccgggcgcaacggcggccaggtgatggccgggatcggccacgatatcgaagcggtaaaaaaacacgtcggcaaagaggggctggaaacgctgtttaaaatcgccaatctcggcgcgggtatcattcgcgaacgcatccgcaaatacaacatcgacgccgatttcgtacccggctacggctacctggcctataaccagcggcagcttaaaacgctgcgccagtgggaaaaggagtttaaagccgctaccccggatgaagagattgaactgtataccgggaaagaggtacagcaggtggtcggctccgaggtctactgcggcgcgctgaaacatatgggcggcgggcagatccattcactcaatatgctgcttggttcggcacaggccgcgcattctctgggggtgaagattttcgaatcctcaccggtagtagaggtgaattacggcaaacaggtgcaggtgcgcaccgcgatgggcagcgttaaagccgcaaaactgctgtgggcctgcgacagcttcctcaacaatatggagccggagatctacaacaaaacgctggtcacctactcctatcaggtgtctaccgagccgctctccgatgaactgatcgagcgcatcagcccgctgcgcggcgccttcagcgatattcgcccggtgattaactactaccgcgtcactcgtgaaaaccgcctgctgtttggtagcgccacccgcttcctggagtatacgccgaacgatttcgccgcctggaatcgtacgctgctggcggaggtcttcccgtacctgaaagatgtgaagatcgatttcgcctggggcgggccgatggcctgcagcgccaacctgttcccgcagattggcaccttacgcgaccataacaacgtcttttacgtccaggggtactccggcttcggcgtcaccccctcgcacatcgtgtgcaaaatcctcgccgaagggatgaatggcggttccgaccgctatcgtctgctaagcagcattccccacgcgaccatccacggccgtgacaacctgcgcttgctattagtcaccgccggaaaactgatgcatcaaaccgccggtttctggaaaggccggagttaa

SEQ ID NO: 87005 - DNA, 366 bp, Enterobacter aerogenes
atgcacgcttttaaactcaaacacccggtacctgaactacagccgatcggcagcgtcagcctgctcggcgcgacgccgaccgtcggcgacccgcaggtagcgggcgcgatgatctacggcgagccgcaggacgcctttacctgcggactgttttcgtccaccgaagggagctttaccatgacctatccgtttaccgaacacgccaccgtgctggagggcgaagttgaactgaccgtcgccggcggcgagccgcagcgcttcgcgccgggggacagctggtttgtcaaacagggcaccgaagtggagtggaaaatcctcaccccgcgtttcgtcaaacactatctggcgaacgtcgagacgcgctaa

SEQ ID NO: 87006 - DNA, 1500 bp, Enterobacter aerogenes
atgtttagtaacagactcgccagccatcttgaacgcggcgtcgtcggctttccgacgaccctcgccagctcggttgggctgattatggcaagcccggtgatcctgacggtcaccagcggattcggcatgggcggcgacaccttcgcgctggcggtactgctggcttttattatgatgcaggcgcaggtcactaccttcgctgaagccgcgacgttaatccccaccaccggttcggtgtacgactatatctcctgcggtatgggccgcttcttcgccattaccggcgcgctgtgcgcctatcttatcgtccatatcttcgccggcaccgcggagaccattctcgccggcattatggcgctggtgaacttcgaatcggtcaacgcgcagatggccgcccatcaaaacacctggatggtcggcgtcggtatggtggtcattttcggcctgctgaacgccattggcgtggaaattttcggcaaggtcgaagtggtgctcacctttggcatgtggacgacgctgaccattttcggcctgtgcggcatttttatggcgccggtgactcacctttccggctggttcggcacgccgctgaacgttagcgatatctccggcctgttcggctatatcggcatggcgatgtttatgttcgtcggctgcgaactggtgacgccgatggcgccggaaatcaaaaaagcccaccgcaccattccgcgggcgatggcgctgggtctgctgggcgtcgccagctgcatgtttatctacggcgcggcgattaaccgccaggtggaaaacgtggtgatcgatgcggcgaataacgtccatctgctggacacgccgatggcgatcccggccttcgccgagcgggtgatgggccacgccggccagtactggctcggggtcggcctgctgctggcgggctgcgcgacgattaatactttgatggccgcggtgccgcgtattatttacggtatggcgctggacggcgcgctgccgcgttttcttacctggctgcatccgcgcttcaaaacaccggtgatcgcgatagccatcggcgtggccattccctgcctgcacgcctggtacctgaacggcgatctggaccgcatcgtgccgctgatcctcgccgcggtctgcgcctggggcgtagcctatctgctggtcaccctgtcggtggtgatgctgcgcattcgccgcccggacctgccgcgcgcctaccgctcgccgtggttcccgctaccgcagattatctccagcgtcggaattatcatcgcgatcgtgaatattaccccaccggggatggacagccgcgaggtgctggtgccgttcgggattatgctcggcctgaccgccgcctatgccctgttctggacgctgtgcgtacagcgcgttaatccgttcaagccgctggaggtggaagaggtggtcgagcgcgctatcggcaattacgagaaacagacccgcggggagatgacgcctgatgtcctccgtcccctggtttga

SEQ ID NO: 87007 - DNA, 555 bp, Enterobacter aerogenes
atgtcctccgtcccctggtttgaaacgccattaatgaacgcggtgcagcgcgacttagcgggctggccgagcgaaaaactgagcgaaagcagcgcgatgttgcggctaaacgacgtcaccgccgtcaccttcagcgtgcgccagaagcggctatttatggccagcattcacagctgcgagtttgtcgtcgaggggccggttacccggcccgctcgcggcaagatccgcgcccaccaatccggctggctaaaacgcctgccaatccattttatcggcagtaaagagagcgcggaactcgccggctatctcaatggttttcctaatctccaacagaccttaagcgagctggactaccgccgcttttcgttgacctttgacgatagcggctggcgctgctgcattgaaccctgggccgccagcgaagtggtctgtaaaatgccgccgctgcgccgttatctgaagctcgaagcgcagcagcggatgctgctgctcagcgtactggcgatgattaatcaggcgataagtcagtggatggttgagaagatcaataattaa

SEQ ID NO: 87008 - DNA, 360 bp, Enterobacter aerogenes
atgaatattaagcctatccgcactgaacaagattacgaagccgcgttaagcgcggttgaacctttttttgataatgaaccagcacctgatacgccagagggcgatttttttgaggtgatgtgcttgctcattgaagagtatgagaaaaggcactatcccatcgagccgcccacccccgttgaagccataaaatttcgcatggagcagcaggggcttaccgtaaaagatctggaaccagcaattggtaaatctaatcgcgtctatgaaatactcaatggcacgcggaacctgacgctcccgatgattcgccggcttcatgcacagttcggcattcctctggagagtctgatcggcgcgtga

SEQ ID NO: 87009 - DNA, 1116 bp, Enterobacter aerogenes
gtgaaaagaaaaaccggtttcttctttgatgaacgttgtttctggcacagtaccggcctgcacgcggtaacgctgccggtcggtggttgggtgcagccgccggctggcggcggccatgccgagtcgccggagaccaaacggcggatgaaaaacctgatggacgtctccgggctgacgccgcagctggaactacgcagcgcggcggcggcgagccttgaggacctgcggcggatccatcctgatagctatcttaaacgttttaaggcaatcagcgataacggcggcggcatgctcggcaaagaagcgccgctggggccggggagttatgaaatcgcctgcctttccgccggactggcctgtgccgccgtggaagcggtgttgaaaggggagctggataacgcctattcactgtcgcggccgccaggacaccactgcctgccggaccagtcgatggggttttgtttcctcgccaatattcccattgccgttgaacgggcgaaagcgttgctggggctcggcaaggtagcgattattgactgggacgttcaccacggtaacggtacacagcatatctatctgcagcgcgatgatgtgctgactatctcattgcatcaggatggctgcttcccgcctggctactccggggaggacgatcgcggcgttggcgcgggcgaaggttacaacatcaatattccgctgctggccggggcgggcgacgacagctggcgctatgcgctggaaactatcgtcattcccgcgctggcgcgttttgaaccggagttgatcattgtcgcctgcggctatgacgccaacgcgatggatccattagcgcggatgcagctacatagcgacagcttccgcgcgatgaccgaacaggtccagcaggcggcggatcgactatgcggcgggaaactggtgatggtgcatgaaggcggctacgccgagtcctacgtgccgttttgcggcctggcggtgatggaaacgctgagcggggtgcgcaccgaggttcaggatccgctgctggaatttattcagcagcagcagccgcgcgccgcattcgcgcagttccagcgccaggccatcgatcggctggcgcagcagtttggtctgctataa

SEQ ID NO: 87010 - DNA, 1194 bp, Enterobacter aerogenes
atgtcgagtacacctctttctgaaaataccctttcccggcctgacgggctggtggtgtcgctgcgtttgctggcggcgattgttattttcgccgccattgcgccggggattttaatgaccgcgccggcggtggcggcgcagctggccagcgaatggcaccttaaaccaggacagatcggctggctattttcggcggagctcggcgcgatgagcctggcgacgctcccggcgtggtggtggatgaaccgcctcgactggcggcgggtggcactcgtcgcctgcgcggtatttctgctcgctaaccttgcttcggcggtggtaactcagtatgcgtcgctgctggcggtacgctttattgcttccctggcgggcggcacgctaatgattttgtgcatcagctgcgcggcgggaacgccgaatccatcgcgggtgtacgcattctgggtactggggcagctgctgttaggcatgcttggcctgctggtgttgcccggcctgttcgtgacctttggcctgaaggttgtttatctgattctcgccgccatcatgctctgctgtttgccgctggtttccgccttcccgtcgtgttttcaagcgcgatcggcttcccatcgccagccgcctgcggcgtcgtggcgaaaggcgctggcggtgctcgcagttctcaccttctatatcagcctcagcgcggtatggacctttatcggcaccatcggcagcggggcggggttgagtccgacacagatcggtctggtgctggcggcggcgacggtgttcggcattatcggcgcaggcggcgcggcgctgcgcggtacccaacgtccggaccggctggcggtgtggctgggatacgcgctgctgatcgccagcgtgctgttactgacgggccatccgctgctggtgcgttacgccattgcggcgctgctgtttaagttcacctggacattcgtgctgccctttatcctcgctcgcgtggccgcgctcgataataacggccggttgatgaacggcatcaatctggtgatcggcggcggaatggccgccggtccggcgctcgcgggggccttactgcaacacttcgccagcgccaatccgctgctggcggcggcaggcgcctgcgcgctgctgtcgctgattttgattgcggcggcgtcgtccgccggaaaaggtttagccaacgggaggatagagtga

SEQ ID NO: 87011 - DNA, 684 bp, Enterobacter aerogenes
atgtctgctttattaaaagccagtcgtaatgatgcgataatagcccgttgtttacagactatttcacagttaattccactgtcttcagcggttttttatcgagtaaataatcgtttaaaacctgaaaactatatattgcataatatttcggataatacacaccaacaatatctggagagcttccagccgttggatccacacctgccggcgcactttagtcaccagagtacgaccatggcagcgatgacgccgcggctctgcgaccgcaaccgccattactatcatgaatttatgttgccgaataacgtacgcgacatgaccgaaatctttattcgccgcgaacggcggatcgttgccggtatctcgctgatgcgcgacgtgcctttttccagcgaggaacggctgcgggcccaggcggtactgccgttggtggaattggctattcgcgatttcctgcaggaagaggatgaactccctgccatcctgacggccaaagagcgcgaaatcgtcggcatggtgcgtgaaggcgccagcaataagctgattgcccgccagctggatatctcgctctcgacggtgaaaacccatctgcgcaatattttcgccaaaaccgaagtcgtcaaccggactgaactcgtttcccgaacctggatgcctgccgctcagcgtacgctgcatctgtaa

SEQ ID NO: 87012 - DNA, 1188 bp, Enterobacter aerogenes
atgctgaatatcgccgccttacgccagcagcaaattccgctggccgttgaaccgcgctcatcgctgccgtttcatattctgatgaaaccgattggtcccgcctgcaacctcgcctgccgctactgctactacccgcaggatgaaacgccggtcaggaagatggacgaggcgcggctggagcagtttatccgccgctatattgccgcccagcccgccagcgcgcgggaaatcaactttgtctggcagggcggcgagccgctactggccgggttaagtttttataaaaaagcgctcgccctgcagcagcgctacgcccctgatggcgtaaccatcagcaatagcctgcagaccaacgggacgctgatcaacgacgcctggtgtcgactgtttcgcgaacatggctttattatcggcgtcagcctcgaaggtagcgaagcgctgcaaaaccaccatcgtcctgataaacgcgggcaggcttcctggccggctgcgctgcgcggtatcgccctgctccaccagcatcaggtggagtttaatctgctggtagtggtgcataacgaaatcgccgcccacgcggcggcgatttatgaccgggtggtcacgcttggcgcgcgctatctgcagttccagccgctaatgagcgaaggcgcggcgctgcgcgagggttatcagcttagcgccgataactggggtcgttttatggtcggtatctggcgacagtggcaaaagcgctgcgatatggggcgggtgttcgtcatcaatatcgaacaggcgtgggcgcagtactttacccataccagcggcagctgcgtgcatagcgcccgctgcggcagcaatctggtgatggagtcggatggacagctttacgcctgcgatcatctgatcaacgccgaacaccgtctgggtcgccttgacgagcagacgctcgccgccgcagttgacgcttcagttcagctccctttcggccagcaaaaaagcctgcgtcgcgaatgtcagacttgctccgtaaaaatggtctgccagggcggctgccccgcgcatctcaacgccgctggcaacaatcggctatgcggcggttattaccgtttctttagcgaaatcctcgcgccagtacgccccttttcccgcgaccttaatggcctgaaagcctggcgggacgcgtttgttggggccgcgcatcccgcgtag

SEQ ID NO: 87013 - DNA, 1734 bp, Enterobacter aerogenes
gtgaacaaaaaagccatggccgcggcggtcagcatgatcctcgccggcggcgcgcacggcgcgcagaatgagcatccaaacgtcatcgtgattatcgccgatgatatgggttattccgatatcagccccttcggcggtgagatccccacccctaacctgcaggccatggcggagcaaagtatccgcatgagccagtattacacctcgccgatgtcggccccggcgcgttcgatgctgttgaccggcaacagtaaccagcaggccgggatgggcggcatgtggtggtacgacagcaccattggcaaggagggttacgagctgcggctgaccgaccgcgtcaccaccatggccgagcgctttaaagatgccggctataacacgctgatggccggcaaatggcatctcggttttgttcccggcgccacgccgaaagatcgtggctttaaccactccttcgcctttatgggcggcggcaccagccattttaacgatgcgataccgctcggaaccgtcgaggcgttccacacttactatacccgcgatggcgagcgcgtctccctgccagatgatttttactccagcgaagcttacgcccgccagatgaatagctggattaaagcgacgccgaaggagcagccggtcttcgcctggctggctttcaccgcccctcatgaccccctgcaggcgccggacgagtggattaagcgctttaaaggccagtatgagcagggttacgccgaggtctatcgccagcgcatcgcccgcctgaaagcgttgggaattattcatgacgacaccccgctgccgcatctggagctggataaagagtgggaagcgctaacgccagagcagcagaaatatacggcgaaagtgatgcaggtatatgcggcgatgatcgccaatatggacgcgcaaatcggcacgctgatggagacgctgaaacaaaccgggcgcgataaaaataccctgctggtgtttttaaccgataacggcgccaacccggcacagggtttttattacgaatctactcccgaattctggaagcagttcgataacagctatgacaacgtgggccgcaaaggatcctttgtctcctacggcccccactgggccaacgtcagcaacgccccttacgccaattatcacaaaaccaccagcgcccagggcggcatcaataccgactttatgatctccggccccggcattacccggcgcggtaaaatcgacgcctcaacgatggcggtgtacgacgtggcgccgacgctatacgaattcgccggcatcgatcccaacaaatcgctggctaagaaacccgtattgccgatgattggcgtcagctttaagcgctatctgaccggtgaaacgcagacgccaccgcgctcgaagtacggcgtcgaattgcataatcaggcggcctgggtcgatggcgactggaagctgcggcgcttagtcaagctcggcctcagcgccggcgacgcgccgtggcagctgtttaacctgcatgacgatccgctggaaacgcacgatatcgcggcccaacatgccgaccgggtcaaagccatgatcgacgcctacgaggcatttgctaagcgcaccatggttaccaaagcgcagggcaagatgatcgattatgtcggcatcgatagcaaaaccggacgctacctggcggtcgatccggcgaccatgaagccggtgcccgcgccgcaagccattcctgtgagcgagggcaaataa

SEQ ID NO: 87014 - DNA, 777 bp, Enterobacter aerogenes
atggcgagagtcgtggtgattaccggcggcggaagcgggatcggcgccgcctgcgctcggttgatgagcgcggcgggagatcgggtgtttattaccggcagacgtgaagcgccgctacacaagatcgccgttgaaaccggtgcgacggcgctggtgggcgatgccgccgacggcgacgtctggcgggaacggctgctaccgccgattctcgaccagactcacggtattgatgtactcatctgcagcgccggcggcatgggcaatagcgccgccgccgataccagcgatcgccaatggcgcgaggcgctggacgcgaatttaaacagcgctttcgtcagcgtgcgcgcctgcctgccttcactgattgcctgccgcggcaatgtgctgtttgtcgcctccatcgcctcgctcgccgccgggccgcaggcctgtggctatgtcaccgccaaacacgcgttaattggcctgatgcgctccatcgcccgcgattacggcccacagggcgtccgcgccaatgcgatttgtcccggctgggtcaccactccgatggcggatgaagagatgatcccactgatgcaggaacacgggctgtcgcttaccgaagcctatcaacgggtgtgccgcgacgttccgctacgccgccccgccagccccgaggagatagcccgggcctgtcagtttctctgctctccgcaggccgccatcatcagcggcgcgacgctggtcgccgatggcggttccagcatcgtcgatgttccaacgctggcgttcacttaa

SEQ ID NO: 87015 - DNA, 792 bp, Enterobacter aerogenes
atgacttcagaagccgtattcatccaggtcggcgcgctggccgatggtttcgccccgcacggcaacctgctggccgccgccagtctgcccgcaggcgaacgctttaccttttatgccgacgggagcgagccgcagcagttggttatcgaaaatgaccagacactgctttggaacggcaaacgcgcgccctggcgggcaaccgccctgcgccccgatattctgtttatcgattttcttgacccggagcgcgataacgccagtatcagcgcggtatgcaacctgacgcagcgcaacgccacgctggtatacggccagctaccggacgaagccgccgcgcggctggacgccttcagccgggtagagcaagggttgccgctgaccgccgtcgaggcgcgatttgtcttcgcccgcctggatacccagccgggaccgctgccggactttaccaccgcgctggtcggcatgcgcaatcagtatacctatagcccgaccgagcgttatgaacacatctatctcaacgataatttttacgcctggcagtgtctggatggcgtggaaaaggggctggcggatgtcgatcgctgccattacgtgcaggtggctgaggatctctatttgttcgtctggcgggagaaaatcattcccacgttgggggctatcttgatcgatcttcagcagatgcgtaccgatggtaagatcatgggttatcagggcagtgattttggcgccttgagtaatttcccggtcggcgcgagcgcgaagatcctcaacgtcacccgccatcaggaataa

SEQ ID NO: 87016 - DNA, 954 bp, Enterobacter aerogenes
atgatgacacgtccattgggcaaaagcggattttccatcgccccattagtatttggcggcaacgtctttggctggaccatcgatgagaaaaccagttttgccattcttgatgcttttgttgaccacggttttgatgctatcgatacggcggatgtgtattcccgctgggcggagggcaatcagggcggcgaatccgaaaccattattggccgctggctgcaggcgcgccctggcatacgcgataaagtcaaaatcttcactaaagttggctctgatatggggctacccggccataaaggattgaaaaaagcctggatccagcaggcgattgacgactcgttgcgccgcctgaatacggattacgtcgacctctatttcgcccactggccggatcctgaaacgccaatcgatgaaacgttagaagcattccaggcgctgcagcaggccggcaaggtgcgggcgattggcgcttcaaacctcgacgccggacagctgtcatcggcgctggaagtggcgcgtaaaggcggccttcccgcctggcaggtgctgcagccggaatataacctctatcaccgctccgcctttgaaggggcgctacgcgatctctgcgtcagccgcgatataggcgtggtgacctactacagcctggcttccggcttcctgagcggtaagtatcgccagccgtccgatttagcgcaaagccagcgcggtagcggcatcgctaaatatctcaatccacgcggaatgcggattattgacacgctggtcgcggtggcggaagaacagcagacgaagcccgcagaagtggcgttagcgtggctgatgagccgggaaggcgttaccgcgccgattgccagcgccaccagcctggcgcaggtggaaagcttcgcccgcgcggcagcgctgagccttagcagcgagcagttggcgcggctcgacagcgccagcgcctga

SEQ ID NO: 87017 - DNA, 777 bp, Enterobacter aerogenes
atgaaaaaatcactgttgttgtgtttggcattaatggcgtcgacgtcggcgctggccgccggggcgaaagagatccgttttggcgttgacccgaccttcgcgccgtttgaatggaaagagccgcagggcaagctggcgggatttgatatcgatttgggcaacgcgatatgtcagcaactgcaggcgaagtgcgtgtgggtggaaagcaacttcgacggcattattccggcgctgaaggcgcgtaaattcgacgcgatactctcagggatgtatatgaccgagaagcgtaaagagcagattgcttttagcgataagctgtacaacgggccggtgtttctggtggcgcgcaaaaataccctcaaaggcaatacgccagagcaactgaaggggaaaaccatcggcgtcgagcaggggtcggcacaggaaacttatgtgaaccagtactggcggtcgcagggtattaacattgtcgcctatcagggcgccgatagcgtcgttcgcgaccttgagtcaggtcgtctcgatggcgcggtactctccggcatgatggccgattacagcttcctgcagcagccgcagggcaaggatttcgcctttgttggcggacaactgcaggataataaactgttcggcgccggggcggcgattggcctgcgtcaaggcgacgatgcgctgcgcgaagagataaatggcgcgattgcgaaaatgcttgccgacggcacctacaaaaaactggccgggaaatattttagctttgacgtttattccgggacataa

SEQ ID NO: 87018 - DNA, 1179 bp, Enterobacter aerogenes
atgtctgattgtgtaattccagaaattaaagccacggaagatgaaatgatttctatccgtcattatttacatgccaatccggaattaagtctggaagagtttaataccagcgagctggttgccggtaagctgacagaatggggctatcaggtgacccgcggcctcggtaaaaccggcgtcgtcggcagcctgagcaaaggcgactcgccgcgcactattggcctgcgcgccgatatggacgcattaccgatttatgaaaccaccgatttaccctgggccagtaccgtacccggaaaaatgcacgcctgcggccatgatggccacaccacgattttgctcgcggcggcgaaatatattgcctcgccggcctgccagttcaacggcacggtgcatctgattttccagcccgcggaagaagccatcggcggcgcggatctgatgattaaagatggcctgtttgagcagttcccctgcgaacgcatcttcggcctgcacaatatgccggggctaccggttggcaagctgggcttctatgccggcaactttatggcctcggcggacacggtcaaaatcacgattaccggctacggcggccacggcgcgcatccggaacgaaccgtcgaccctatcgtggccggcgcggcgctggtgatggcgctgcagagcatcgtcgcgcgcaacgtgccgccgggtgaaacggcggtcgtcagcgtggggactttccaggccggcatcgcctcgaacgtgattcctgagagcgtggtgatggagctcagcgtgcgggcgatgaaaccggaaattcgcgatctgctgattaagcgtattcaagagctgaccgagtttactgccaaaagctatggcgccagcagcgaagtcgagatttacgactcttacccggtattaaccaacagtagtgaagagaccgatttcgcccaggcgctggcgctggaagtctttggccgcgaaggggtgctggagtcggtatcgccaatgaacgccagcgaagatttcgcttttatgctgcgcgagcgtccgggctgttacttcctgctcggcaacggtgaaaaaggcgagaagggcggctgcatggtgcataaccccggttatgactttaacgatgacattatctgcaccggcgcgacactgttcgcgcgtttagtgcaagcgcactgccgttaa

SEQ ID NO: 87019 - DNA, 591 bp, Enterobacter aerogenes
atgaaatatcatttacttttacttgcctgcgcgctgacgctaacaggctgcagcgctgagggcgacaccgccagccagcaacgcgccagcatccaaaagatgcgtaccaacacgctcagtaaactctatagcctgtacccggaagcgcgtagcgatatccagcattcaaagggctacgcggtcttcgccagtaacagcagcaagatattagtctttggattcggtagcggttacggcgtggtgaaaaatagcgccaccggcaaagatacctatatgaaaatggcccagggcggcgccggtgtgggtatgggcgtgaaacagttgcgtaccgtactggtattccacgataaagacgcattgaatactttcattactaaaggctatatggtcggcgcggatgccaacgcggcagcgaaatatgacgacagcggcatcgccccgataggcgcgtcagccaacggcgtggcgaaagatacctcttcgctgccgtcaaaagtcaacgtttatgaaatcaccgagaaaggtttggcggctcaggcaatggtcaacggttataaatactggccggatgacgagctgaataaaaggtga

SEQ ID NO: 87020 - DNA, 465 bp, Enterobacter aerogenes
atgaaaaagatgatttctctggcggttattttatcctgtgtgctgagcgctcaggcttttgccgatggtccaaatgacggtcatcgtccggggcaacagcaggtatggcagaatggcccgaagcagggtgaccagaatggacaccaccagccgggcggtcctggcgataaccatcagggcaacaatgatagccgcggcccggaccgaagaggtcatgacgatcgtcgccaggaacgccatgaacaggaccatttcgcctggaggggtaacgatttccgtaaaggccatccggcgccggagcattatcgcggtgatgaatatcgcgtcagtaactggaacgaacgtggcctgccgcgcccgccggaggggcatcactggtcttatatcgatggcaattacgtgctgatcgccgcagcgaccggaattattacttcaattctggtaagcggcgccctcggtcattaa

SEQ ID NO: 87021 - DNA, 426 bp, Enterobacter aerogenes
atgaaaaaagcaatgattgcactatccgctattctggtcgcttctccggtattcgcggcaaccactacacatgcaaccgatgataccgtggccgcagcccacgaaaatgccaacacggcaaaagaaaaactgcaccaggcgcagaatcagggcgaagagatgaagctcaagtccaaacatgctgctgaagggaaaagcgatagcgtcggcagccagataagcgaaggcacgcagaaaacctggaataaaaccaaagaaggcgccgagaagggctgggataagaccaaagaaggcactgagaaaggctggaacgccactaaagaaggcgccagcaaaggttgggataaaaccaaagaagtcagcgagaaaggctgggataaaaccaagcaaggcgctgaagagttaaagaataaagtctctgagtaa

SEQ ID NO: 87022 - DNA, 1143 bp, Enterobacter aerogenes
atggaaacgttattactgctgtgttatgccgccttgtgtatcgtgatatttaaagtattccgtattccattaaataaatggacggttcccactgcggtattaggtggcgtgatactgattggcatgttaatcctcggtatgaattataacttcccctatagcgaagtcgggaagcaggtttatcgcaccgtgcccattgtttcgcaaacccgcggtcgagtcaccagcgtgccggtgaaaccaaatcagatgctgcatgaaggcgacatcttgttcaccatcgacccaaccccgttccaggcgaaggtggacgacctgaccgcgcaggtgaaagcggccagccaggaggcgttgtcgctggatgcggggttaaccagcgcgcaggctgatttaagcaaagcggtcgccgagcgcgaccgggcccagcgtgaatacgcccgcttccaggcaggtcatgataaaggggccttttccgatcagatggtcgatacccgtcgccagaactggaaagcctcgcaggcggcggttgacgccgcccgggcaaaggtcgcacaggcgcgtaacgatctcaattcggtggtgcacggcgagaacaccaaagtcgcttcgctgctggcgcagctgcgcgaggcgcaatttaagctcgataacacggtggtgcgcgcgccgtctgacggctatgtcagtaccgtcggtctgcgtcctgggaccatgtccaccgcgttggggctgaagccggtaatgacgtttgtgccaacggataatgcgaattcacgtgaatacgtcgccgcattccgccagaacgcgctgcagcgtttgcaaaaaggtgaacaggctgaattactgttcccctctattccgggaaccgtatttaaagcgcaggttgcggaagtgctgccggcgattggcgaaagccagtttcagggtcaggggacgttgctgacggccaacgatctggcggcgcgcggccgagcgctggtggtattaaaagtgaccgacgatcgtctggcaaattatcagttgccgcagggcgcggatgtcgaagccgccgtctattcggaacattttgagcacctgtcgctgataagaaagatcctcatccgtatgaaaagctgggaaagctatctctatctcgatcactaa

SEQ ID NO: 87023 - DNA, 336 bp, Enterobacter aerogenes
atgaccctggattatattgctttagccatcctgattgcggtggtgctgattttattttatggaattatcatgatccacgatattccttatgaaatagccaaaaaaagaaatcatccgcaccaggatgcgattcattacgctggctgggtgagcttgttcaccctgcacgtgctgtggccgctgctgtggatctgggccacgctgtggcgagaagaccgcggctggggaatgcagcagttaaagaccgaccagcacgatttacatcagcgtctggatgcgatgcaggcggaattaaaccgtctgaaaaatagcgccgtcaatcaggagggtaaataa

SEQ ID NO: 87024 - DNA, 657 bp, Enterobacter aerogenes
atggatacggggaagttgaatagcagttttggtcgtattcatgcgtgctaccagaagctgcagttaaatgcgcatctcccacacgtcatcgcctgtagcgaaaacgtcgagtgcgccaccggcgagcgttttcagccgcaggatgggttcatttactttctgctgtccgggcaaatcaccctcgcagtcaacgaccctgataacctgttggggattgtgatcgagcatatgccgctgggcctgcttgagcactactgcccggcggtagagctactatatcaatgtctcgatcgctgccgttttgccagaatcagcgtggaggatttcgagcgtctcttcttttactcttcgccggagtatatgaaagagctgacgactattctggcctacatgggcatttttgctctcgatgcgcacaacgagcgcggcaacctgtccggttttcagaccataaaatcgatgctatcgcgttatctgtaccgtaacgagatcgattgtggaaaacgtgaaagcctgtccgcttttattattaaacggaccaatctttcgcgcagctatgtatatcaggttttagcggcgttaaaagaaggcggttatatcacggtgaaaaaaggtcaactcatttctatcgaccgaaaaataccggataaattctga

SEQ ID NO: 87025 - DNA, 939 bp, Enterobacter aerogenes
atgaactcgatttttactgaagaaaatctgctggcattcaccaccgcggcgcgttttggcagcttcagcaaggcggccgatgagctggggttaaccacctcagccatcagctataccatcaaacggatggaagccgggctggacgtggtgctgtttacccgcaacacccgcagcattgaactgacggaatctggctactatctgtttcgcaaggccaccgatctgcttaatgatttccatgcgataaagcgcagcattgatactatctcgcagggcattgaagcgagggtgcgcatctgcatcaatcaactgttatatacgccgcgccataccgcccgcctgctgcaggtgttgaaaaaacagtttcccacctgccagataaccgttaccaccgaggtatacaacggcgtctgggattcgatcatcaataaccaggcgaatattgctatcggcgcgccggatacgctacttgacggcggcggtatcgattataccgagatcggcgcgatccgctgggtgtttgctattgccccggatcatccgctggcgtttatgcccgaacctatttcagaaagccagttacgcctctatcccaatatcatggttgaggacaccgccagtacgattaataaaaaggtcggttggcttctgcatggccaggaggcgatcctggttcccgacttcaataccaaatgtcagtgtcagatcctcggcgaagggatcggcttcttacccgactatatggctgatgaagccattgcggagaatctgttggtgatccgccagatccacaacccgcgccaggattccggcatgttgctggccactcagcacgcggctaccggccaggtgacgcagtggattaagaagcaattccgccccggcgggattttaacggcgatctatgatgatttattgcatcgtggagaagcgaaatag

SEQ ID NO: 87026 - DNA, 495 bp, Enterobacter aerogenes
atgaacggactcaccgctacggggatcaccgtcggtatttgcgcaggcgtttggcagctcatttcctcgcacgtcgggctgcagcacggttgggaattattgggaaccatcggcttcgtcgcgttctgtagtttctatgcggcagggggtggccaatccggctttgtcaaaagcctgtgcgttaactattccggggcagtgtgggcgtggctggcggcgctggccgccggcgctctcgcctcagccagcggtatgtcggggttctgggcaagcgttattaccacggtgccgttttcggcagtcatcgtctggcaggggcgctttacgctaacctcgtttattcccggcggcttcctcggcatgacgctctttttcgccaccggtttgaactggacggtgacattgctgggatttctggcgggcaactgcgttggctttatttcagaatatagcgggcgcaaactcagcgaggcgaccagtaaagagcgagcctga

SEQ ID NO: 87027 - DNA, 606 bp, Enterobacter aerogenes
atggccacggaaaatattattgctgactatcttttggctgcagagcagggaaatattgcgaaattaacagcctgcctggcaagtggcgtcgatattaatgccagtaatcgtcaggggcgaaccgccattaccctcgccagcctgaataaacattatgcttgtgtctcggttcttattgccgctggcgcggatattaataagcaggaccagacctgttttaacccgtttttaattagctgcctgaataacgacgtcgaactactgcgcttaattttgccggcaaatcccgacctcgaacgattaacgcgtttcggtggcgtaggcctgaccccggcctgtgaaaaaggccatcttgagatcgtgaaaatattgttggcggaaacggatattaacgttaaccacaccaattttgtcggctggacgccgctgctggaagcgattgtcttaaacgacggcggcgcgacgcagcaggagatcgtcaaactgctgctggaccacggcgccaacccgcatatgaccgataagtatggtaaatcgccgctggagctggcatgggataagggattcagtgaaatagcccacctgctggtcgccgccggagcctga

SEQ ID NO: 87028 - DNA, 864 bp, Enterobacter aerogenes
gtgcaagcgctaactgcggatgagggctttctctcgcagcgcggcggcggacaggtcgagcaggttttcactcatgcggtgaacctgctcatccccggcaaaccagggcttctgacgctgctgtgtgaaacttctgataatgcgcccaatagctgtaggttagcactcacccactttgacaacctgttccggccaggggaaagcgtccggtttaccgattcagggatttacattggcgataatacatggatagacatccaccgttgtgagcgctggcaaacgccgcaggcggtattaaacgcggcaacatttaaccagatagcctggcgacgatggcgcgatattatcgttacgcagttacatgaggatgacacgttatttctctatcgcggcgacaatcccttttatcacgcgatgcgtcatgaactccagcagcgacgggaaaccttatttaaagcgcttggcgaaaataaaaatatcagcgccgccgtggcgaacatgatcggattaggcattggcctgacgccatcggcggatgattatttgctaggtctaagcgttattttattcataaagggacatccggctaatcaataccgggaagcatttataaccgcgctgcagagcgcccgacaaaatactacgccgctcagcgcgataacgctggaggcagcgataaaccaacgttatcgcgaaagtatcgccgtgttgattaatctgctggttaatcaaccgacaaccttttctattgaggctattgccgatattaaaaatattggctcaagttccggcagcgacatgctattgggcatggcggatgcctgcgcgctgagccaaacgtatggagggaataatgtcagttaa

SEQ ID NO: 87029 - DNA, 1548 bp, Enterobacter aerogenes
atgtcagttaaaatagtggtgaagaagaatacctattttgattccgtctcattaatgtcgatttccacccgcgctaataagctcgacggcgtagagcaggcatttgtggcgatggcgacggaaatgaataaaggggtgctgaataaccttgggctgctgacgccggagctggaagcggcgaaaaacggcgacctgatgatcgtcatcaagggcaaagatggcgccgatagcgaacagatactcagtgaaatagaagcgctgttcagcaaaaaggccgaaagcggccagcacgaagcgcgctacgctaccctcgccagcgccaaaaaacatcttccgcaaagtaacctcgcgattatttcggtcaacggtctgtttgccgctcgcgaagcgcgtcaggcgttgcaaaacgatcttaacgtgatgctgttttccgataacgtctctattgacgacgaactggcgctgaaacaactggcccacgaaaaggggttgttgatgatggggccagactgcggcaccgccattattaacggtgcggcgctgtgcttcggtaacgcggttcgccgtggcaacatcggcattatcggcgcctccggcaccggtagccaggagctgagcgtccgtatccacgatttcggcggtggcatctcgcagctgattggtaccggaggccgcgatctgagtgagaaaatcggcggcctgatgatgctcgacgccattcagatgctggaagccgatccgcaaacagaaattatcgtccttgtttctaaaccaccggctccagcggtggcgaaaaaagtgctcgaacgcgctcgcgcctgccgtaaaccggtggtggcgtgcttcctcggccgcgccgagcctcccgccgatgagccaggcctgcagtttgcccgcggcactaaagacgcggcgctgaaggccgtcctgctgagcggtattaagcaggaaaatctcgatgtacatccgctgaaccaggcgctgattgctgacgttcgcgcgcagctcacgccacagcaaaagtacattcgcggcctgttctgcggcggtaccctgtgcgatgaaaccatgttcgcggtactggaaaaacacgcggatgtttatagcaacattcagccggatccggcttatcgcctgagcgatatcaatcgcagcatcaaacacaccttcctcgatttcggcgatgacgacttcaccaacggtaagccgcacccgatgatcgacccaaccaaccgtatcagtcgcctgctgcaagaagcgcgcgatcccgaagtggcggtcatcgtcatggacttcgtgctgggcttcggagcgcatgaagatccggtgggttcgacgatcgcggcgatcaaagaggccaaagccattgccgccgccgatggccgcccattagcgattctcgcttacgtgttaggcaccgacatcgatacgccgtcgctggagcaacagcgccagatgctgcttgacgctggcgtcattctggccagcagcagtaccaataccggtttgctggcgcgtgaatttatctgcaaaggggagcaagcctga

SEQ ID NO: 87030 - DNA, 1419 bp, Enterobacter aerogenes
atgagccagtcgctatttaaccagccgttgaacgtgattaacgtcggtatcgccatgttcagcgacgatttgaaaaagcagcacaccgccgtcacccagctcgactggacgccgccgggccagggcaatatgcaggtggtcgaggcgctggatcgcatcgccgactcgccgctggcggataaaatcgccgccgccaaccagcaggcgctggagcgcattattcagtcgcacccggtactcatcggctttgatcaggccattaacgtcgtgccgggcatgacgccaaaaaccattctgcatgccggcccgccggtggaatggcaaaacatgtgcggcgccatgaaaggcgcggtcaccggcgcgctggtctttgaagggctggcgaaagatctggatgaagccgccgagcttgccgcctccggtgaaattaccttctcaccctgtcacgaacacgactgcgtgggttcgatggcgggcgtgacgtcggcgtcgatgttcatgcacatcgtcgagaacaaaacctacggcaatatcgcttataccaacatgagcgagcagatggcgaagattttacgcatgggcgccaacgatcaaagcgttatcgatcgtctgaactggatgcgcgacgtgcagggccccatgctgcgagacgccatgaagatcatcggcgaaatcgatctgcgcttaatgctggcgcaggcgctacacatgggcgatgagtgccataaccgcaacaacgccggcaccaccctgctgattcaggcgctcacgccggggattattcaggccggttatccggtagagcagcagcgcgaagtgttcgaatttgtcgccagcagcgattacttctccgggccgacgtggatggcgatgtgcaaagcggcgatggacgcggcccacggtattgaatacagcaccgtggtgaccaccatggcgcgtaacggcgtcgagttcggactgcgggtcagcggcctgccgggacaatggtttaccggcccggcgcagcaggtgataggcccgatgtttgccggttttaaaccggaggactccggccttgatatcggcgacagcgcgattaccgaaacctatggcatcggcggtttcgccatggcgacggcgccggctatcgtcgcgctggtcggcggaacggtagaagaagcggtcgatttctcgcgccagatgcgtgaaatcacccttggcgaaaacccgaacgtcaccattccgctgctcggctttatggggatcccgaccgcgatcgacatcacccgcgtcggcagcagcggtattttaccggtgatcaacaccgctatcgcccataaagacgccgggatcggcatgatcggcgccgggatcgtccacccgccgttcgcctgtttcgaaaaagcgatcctcagctggtgcgatcgttacgacgtttaa

SEQ ID NO: 87031 - DNA, 951 bp, Enterobacter aerogenes
atgaaagaactcatcgtcgttgccattggcggcaacagcattatcaaagataacgccagccagtcgatcgggcatcaggccgaggcggtcaaagcggtggccagcacggtgctggagatgctggcttcggactataacgtggtgctaacccacggtaacggcccgcaggttgggctggatttacgccgctcggagatagcccatgaacgagaaggtctgccgctgacgccgctggctaactgcgtcgccgatacccagggcggcatcggctacctgatccagcaggcgttgaataaccgccttgcccagcgcggcgagcaaaaggcggttaccgtcgtcacccaggttgaagtggataaaaacgatcccggctttgcctatccgaccaagcctatcggcgcgttctttagcgaaagccagcgcgatgaactacaacaggcgcatcctgagtggcgctttgtggaagattcgggccgcggctatcgccgggtggtcgcctcgccggagccgaaacgcattgtcgaagcggaagctattaaagcgctgacccggcaaggctttgtggtgatcggcgccggcggcggcgggatcccggtggtgcgtagtccacagggcgactaccagagcgtggatgcggtgatcgacaaagatctctcaaccgccctgctggcccgcgaaattgatgctgatattctggtgatcaccaccggggtggagaaagtgtgcgtgaatttcggcaagcctaatcagcaggcattgggtcgcgtcggtatcgacgagatgagccgctatatgcaggaagggcatttcccggcaggcagtatgctgccaaaaatcgtcgccagcctcgcgttcctgcaacacggcggcaaacgggtgatcatcactacgccggaatgtctgccagccgcgctacgtggcgaaacgggaacccatattgtgcatgactga

SEQ ID NO: 87032 - DNA, 1389 bp, Enterobacter aerogenes
atgaataaagacaacagccgtcgcgaatttcttacccaaagcggaaaaatggtcaccgccgccgccctgctggcggcaggcgcgccggcggcgtatgccgcaagcaacccgccatccgcggccacctgcgataataaaggcgcggtcaacgtcgccgataaacattactaccttgataacgtgctgctggaaagcggcttcgaatatgaaaacggcgtggtggttcacacccggaccgagcggcaaacgctggaaataaaagacggcaaaatcgtcgccctgcgcagcaatctgagccacccggacgctacgctgccgcgctatgacgcgggcggtaaactgatgctgcctgccatgcgcgacatgcatatccatctggacaaaacgttttacggcggcccgtggcgctcgctgaaccgcccggcgggcaccaccattcaggatatgatcaagcttgagcagaaactgctgccggaactccagccttatacgcaggcgcacgccgagaagcttatcgacctgattcaatccaaaggctcgaccatcgcccgcagccactgcaatattgagccggtgtccgggctgaagaaccttgagaatctgcaggaagtactggcgcggcgtaagccaggctttgactgcgaaatcgtcgcttttccgcagcacgggctgctgctgtcgaaatcggaatcactggttcgcgaagcgatgcaggccggcgcccattatgtcggcggcctcgacccgactaacgtcgatggcgcgatggagaaatcgctcgataccatgttccagattgcgctcgattacgacaaaggggtggatattcacctgcatgaaaccagcccggcgggcgtggcggcggtgaactatatggtggaaaccgtggagaagaccccggcgctgaaaggcaagctgaccatcagccacgcttttgcgctggcgacgctcaacgagcagcaggtcgatgccatcgcgacccgcatggcggcgcagcagatcaccatcgcctccaccgtgccgatcggcactctgcacatgccgctcaaacaactgcgcgaaaaaggcgtcttcgtgatgaccggtaccgatagcgtgattgaccactggtcgccgtatggactgggcgacatgctggagaaagctaatctctacgcccagctgtatatccgccccaatgagcagactctgtcgcgcgcgctggcgatcgccaccggcgaggtgctgccgctgaatgacaagggcgagcgcgtatggccaaaagcgcaggacgacgccagctttgtgctggtcgatgcctcctgctccgccgaagccgtggcgcgaatttcgccgcgcaccgccaccttccataacggtaagatggtctggggcagcgtcggcgcctga

SEQ ID NO: 87033 - DNA, 1518 bp, Enterobacter aerogenes
atgtctgaacaacaagcacaaggtgccgatgaggcaattgaccttaataatgaactgaaaactcgtcgcgaaaaattggctgcgctgcgtgagcagggcgtcgcttttccgaacgatttccgtcgcgatcatacctctgaccaattgcacgctgaattcgatgcgaaggataacgatgaactcgcttccctgaacgttgaagtctctgttgctggtcgtatgatgacccgccgcatcatgggtaaagcctctttcgtcacccttcaggacgtcggcggccgcattcagctgtacgtcgcgcgcgatgacctgccggaaggcgtctacaacgaacagtttaaaaaatgggatctcggcgacattatcgccgcccgcggcaagctgttcaaaacgcaaaccggcgaactctccattcactgcaccgagctgcgtctgctgaccaaagccctgcgcccgctgccggataaattccacggcctgcaggatcaggaagtccgctatcgccagcgttatctggatctgatcgccaacgaagagtcgcgtcatactttccgtatccgttcgcagatcctcgccaccatgcgtcagttcatggttgctcgcggctttatggaagtcgaaaccccgatgatgcaggtgatcccaggcggcgcttccgcccgtccgttcatcacccatcacaacgcgctggatctggatatgtacctgcgtatcgcgccggaactgtatctgaaacgtctggtggttggcggcttcgaacgcgtcttcgaaatcaaccgtaacttccgtaacgaagggatctccgtacgccataacccagagttcaccatgatggaactgtacatggcgtatgcggattacaaagatctgatcgaactgaccgagtcgctgttccgcactctggcgcagacggtgctgggcaaaaccgaagtgccgtatggtgaccaggtgtttgacttcggcaagccatttgaaaaactgaccatgcgcgaagctatcaagaaacaccgtccggaaaccaacatggcggatctggataacttcgacgcggcgaaagcgctggcggaatctatcggtattcaggtagagaaaagctggggtctgggacgtatcgtcacggagatcttcgatgaagtggcggaagcgcatctgatccagccgaccttcatcaccgaatacccggcggaagtttccccgctggcgcgccgcaacgacgtgaatccggaaatcaccgaccgcttcgagttcttcatcggcggccgcgaaatcggtaacggtttcagcgagctgaacgatgcggaagatcaggcgcagcgtttccaggatcaggtcaacgccaaagcggcgggcgacgacgaagcgatgttctatgacgaagactacgttaccgcgctggagtacggcctgccgccgaccgccggtctgggtatcggtatcgaccgcatggtgatgctgttcaccaacagccacaccatccgcgacgttattctgttcccggccatgcgtccgcagaagtaa

SEQ ID NO: 87034 - DNA, 1473 bp, Enterobacter aerogenes
atgaaaacaccctcacagccgcgcgcgatttactacatcgtagcgatccagatctgggagtacttcagcttttacggcatgcgcgccttactcatcctttatctcacccaccaacttggctttgacgatagccacgccatcagtctgttcagcgcctacgcatctttagtttacgtaacccccattctcggcggctggcttgccgaccgcctgctcggcaaccgcacggcggtgattgccggggcgttgttgatgaccctcggccacgtggtgctgggcgtcgaatctgattccacctggagcctctatctggcgctggcgatcattatctgcggctatggcctgttcaaatccaatatcagctgcctgctcggcgaactgtacgccgctgacgaccatcgtcgcgatggcggtttctcgctgctgtatgccgccggtaacgtcggttcgatagccgcgcccattgcctgcgggctggcggcgcagtggtacggctggcatatcggctttgcgctggcggggatcggcatgttcatcggcctgatgattttcttaagcggcagccgctacttccgcgacacccgcggcgtcgataaacaggcgctgcgcgcggtgaaattcgtgctgccgacctggggctggctggtggtgatgctgtgcctggcgccggtgttcttcaccttgctgttagaaaacaactggtccggttatctgctggcgattgtctgcctgttcgccgcgcagatggtggcgcggatcatgatcaaatcgccgcagcatcgccgcgcgctgtggcaaatcgttctgctgatgttgaccggaacgctgttctgggtactggcgcagcaaggcggcagctcgattagtctgtttatcgaccactttgttgatcgccggctgttcaatattgaagtaccgaccgcgctgttccagtcggttaacgcggtagcggtgatggcggctggcgtgatcctggcgtggcttatccgcccggaagggcgtacccgctcggtgttaaaagtatggctgaaatttgctttcggcctgctgctgatgggcggtggatttatgctgctggcgctgaatgcccgccacggcgcggctgacggtcaggcctcgatgggcatgatggtcgccgggctggcaatgatgggctttgccgaactgtttattgacccggtggcgatggcgcagataacccgtctgaacatgcccggcgtcaccggcgtattaaccggcatttatatgttggccaccggcgcggtcgccaactggctggccggggtggtggcgcagcaaaccaccgaatcgcaaatcagcgacacggcgattgccgcctatcagcatttcttctcgcagatgggcgagtggactatcggctgcgtggcggtaattgtcattgtcgcctttgccgcgatttgcagcaccggccagcgcagcgcgaccggggacattaactcaacagccaagtga

SEQ ID NO: 87035 - DNA, 2148 bp, Enterobacter aerogenes
atgaacgttattgcaatcatgaatcacatgggggtttacttcaaagaagaacccatccgtgaactgcatcgtgctctcgaacgcctggacttccgtattgtctacccgaacgaccgtgacgacttattaaaacttatcgaaaacaactctcgtctgtgcggcgtgatcttcgactgggataaatacaatctcgaactgtgcgaagaaatcagcaaaatgaacgagtacatgccgctgtacgctttcgctaacacctactccacgctggacgttagcctgaacgatctgcgcatgcaggttcgcttcttcgaatatgcgctgggcgccgctgaagatatcgcgaacaaaatcaaacagaacactgatgaatacatcgataccattctgccgccgctgaccaaagcgctgttcaaatatgtacgtgaaggcaaatataccttctgtaccccaggccacatgggcggtaccgcgttccagaaaagcccggtaggcagcatcttctatgatttctttggttccaacaccatgaaatccgatatctccatttcggtttctgaactgggttcactgctcgaccacagcggcccgcacaaagaagcggaagagtatatcgctcgtgtgtttaacgctgaacgcagctacatggtgaccaacggtacatctaccgctaacaaaatcgtcggtatgtactccgcgcctgccggcagcaccgtgctgattgaccgtaactgccacaaatcgctgactcacctgatgatgatgagcgacattacgccgatctacttccgtccgacccgtaacgcctacggtatcctcggcgggatcccgcagagcgagttccagcacgcgactatcgccaagcgtgtgaaagagacgccgaatgcgacctggccggtacacgcggttatcaccaactcaacctatgatggtctgctgtataacaccgacttcatcaagaaaaccctggatgtgaaatccatccactttgactccgcatgggttccttacaccaacttctcgccgatctatgaaggcaaatgcgggatgagcggcggtcgcgttgaagggaaagtgatctacgaaacccagtccacgcataaactgctggcggcattctctcaggcttcgatgatccacgtgaaaggcgacgttaacgaagaaaccttcaacgaagcctacatgatgcacaccaccacttctccgcactacggtatcgtggcttccaccgaaaccgcggcggcgatgatgcgcggtaacgccggtaaacgcctgatcgacggttctatcgaacgttctatcaagttccgtaaagagatcaaacgtctgaaaggcgagtctgaaggctggttcttcgatgtatggcagccggaacatatcgatggcgctgaatgctggccgctgcgttccgatagcgcatggcacggtttcaaaaacatcgataacgagcacatgtacctcgacccgatcaaagtcacgctgctgactccggggatgaagaaagacggcaccatggatgagttcggtattccggcaagcatcgtggcgaaatatctcgacgaacacggcatcgtggttgagaaaaccggtccgtataacctgctgttcctgttcagcatcggtatcgataagaccaaagcgctgagcctgctgcgtgcgctgaccgacttcaaacgcgcgttcgacctgaacctgcgggtgaaaaacatgctgccgtctctgtaccgtgaagatcctgaattctatgaaaacatgcgtattcaggacctggcgcagaacatccataaactggttgagcatcacaacctgccggacctgatgttccgcgcattcgaagtgctgccatccatggtgatgaccccgtatgccgcgttccagaaagagctgcacggtcagactgaagaagtgtacctcgaagagatggtaggccgcgtcaacgccaacatgatcctgccgtatcctccgggagtaccgctggtcatgcctggtgagatgatcaccgaagaaagccgcccggtactggaattcctgcagatgctgtgcgaaatcggcgctcactacccgggcttcgaaaccgatatccacggcgcatatcgtcaggcggatggtcgttacaccgttaaagtgctgaaagaagaaaacaacaagtaa

SEQ ID NO: 87036 - DNA, 1338 bp, Enterobacter aerogenes
atgagttctgccaaaaagatcgggctatttgcctgtaccggcgtagtcgccggtaatatgatggggagcggtattgcactattacctgcgaacctcgccagcatcggtggtattgccatttggggttgggtgatttctattattggcgcgatgtctttggcttatgtttatgcccgactggcgaccaagaacccgcagcagggtggtccaattgcgtacgcaggggaaatttctccggccttcggtttccagaccggcgtcctttattatcatgcaaactggattggtaacctggcaatcggtattaccgccgtctcttatctctctacgttcttcccaattttaaataacccggtgccagcaggtattgcctgtattgccatcgtgtggatctttactttcgttaatatgctcggcgggacctgggtaagccgtctgaccactattggtctggtactggtgcttattccggtggtgatgacagcggtcgtcggctggcattggtttgacgcggcaacttatcaggcgaactggaacacctccagcaccactgatagccacgcggtcattaaaagtatcctgctctgcctgtgggccttcgttggcgtagaatccgccgcagtgagtaccgggatggtgaaaaacccgaaacgtaccgtaccgctggcaaccatgctgggtactgcgatggctggtatcgtctatatcgccgcgactcaggttatcgccggtatgtatcctgcttctcagatggccgcatccggcgcgccgttcgcgattagcgcctctaccattctcggcggctgggctgctccgatggtttccgctttcaccgcctttgcttgcctgacttctctgggctcgtggatgatgctggttggccaggccggcgtacgtgccgccaacgacggtaacttcccgaaagtgtatggcgaagtcgatagcaacggtatcccgaaaaaaggcctgctgctggcggcggtgaaaatgaccgcgctgatggtgctgattaccctgatgaactccgccggtggtaaagcttctgacctgttcggcgaactgaccggtatcgcggtactgctgaccatgctgccttacttctactcctgtgttgacctgattcgtttcgaaggcatcaacattcgtaacttcgttagcctgatttgttcggtactgggttgcgtgttctgctttatcgcgctgatgggcgcaagctccttcgaactggccggcaccttcatcgttagcctgattatcctgatgttctacggtcgcaaaatgcaccagcgccagcagaacaacgcaacggataacaacagccccgctaacgcgcactaa

SEQ ID NO: 87037 - DNA, 1572 bp, Enterobacter aerogenes
atgtggtattatcgcgcctttcccttttcgtcctggggtttttttatgcaacaacctgttgttcgcgttggggaatggctcgttactccttctgtaaaccaaattagccggaacggacgtcagcttactctcgaaccgcgtttaatcgatcttctggtctactttgctcaacatcctggcgaggtacttagccgggacgagcttatcgatcacgtctggacgcgcaacgtggtgaccagccatgtcgtcacccaaagtatttccgagttgcgtaagtcactgaaagacggcgatgacggcagcatggaatatattgcgacggtgcccaaacgcggctacaagctgacggtcccggtaatttggtgtacggaagagggcgaagagttggcgccggttgtcccgccagtggcccctgtcaccgttcctgaaacgtcgccaccgactatttctccttcatctgctgcgccagcggcggcggcagtgccggaaaaacgtaaacggatcaccaccttctgggtatggacgctgtttctgctggcgttgggcagttgcgtcgcgttagtcgctttgtcgtcgatagaatcgcggccgccggaaaccaaaactcgcctgctgctcaacccgcgcgatatcgacatacacctggtaaacggcagttcatgcaacaactgggcatcacagcatgcctatgcggtagggttgggcagcctggtaaccacctcgctcaacactttctcgacctttatggtccacgataaaaccaactacaacatcaacgagcccagcagttcgggtaaaacgttgaccatcgaattcgttaatcagcgccactatcgcgcccagcagtgctttatgtcggtgcaactggtcgataacgccgacggctcgacgatgctcgataaacgctactttattaccatggataaccagctcaccattcagaatgacctgctggatagtctgtcaaccgcgctaatgcagccgtggccggatcgcatgaaagcgatgctgaaacagtatcaacccgcgcaaagcccttcattaacccgtctttatcaggcccatcagctgttaatgaaaggtgatgtcgattcattaggtaaagccagcgatatactcgatgacgtcattaaacaatcgccggactttatttatgcttacgccgaaaaagcgctggtggatgtattacgtcattcgcagcagccgttggatgaaaaacaattagcgacgctgtatgccgaggttgaaaaagtaggtgaaatgcccggcattaaagatatggcgattttctaccagataaaaacggtagatatgttaggcaaagggaaaatagatgaagcgtacagcgcgatcaacacgggcattgatttagaaatgtcgtggatgaattacgtgctactcggaaaagtctatgagatgaaaggacagaaccgcgaagctgccgatgcctacctgacggcgtttaatttacgccctggcgaaaacaccttgtactggattgaaaacggagtattccagacctccgtcacccgcgtagtaccgtatctcgacaatttcctcgcttcagaataa

SEQ ID NO: 87038 - DNA, 1107 bp, Enterobacter aerogenes
atgttattcgaccactattccttgcaggccctatcgttaaacaaccgtatcgtgatgccgccgatgacgcgttcccgcgccggagccggtgatgtcgctaccgatcagatggcggagtattacgcccaacgcgccagcgccggtttaattatcagcgaaggcacgcagattagccaacagggacagggttatgcctggacgccgggcatctataatgaagcgcagatcgccggctggaaaaaagtcacctctgcggtacaccaggcgggaggcaaaatttttgcccagctctggcacgtagggcgtgtctcccataccgtactgcagccgggcaatgccgcgccggtttcctcgtctgctattcaggctgaaggggtgaaggtctttgtcgatgtcgaaggccgcggcccggaaaacggcgtcggtgaaatggtgcagcactcgatgccgcgcgctctgactcgcgaagagatcccgactatcatcgaacaatatgcgcaggccgcgcgtaacgctatggccgccggcttcgatggcgttgagctccacggtgcgaatggctatctgattaatcagtttattgattcacgagaaaaccagcgcaccgatgagtacggtggttcgttaaccaatcgcctgcgtttcctcaaagaagtcgcgcaggccgttgccgatgcgattgggaaagagaaactgggtatccgcctggcgccgctgaccaccttgatggggtcgaaagacgatacgccggaagccacctatctggcggcggccagcgtcctcaatgatatcggcatcgcctatatccatatcgccgaagccgactgggacgacgcgccggtgatgcccgccgcctttaaagaagcgctgcgccaggtgttccgcggcacgatgatttattcaggaaaatacaccgtagaacgtgccgaagaggcgctggctaagggctgggccgacctgattggttttggtcgcccgtttatcgccaacccggatctgccctatcgcctgcaacacaacctgccgctgaaccagccaatcagagagcagtttttcggcggtggtaaagagggctacctcgactaccctaccgtcgatgggaagtaa

SEQ ID NO: 87039 - DNA, 273 bp, Enterobacter aerogenes
atgaaaaaggtattagtcgctttagctctttctgctgttgcctttggcgcctcggcagcgcaattaattactaaagaagaagcttcgcatttcaaactgactcacgtgggcagtatttctgtggggccgtctggcgggcaattctcttcaccttctgacctgcacgaccagctttctaagctggcagatgagaagggcggtaaatattatattattaccgcggcgcgtgaacatgggccgaactttgaagcaacggcggaagtgtataaataa

SEQ ID NO: 87040 - DNA, 921 bp, Enterobacter aerogenes
atgtcgcatttacccaaattctctctttcattattacacccgcgttactggccggcatggctgggtattggcttattgtggctggtggtacaacttccttatccgctgatctatcgtctgggccatggtctggggcgtttatctatgcattttttgcgcggaagggtacgtattgcgcagcgcaatcttgagctctgctttcctcacctcagcccggcgcagcgtcatgaaatgttggttaagaattttgaatctttgggcatggggttgatggaaaccggcatggcatggttctggccaacccatcgcgtcgagcgctggaccgagaccagtggcgtcaatgaagtcgttgaactgcaggaacagaagcagggtattttgctaattggcattcactttctgaccctggaactcggcgcgcggatgtttggcatgttcacgccggggattggcgtttaccggccaaatgataatccgctgatcgactggctgcaaacctggggacggctgcgttctaacaagacgatgctggatcgtaaaaacttgaaaggtatggttaagtcgctgaaagagggcgagatcctctggtacgctccggatcatgattatggtcgcgccagtagcgtatttgttccctttttcaatgtggataatgctgcgaccaccaccggtacctggatgctggcgagaatgtcaaaagccaccatcgttccttttgttccgcgaagaaagcccaatggtgccgggtatgagctgattgcgctgcagccagaggcgacgccgccgctggattccccggaaactaccgccagctggatgaacaaaattattgagcaatgtatcctgatggcgccggaacagtacatgtggctgcatcgtcgttttaagacccgtccggaaggggtaccgtcgcgctactaa

SEQ ID NO: 87041 - DNA, 357 bp, Enterobacter aerogenes
atgcgcctcgctatttttcttaaaaagctatttggttatgaacagtctgaatcgcatcttgagcatgtggctttatgggtaaatagtttgggtggaatacaacatctcttacaaaaaatgaatgaacataaccttacccacgttgtttcttcatggcaaagcaataacaaggcactcagcattgatgcggctcaggtccttgagtttatagatttttctgagctccagcctcttgcagagaaatgtggcaccgatattttaggcgccgcaaacctggtagcgcagtttttacctatgattacgccgaaagcagtaatggataccgccacttctggcacagcgccccataacgcttag

SEQ ID NO: 87042 - DNA, 444 bp, Enterobacter aerogenes
atggatgagtctctcagaggatattgggattattgtgggttgaatttactttttgtgtccagattactggaggagcgtcttgaaagtagattggccacttatggggttacccttcgcgagcttatggttttacgacttattgcggatgacgcttttattaagcaaaaggaattagatttatatgttggtcattttcatgaaccgataagaaaaaccctggattcgcttgagagcaagttgcttattaatagggagcataaacgacgctgtggcaagagggtatctctggcagacgttactgagagcggtattgcactgctaaagaaggctgataccattttacgaagacaagaagagatttttctggggcatctgccgagagcaacaagagttggtgtaaattccacactcgaaaatgtactgaaaaaaacgctcacacactga

SEQ ID NO: 87043 - DNA, 486 bp, Enterobacter aerogenes
atgcagctaaaaattgcttaccttgaaccagggaaggtattaacacagtcggttattggcaagcaggagcaggcccgacagcaaaaagtgcatgatattttgttgcaggccggtaaggatgctgaagcgcgttatgcggagatgacaccggagcagaaacaaaaaagcgcgctggcagatcaaacgatacttaataaccagtggcaggcagaacagcgtcatgccagggaaatcagcatgaagacgatcgctgccgccgttgaggcgtaccgggtcaatcataaaatagatgtggtactgagccagaatcaagtgattgcaatagattcgagaagtaatatcacgaaagatattattgatgagcttaaaaaagttcacgttgattatggttctttacctgtgataacaataaagcaagaagagagtaaagatgcaggggcgaataagaaagtagaaaagccaacaccacagggaagtgataaatag

SEQ ID NO: 87044 - DNA, 6762 bp, Enterobacter aerogenes
atgaataaatcgtataaaattatttggaacgaatcattgcaggactgggtcgttgcaggagaatttgccgctggaaagaagaaaaccaaaacgtcccgcctgattcgcgcctgggcggcaggcctgcttggtagtgcttcgctgatatcttcctcagcctttgctgcagatagggaggttacgccttttacccccacctctgacaccattgttatttccggcaacgataatctgatccagggaagcggaaaagggtttgctgagctgctggggaatgatatcggatttcgaaatatctccgttaaagacgcctttgaacaaggaattttgaccaaaggtactgaatttgtgaatgcgtttaatgtccagcagggtgggctaagcgatactacaacagttatcgaccctgttacgggtaataaacgaacgattaacgtgttcgataatgatgacatgtttacaacttctcttgccgattttacttttgctaaccactatgatgttggtccagagggtcagtatgtcgataaatttatttacgatatttcctctgattcgacgctaaatgtcgatgtcggagacaaatcttcagagtgggtcaataatccggctaactttgtcaatatcatcatgaagagcagcggtaccgagtcaaaatttacctcggcggtttataaagttgaagatggcgggacgttaaattacaacgggaaaacgattgtctcgctgggaaatatcgccagcataggtagtaccactccacgttctgtggccggttttcaggtccctgtagggggaaccattgactctaaaattggctcattcaccattaataatctggatgacattaaggcctataacactgcgctgattaaagcgctgcaggaaaatcgtctctcaccagcggattatgaatccgagttttacaaggcgctaactccagggtctattgaagcgattgacagcgtgagtgcaggtgacccggttgttcagacaattaataaaaatcgggttgcctatatttatgccactggcccgggtgctaaggtcaatatcgccgatggcgccaatattcagacgttccgctctgatgctagtttggtccgggttgagaatggggcacagctgaccaactctggggacattggggctttctacagcaatatcaccagcggcgggtatgttatttcggcggacaacagttccgtccataacatggccaccggcgtgattgatgcgggcactaaccaggaagtgggcgcctttaattacaatggccagaatatggctaatttagtacaagttggccggattaccgccattacagcaagggatagtgacatcattaacgacggggtgatcaacgtcacctccccacagagttatgctcaacaacttggcattcaagctctgggcgatagcaacgttactaacaatggcgcaatcaacgtcgcatcgaacacgcagacctccagcgtgctgggaaatggcgttgctaatatcggggtcagtctggctgggcgggggtctgatgaccgcagcgtctcgatggtgaataacggcaccatttctattggtcgatcagcgcagcgcaacctgacggatgtcagtgaagatgtggcggtggactgggtcggggtgacgggcgtggcggtcacgaacgctaactttactaacaacggcgatattaccaccggcgcgctgacgcacggcgttaccgccatcaaatccgtaggcggcaccgtcaaccaggcagggacgatcactattaacagcgcttattctcctgaaggcaaggtgcctgcgcagtccattgccatggatgtctgggtattctctcaggcggaaaacagcgggaccattacgctgaacggcgttaacggcgtggggatgaacgtgcgtgagagggccgaagcgaccaactccggtaccatcgtggtcgctcaagggatcgacggtcagagcaagacgcccaactacggtattgtgtcacaagggaagggggcgaaagccacgctcaccgggaacgttgatctgaccggagacggcgcgattggcgtgtatgtgaaagagggcggtgtggctgccgttgatggcggtaacgttaatttcgtcagcggggttaaccagacgggttatgtcatccatggcgccgattcgtctattactaacagccacagcgtgcagagcgtcagcacggatggctccacgctctatcgcatttccggcggggccgcctatgccgcggctggcggcgatctgacggcgtccggcgccggcagcaccattctgctggcgaccggcagcaatgacgagaatacggtggccagcaacatcaatacggccggtatgacgctgcgtgtgaatggccaggatgcgacggcgctacgcgtggaaggcggcgcggaagcgacaattgacgccagtaccaatattagccttgcgcagaacggcgcgacggcagggatcgtccgtggcggctcgacgacgatcaccggcgaagaaggcgctaccggcgcatccgttctgaacagcgccgcggtactgaacggggataacgtcgcagtcggggccctgggctacaaggtactgaccggcggtacgctgaaccacagcgggactatcgatctggcggcggcggacagcacgggtgtactgatcaacggcgggacgctgaataatacctcttctattagcgtgaatggtaccgccgtcgatattctcggcgcggattcgacggtcaacaacaccggggtgattaccgcaaccgatggtcgggccgcattcaggctgtctgatggcgcgtcgctcaatctgaccggtagcggcgttacccatgctaccgggtcggcgcacggtatcctgctggatgacggcgctacgggacttacggtcaaagatgccaccatcaacatggatccgattagtaccggcaacggcattgaaaacaaggctgaaattgccggtatccatctggataacacgacaatcaacgcccataacggcgcgggtgtccgtacttcggcttcgctggcgcagagcaacagcggcgtgataaacgtcatcggcagcggtaccggtctgttgttccagaatgccgacggctcgatgaccgacaacgcctacgatatgtctcagtcccaggccctggttgtgaacgtcaacagcgccgaagggcgcgggatgaccaccaatacctccggggatattaaaaccggcgtcagcgtcaatgttaatgatgccagcggcggctctgcgctggtcatcggcgggcaaacggcgcacgttgaacagtcgggtctgctggcatcggcatccgccacgcaggtggtggatatcaacaatggccacaccacggactttatgaacagcggcaccattgcctctatggccgctgatgcgctggtgatgaatgtggataagcaggcggtgcactttaccaaccaggctaacggtaacctgaccggcgccgtcaatctgctgagcggcaataacacggtaaccctggagcacggcagccaggctaaaaccgcgttcaccaccggcgcgggcgatgacctgttcgaactgacgaatatcaccgcagaggaaaacccggtgttgttcaccaccctggatggcggcgcgggccacaacacgctggctctcaacaattcggtttataccctgaaggatgccgacaaaatccagcacatgtccgatgtggagctgaagaataactccaccttcacgctcgatcatacccagcttgatttaacggctgcggatgcccgctggaacatcgacagcaccagtacgctggcgatgcaggacagcacggacctcgatttcgccagccacctgcagggcgatggcctggtgaccgtcgatctcggggggcaggaccatacctttgcctttaccgataacaacaaggccgacggcttcgccgggacggtggagctgaccaacagccacttcgtactggatggcgcaacgactgccactaaccaggcactgtcagacgccaccctgaagctgggagaaggcagtatcactgacgtagcaaaaggtacccaacagattggcggcctggcgttcaacggcggtacggcggtatttgatactgacacggtcggtaagtcggtatcggatgcctatatcaccaccaccggcaacctggatatcagcggtaccggcaacgtgcaggtgaacaccgacagcccggtatttaacggcccgacgatgcctgataacgcggtcaatttgctggcgcaggatgacggcgatatctctctgaagctggccggctccaccggcagcgtatcggcatacggcggcaacctgactctgctggaccgcaacggcaaggcggtcacggatgcggtgagcagcgccgtgatgcagaacggggaaacggtggccaacgccacctacgattaccgtctgacctccggcgacaacagcgatggtctgtacatcaactatggtctgacgaaagtcgagctgctgaccagcggtgataatgcgctgacgctgaatgcgcagggcgccaccggcgcggcggcagatctcagcgcccaggtcaccggcgcgggcgacctggcgattgatggcggcgcgggcaataccgtctcgctgtcgaatctggcgaacgactataccgggaaaaccgacgttcgcagcggtacgctgctggcgaacaacgataacgtgctggggcagacatcggaactgcatcaggcggcggataccaccgtcgacctgaatggccacagccagagcgttggcctgctgaataccgatgctggggcgaccaccgactttaatggcggcagcctggccactgccaatggcggtaccgtgaacggcgggctgaccgggaacggagcgctggcggttaacggcggtatcctgacggtcaatggcgcgaatgtgcagatgaacgcggcaacgaccatcgccagcggcgccacggtggaactgaacgacattgccggtctgggctccgcggcaatcgtggataacggtctgctggcgctgaacgaaggcgtacagggcctgctgagcaatagccttaccggcagcggcgatgtggacaaaaacggttccggtctggtcacgatgaccgccgacgccgcgcagtacaccggtaccaccaacctgaatgccggcggcctgcaactgggcagcgacggtaatgacgtcatgctggcctcctccaccgtgaatgtggcggaaggtacgcagtttggcggctttggcggcacggccggcgatgtgaacaaccgcggtacgctgaccattggcgcgcttgataccagcgcgagcgcaggacatacctttaccatcggtcaaaacctgagtaacagcggggtgatcaacgtcagcgcgccgggcgcaacgacggcaggtaacacgttgcatgttgccggggattatgccggtaacggcggtacgctgaacctcaacacccaactcggcggcgataactcgctcaccgacaaactggtggtggacggcaataccagcggcaccacccaggtggcggtgaccaatgccggcggcagcggtgcgaaaaccctcaatgggattgaggtggtttccgtcggtggaaactctgccggtgagttcacccagaaaggacgtattgttgccggcgcctacgactacaccctggcgcgtgggcagggcggtaatgccggtaactggtacctgaccaacaacggggaaacgccggtagatccggtcaatccggataatggcggagacacacctgataatggcggtggcgataaaccgcataccccggatattcgtccggaaggtaaggcgtacgccagcaacatgcaggcggcgaacaccctgttcaacatgacgctgcacgatcgcctcggtgagacccactatgtcgatgccctgggccaggagcagaccaccagcctgtggctgcgccaggtcggcggccacactcgttctaatgatggcagcggccagaacaaaacccaggcgaatcgctatgttgcgcaactgggcggtgatatagcccagtggagcagcgacggggccgatcgattccatcttggtatcatggcggggtatgcgaatcagcacagcaacacgcgcaaccaccgtaatggttactctgcggacggcagcgtcaacggctacagcaccggtctttacggtacctggttccaggataacgaagagaaaaccggcgcctatgtcgatacctggatgctgtacaactggtttgataacagcgtgtcatcgaaaggcgcttcttcagaaagctataaatcgaaaggtctgactgcatcggtggagacgggttatacctggaaagtgggcgaacgtaacgatcatgaaagctattacgtacagccgcaggcccaggtgacctggatgggtgtcaaagcagacgatcataaagagcagaacggtacggtcgtgcaattcggtggcgatgataacgttcagacccgtctgggcgcccggttctttatcaaaggacacaatgccaagctggataatggtaaggaccggacgtttgagccgtttatcgaagcgaactggatccacaataccaaggacttcaccgcaggcctggatggcgtgccggttaaagtcgcgggaacacgcaatattggtgagctgaaaaccggtgttgaagcgaagctgaataaaaacgtgaacctgtggggcaatatcgcccagcaaattggggacaaaggttacagtgatacccaggcgatggtcgggtttaaagttaatttctaa

SEQ ID NO: 87045 - DNA, 909 bp, Enterobacter aerogenes
gtgaacgaatcactggatttgaaagtattgcgagttattcattttctggtgactaacgggagtgtgaccagaacagctgagttgttaaatgtctcccctggagccgtgagctatatgctcaataaagcgcgacattttaccggttcagcactgttttccagatcgggcaatgggatggtgcctgacaatgttgccagggaacttagccttcgctatcaaaacatcaaacgagaactctccgagatctctggtacgaaaaagcttgaaaaccgaatggtcaccattagtacctattcgttattcgaatttatgatttccatgagaatctccgataagcaaaacttcccggggatgtttcatttctctcccccagaaatggattgcgaaacacgccttcgccgcttaagaagtaaagaggtagatattgatatcggcactggcttacagcaagaccgaagcatagtgcaagtttcattatttaaatgtaagttgaacattcttatgaggagggataataaaaaagccaatagcaacttcaccctaaaagactggcaggaaagccatcacgtaagatggtcaaggagaatgaattttacctgcaatgactataaacatgctaacaggttccatgagttgatggaggagcggaatatctccatgatttcaagcgactcattaaatatggtaatgctgtgtgcctttacagatcacattatgttaatgcctgaagtgctgtcgagaaacctggagaattatctaccgctgaagtccattatcccacctccagagttgcaaatgaattttgagtgttttcttcattatcatcgctcgttatcaggtgataatgcacttcagatgattttggataaactgcatcaaattacaacggtggaaaacgtcactccataa

SEQ ID NO: 87046 - DNA, 912 bp, Enterobacter aerogenes
atgcgagattattttaaatcgataatctccatgcataatttagatattaaatcattgagagtgatacatacactggttaattgcggtagcgtcacgcgttctgcagagttacttaatgtcacccccggtgcaattagctattacataaacaaagccagaaaatcgaccaacactgcactgttctttaaaacaaagaatgggatgatgccagataatatagccagggaactttcaaaacgatatttaagtatcgttaataatagctcttttagcagtaaagcgattaatctctccagtagagacatcacactcagctcttacgcaatccttgaattgttaataggtatctcctttaatcatcgctctgaatccagaaaaattaattttacccctttgcctaccgatgactccgagcgcctgcaaaggctgagaaataaagaggtcgacattgatattggcacccgacttacgcctgataataatatcattcaatcaagactattttcttgcggggttaaaatagttgcaaacaagcaatatcctctgtcaaatgaccaatttagtcttagcgattgggaaaaagcaacccatatcatatggggtcgaggcatgcatctttttcatgatgattttgaacacgtgaatctgttccataaacacatgaatttaagaaacattgtctgcaaagccagtaactcgatcaatatgatactgatggcagcatatagccaacatgttgtactaatgcctgaagtgatcgctaaccaactgcttggcaaaattccaattaaactattcaccccaccgccggagttacaaatgatttatgagtgtttcatccattatcacaaatcatatgcggaagaaaaaatcatttcagatatgttgcaatcactttgcgctattttttaa

SEQ ID NO: 87047 - DNA, 837 bp, Enterobacter aerogenes
atggcattcgtaacaactaaagatagcgttaatatttattttaaagactgggggccgaaagaagctcagccaatcgtgttccaccatggctggccgttaagcgctgatgactgggataaccagatgctgtttttcctcgcacagggttttcgcgtcatcgccatcgatcgccgcgggcatgggcgctccgatcaggtaagtgaaggtcacgatatggaccactatgcggccgatgcttccgcggtagtggaaagtctggatttacataacgctgttcatgttggtcattcaaccggcggcggccaggtcgcgcgctatgtggctaaatatggtcaaccgcagggtcgtgtagccaaagcagtattaatcagttccgtaccgccgttaatggtgaaaaccgacaataaccccggcggtacgcccatcgaagtatttgacggtttccgcaaggcgcttgctgctaatcgctcacagttctatctcgatgttgccagtggcccgttctatggttttaaccgagatggcgcagaggtttcgcaaggtaccattcaaaactggtggcgtcaggggatgaccggtagcgcgaaagcccattatgaagggattaaggccttctctgaaaccgatcagaccgacgatctgaaagcgattacggtgccggtgctggtgatgcagggcgacgacgaccaggttgttccttataagaatgccgccattttgcaggataaactcttagcgaatagcgagctgaaaatttatccgggcttaccgcatggtatgcacacgtcacatgcggatgtgattaacgccgatctgctggctttcattcgttcataa

SEQ ID NO: 87048 - DNA, 867 bp, Enterobacter aerogenes
atgcactacaaattggttaagcaactcaaagatgataatacattaagaaaaagctttattgatttagccatcaaaacgttcgatctatcctttgacgcctggtatcagcaagggtactggagcgaatcctatatcccttacgctttcgttgataagaataaagttatcgccaacgcctccgcgaatattattgatctggtctggcaaggccaaccccgacgctatattcaaataggtacggtaatgaccaatattgattaccgtaataaagggcttgccggacagttgatacaacatatccttgatgactggcgtgacaaagcggatgcttttttcctgttcgccaactctactaccgtcgacttctatcccaagtttggctttacgcggaccgacgaatatcaatatgtggcacccgtttcgcctactcccggcgacttccgtaaactggatatggatagtgcgcaggatatcgccctgcttaagcactactaccagaaatccaaccccttttcacagctacgagtggagaataacttcggcctgctgatgttttactgttcggcgtttatgaagcattttgtctactactcggagaaaaaccaggccgtcgccattgcgatgcaaagcgcccatgagcttatctgctttgatattttttgcgatgccggacaatccatggcgaccattatcaatgaactcgcccagccgcaatcgcaacaggcggtgctcggttttacgccgaaggaagcgcgcctgggcgagtacgaaaaaatagacggcgacgatatgttgtttatctattcgactaaagagaacatcttccacgacaacaaattgatgttcccgctgctggcgcacgcctga

SEQ ID NO: 87049 - DNA, 900 bp, Enterobacter aerogenes
ttgcctctttttgacctgcaggatctctacgcctttttagccctcagcgagcacggcagctttcgctatgccgccgaggcgatttgcatttcgcaatcggcgttaagcaggcgaattgaaaagctggaaaccgctttaggggtgagattgtttgaaagaaccactcgccgggtgaccctcacgcaaaccggcagagctttcgccccaaaggcgcagcatctgctttccgaattcgaagatgccctggacggtattagcgaccgcgccgccttcggcaacgggctggtgacggttgcctgtgtcccctcagccgccaactattttatgccgcaggttatcagccaattccgtctgcgttttcccaaagcgcggatcaaggtcattgataccagcgccggaaatgtttatagcgccgtgcagaatcaccaggcggatttcggcctgagttttctctccgaaatcgcgtccgaggtggtatttacgccgctggtccatgaacgctacctggcggtttgccgacgagacgatccgctggcgcagcgtaacagcctcagctggcaagaattttttaaccacgattacatctggcttgataagatctccggcaatcgccacctgctggacggcgccctgagcgacgtagggccacgacgcactgcagtttgtgaaacccgccacgtgacgaccatgctgggtatggttgatgccggcctcggtattgcggccatcccggcgatggcgctgccggcctatgcacaccacgcgttagccagtattccactagtggaaccagaggtgaaaaggcaggtggggctgataaaaaaagcgggcagagcattacctcctctggccgccgaactcgaaaaagctattaccgatttttaccatcccaccgcataa

SEQ ID NO: 87050 - DNA, 801 bp, Enterobacter aerogenes
atgcaacgtaaatcatgggttttctcgttactggtattcacctgcggctatgcgcatgttgccgtcgcgcaggagatcacggtgatgatttccggcggcttctccgcggcgttggataaactggcgcccgactatcagcaaaaaagcggcaataccttacatatcattcatggtccctcgatggggaaatccgcggaggcgataccgaaccgcctggcggcagggcaaaaggcggatgtggtgattatggtgggatacgccctggatgatctgcagaagcagggcaaagtgatgccggggtcgcgtattgaactggcggattcacgtattggcgccgtcgtgccaaaaggggccccggtaccggatatcagcagcgtcgccgcgttgaaacaaacattgctgcaggcgaaatccatcgcctattcggatagcgccagtgggcgctatgttgaaaaggagctgttcagcaaactggatattgccgcgcaggcgagccccaaagcaaaaatgatcgaaaaaatccccgttgcttcgctggtggcaaaaggggactacgcgatagggtttcagcaggttagcgaactgttgccggtcagcggcgtgacgttcgttggccgtctgccggatgaagtgcaatacgttacccgattcgcgggcgccgtagttgccgattcatccgcgcagtcgcaggcgaagcagttgctgtgctatctggcttcagtcccggcgcaggcggaaatccgtcgcacaggcatggatcctttaccctccaacgcctgcgaattaccggaagagggctaa

SEQ ID NO: 87051 - DNA, 1308 bp, Enterobacter aerogenes
atgtccgcaactgccgctacttcagtgtttcgcgccagggccaaagtgatcctgcaggtgacctcagggaattttcttgagcagtttgacttctttttatttggtttttacgccacctatattgcccatactttttttccttccgaaaatgaattcgcttccttaatgatgaccttcgccgttttcggcgccgggttcttgatgcggcccgttggcgccgtggtgttaggcgcctggattgacaaggtcggcagacgtaaaggtttaatcggcacgttgtcgattatggcgatggggaccatcctgatcgtgctggtgccaggttatcagactatcggtttgtgggcgccggcgctggtgctgtgcggccgactgctgcagggcttttctgctggtgcggagctgggcggcgtctcggtttacctcgcagaaatggcgacgccaggacgtaaagggttctataccagttggcaatctgccagtcagcaggtctcgattatggtggccgcttcattgggctatctgctcaatatgctgctcagtgagtcgagtctgcatcagtggggatggcgaattccgttcgcgattggctgcctgatcgtgccttttatcttctttttacgccgcaatctgaatgaaaccgcggagtatacggagcgtaaggaacatccgaccttaggacaatcgctgactattctgctggcaaactggcgggtggtgattgcggggatgctaatggtggccatgaccactaccgcgttctatttgatcacggtctacgcgccaacctttggcaaaaacgtgctgttattaagcgcctcggatagcctgctggtcacgctattggtggctatctccaattttatctggctgcctatcggcggcatgctttccgataagtttggtcgtaaacccgtgctggtcagcatgacgctgctggctattttcaccagttggcctgcgttatcgctgctggcccgcatgccggacttcgccatgatgttgtccgtgctgctgtggctctcctttatttacggcatctacaacggcgcgatgatccccgcgctgacggaaattatgcccaggtcggtcagggtcgctggtttttccctggcttacagcctggctaccgctctgtttggcggttttacgccggcgatgtccactgcgttaattaaaatcaccggggataaggcggcgcccggctactggatgagttttgcggcaatctgcgcgctactggcgacgctgtatctctatcaacgcgtttcccgacaggcattgaaaacgcaaaattctttaggttaa

SEQ ID NO: 87052 - DNA, 837 bp, Enterobacter aerogenes
gtggacgtaagacaaagtatccacagcgcgcatgcgaaaactctggatacccaggggctgcgtaatgagtttttagttgaacgagtgtttgtggctgatgaatacaccatggtgtacagccatattgaccgcattattgttggcggcgttatgccggtgcagcgcggggtgtcggtgggtggcgaagtcggtaaacagcttggggtaagctatttcctcgaacgccgtgagttaggggtgattaatatcggcggcccgggttgtattaccgttgatggccaatgctatgaaatcggccaccgtgaggcgctgtacgtcggtaagggggcgaaagaggtggtgtttaccagcgtcgaccatgcaaaaccggcgaagttttactacaactgcgccccggcgcataccacttatccaacgaagaaagtcacccctgccgatgtagcgccggtgacgctgggtgacaacctgaccagcaaccgccgcaccatcaataaatatttcgtgccggatgtactggaaacctgtcagctcagcatgggcctgaccgaactggcgccgggtaacctgtggaacaccatgccttgccatacccatgagcggcggatggaggtctatttctatttcaacatggatgaggacgcctgcgtgttccacatgatggggcagccgcaggagacccgtcatattgtgatgcataacgagcaggcggtgatttcgccaagctggtcgattcactcaggggtgggtacccgcgcttataccttcatctgggggatggttggcgagaaccaggtctttgacgacatggatcacgttgccgtgcgcgatatacgttaa

SEQ ID NO: 87053 - DNA, 999 bp, Enterobacter aerogenes
atgaagatcaaagcaaccattgaacgtatccctggcggcatgatgctggttccattgctgcttggcgcggtgcttaataccctggcgccggataccggtaattactttggttcattcaccaaaggcatgattggcggcacggtaccgatcctggcggtgtggtttttctgtatcggcgcatcgatcgatttgcgcgccaccggtaccgtattacgtaaatccggcacgttagtgatcaccaaaattgccgtcgcctggatcgtcgcttttattgccgcgatggtcattccggaaaacggcgtccagaccggtttctttgccggactgtcggtgttggcaattgtctcggcaatggatatgaccaacggtggcctgtacgccagcctgatgaatcagtacggcagtaaagaagagtccggcgcgtttgtattgatgtcgctggagtccgggccgctgatgacgatggttatccttggctccgccggtctggcttccttcgagcctcaccattttatcggcgcggtgctgccattcctggtgggctttgccttaggtaacctcgaccacgacttccgcgccttctttagcaaagccaccccggtgctgattccgttctttggctttgcgctaggcaacaccatcaacctgagcgtgattctggataccggactgctggggattgtgcttggcgtggcggtcatcatcattaccggcattccgttgattattgctgacagggttatcggcggcggtaacgggacagctggcgtcgcggcctcttccgcagcgggcgcggcggtcgcgaacccggtgatcatcgcgcagattaatccggcctttgaaccggtggccgcttcggcgacggcactggtcgcggcaagcgtcatcgtcaccgcgattttagtgccgattattaccgccctgtacgccaaacgttttggcaatgcgcaggtggtgaaagcgcctggcgccagcgtggcaccatcggcgaatcactaa

SEQ ID NO: 87054 - DNA, 990 bp, Enterobacter aerogenes
gtgaaagaaagaataatttatatggatgtagctagagcatttgcaatattgatagcttatttaggccacatattagcctatcaaattccaggtaccgtacccaccaacataatactttcatattcacccacggcgtcgatgtcgttgttagcttttattagtgccatactggttacgcctaaaaaccacatcattactaatacaatgatgaccaaaagaatattgagaatatatctgccaatgttgttatgccttgtgatcacatttacatttagcagagtaaactcgccttgggggtatgaccctgtacatgttttatttcatgctctcggattaagccttttctttgatttattttccgtccccaataatgctggcatagggtacggtttatggtttgtaactacaatagtgataatgtatttaacactcccgatacaaataaagctatttcatcatagaaacggattattacacctggtgattatctttatattttgctttttaatgaaagtgtatttaaagaatgattcatcaccatggtctgttattacagggttctcttttggagtttatttatcagtgaagaacagaattgactcagcaacacaaattagtttaccaattacagtaacattactactaatgataacaatcgcaagttatatatccattgtaaaaaatattacatggattattcctttgcttacacctgtatacccacttgtaatgctctcgttctttcgcagaatatgtaaatttacaccgtcatttattttaaaagcaatgtgtttttttagtctaatcagttatgaattttacatactacaattcagctttataaacacgcaactaacaaaactaattaaaactgatgggttaatatctcatgtaaccatttcatttagcattttgatttttttatcatacgtaacaaataaagtcgcagaagttatgataaagaaatccaatgcctatattggaagttaa

SEQ ID NO: 87055 - DNA, 165 bp, Enterobacter aerogenes
atggggggatggatatgcaaatatccatttaagatgatgatttttgaaagggtatcaaaatatgataattatacgaacaatgtttcttttattcttagactccctgatgtcgctgacacctataatattaaaggcatattcgtaccctttgagttttatatataa

SEQ ID NO: 87056 - DNA, 867 bp, Enterobacter aerogenes
atggcagcaaaaattattgacggtaaaacgattgcgcagcaggtgcgctctgaggtcgcggaaaaagtgaaggcgcgcgtagcggccggaaaacgcgcccccgggctcgccgttgtgctggtcggcagcaaccctgcgtcgcagatttatgtcggcagcaaacgcaaggcatgtgaagaggtgggtttcgtctcccgctcttacgatctcccggaaaccaccagcgaagccgagctgctggaacttatcgacacgctgaatgccgataatactatcgacggcatcctggtacagctgccgctgcctgccggtatcgacaacgttaaagtcctcgagcgcattgcgccggacaaagacgtcgacggcttccatccgtataacgttggtcgtctgtgtcaacgcgcgccgcgtctgcgtccatgtacgccgcgcggtatcgtttccctgcttgagcgctacaatatcgatacctatggcctcaacgcggtggtgattggcgcttctaacatcgtcggtcgtccgatgagcatggagctgctgctggcgggctgtaccaccaccgtcacccaccgtttcaccaaaaacctgcgccaccacgttgaaaatgccgatctgctgattgtcgcagtcggtaaaccgggctttatcccgggcgagtggattaaagaaggcgccatcgtggtggacgtcggcattaaccgtctggaaagcggcaaagtggttggcgacgtggtgtttgaagacgcggcggaacgcgcgtcctacattacgccagtcccaggcggcgtcggcccaatgaccgtagccacgctaattcagaatacgctgcaggcgtgcgaagagtatcacgacattcaggaggcctaa

SEQ ID NO: 87057 - DNA, 213 bp, Enterobacter aerogenes
atggcgaatttttctctgggcaaacacccgcatgttgaactatgtgacctgctgaagctggaaggctggagcgagagcggcgcgcaggccaaaatcttcatcgccgaagggctggtgaaagtcgacggcgcggtggaaacccgcaaacgctgtaaaatcgtcgccgggcaaacggtgacctttgacggtcaaagcattactgtgatcgcatga

SEQ ID NO: 87058 - DNA, 1386 bp, Enterobacter aerogenes
atgttaaaaatttttaatacactgacgcgccaaaaagaagaatttaaacctattcatgccggggaagttggcatgtacgtgtgtggaattaccgtttacgatctctgtcatatcggccatggccgcaccttcgtctccttcgacgttgtcgctcgctatctgcgcttccttggttacaagctgaagtacgtgcgcaacattaccgatatcgacgataaaatcattaagcgcgctaatgaaaatggcgaaagctttgtcgcgctggtcgatcgcatgatcgccgaaatgcataaagattttgacgctctgaacattctgcgcccggacaacgagccgcgcgccacccaccatatcgctgaaattatcgaaatcaccgagcagctgatcgcccgcggtcacgcttatgtggcggataacggcgacgtgatgttcgacgtgccgaccgaccctaactacggtctgctatcgcgccaggatctcgaccagctgcaggcgggcgctcgtgtcgacgtggttgacgtcaagcgtaacccaatggacttcgtcctgtggaagatgtcaaaagagggcgagccgagctggccgtcaccgtggggtgaagggcgtccaggctggcacattgaatgctcggcgatgaactgcaaacagctgggtaatcactttgatattcacggcggcggttcggatctgatgttcccgcatcacgaaaacgaaatcgcgcaatcgacctgtgcccacgacggcgaatacgtcaactactggatgcactccggaatggtgatggtcgatcgcgagaaaatgtcgaaatcgctgggtaacttctttaccgtccgcgacgtgctgaagtactacgatgccgaaaccatccgctacttcctgatgtccggccactatcgcagccagctgaactacagcgaagagaacctcaagcaggcgcgttcggcgctggagcgtctgtacaccgcgctgcgcgggaccgacaaatccgcgcagcctgccggcggcgaagccttcgaagcgcgctttattgaagcgatggatgacgacttcaataccccggaagcctactcggtgctgttcgatatggcgcgtgaagtgaaccgcctgaaaacggaagacgcggcggccgcgaacgcgctggcggcccatatgcgtaagctctcttcggtgctggggctgcttgagcaggagccggacgctttcctgcagagcggcgcgcaggccgatgatggcgaagtggcggaaatcgaaaggcttattcaacagcgtctggatgcgcgtaaagcgaaagactgggcggcggcggatgcggcgcgcgatcgtcttaacgagatgggtattgtgttagaagacggcccgcagggtaccacctggcgccgtaagtaa

SEQ ID NO: 87059 - DNA, 495 bp, Enterobacter aerogenes
atggttactttccacaccaatcatggcgatatcgtaatcaaaacgtttgacgacaaagcgccggaaacagttaaaaacttcctggactactgccgcgaaggtttctacgacaacaccattttccaccgtgttatcaacggcttcatgattcagggcggcggctttgagccgggcatgaatcagaaagcgaccaaatctccgattcagaacgaagctaacaacggtctgaaaaatacccgtggtacgctggcgatggcccgtactcaggccccgcactccgccaccgcgcagttcttcatcaacgtggtcgacaacgacttcctgaacttctctggcgaaagcctgcagggttggggctactgcgtctttgccgaagtggttgaaggtatggacgtggtcgacaaaatcaaagcggttgccaccggccgcagcggcatgcaccaggatgtgccgaaagaagacgttgtcatcaaaagcgtcaccgtcagcgaataa

SEQ ID NO: 87060 - DNA, 723 bp, Enterobacter aerogenes
gtggcgacactttttattgcagacctgcatctgcaaacagaagaaccggcgatcaccgccggttttctgcgttttttacagggggaagcccgtcaggctgacgccctgtatatccttggcgatctgttcgaggcgtggatcggcgatgacgatccgaacccgctgcatcagcaaatcgcttcggccatcaaagccgtcgttgacgccggcgttccctgctacttcatccacggcaaccgcgattttctcgtcggtcagcgcttcgcccgccagagcggcatgatcctgctcgctgaagaagagcggctggatctctatggccgtgaagtgttgattatgcatggcgacactttatgtaccgacgaccccggttacctggtgtttcgcgctaaagtccataccccgtggatccaacgtctgtttctcgccctgccgctgtttatccgccgccgcatcgccgccaaaatgcgcgccgatagcaaagccgccaacagcagcaaatcgatggaaattatggatgtgaatccgcaggcggtcgttgacgcgatggagcggcatcaggtgcagtggctgattcacggccatacccatcgcccggccgtccatgaactgctggccaacggtcagcccgcgtggcgcgtggtcctcggcgcgtggcacagcgaagggtcaatggtgaaagtcagcgccgacggcgtcgaactcatctatttcccgttttaa

SEQ ID NO: 87061 - DNA, 510 bp, Enterobacter aerogenes
atgtcttcccgcaataatccggcgcgtatcgccatcgtgatggggtccaaaagcgactgggctaccatgcagttcgccgcagaaatccttgataccctgaacgttccgcaccatgttgaagtggtttccgcccaccgtacgcccgataaattgtttagcttcgccgaaagcgccgaaagcaacggttatcaggtgatcatcgccggtgcgggcggcgcggcgcatttgccgggcatgattgcagcgaaaactctggtgccggtgcttggcgtgccggttcagagcgcggcattaagcggcgttgacagcctctactctatcgttcaaatgccccgcggcatcccggtcggcacgctggccatcggcaaagccggcgccgctaacgccgccctgctcgccgcgcaaattctcgcccagcatgatgccgaactgcaccagcgtctgagcgcctggcgtcaggcgcaaaccgatgaggtgctggataacccggacccgcgaggtgcggcatga

SEQ ID NO: 87062 - DNA, 1068 bp, Enterobacter aerogenes
atgaaacaggtttgcgtcctcggtaacggacagttaggccgcatgctgcgtcaggccggtgaaccgctgggcatcgccgtctggccggtcggcctggaagccgacccggaagcggtgccattccagcaaagcgtcatcaccgctgaaatcgagcgctggccggaaaccgccctgacccgcgaactggcgcgccatccggctttcgtcaaccgcgacgtttttccgatcatcgccgaccgcctgacccagaaacagttgttcgacaaacttggcctcgccaccgcgccgtggcaactactggcggataaaagcgagtggcccgccgtgtttgcccgtctgggcgaactggctatcgtcaagcgccgcgtcggcggctacgatggccgcggccagtggcgtctacgcgagaacgaaaccgcacaactgccggatgataattacggcgagtgtatcgtcgagcaggggattaatttctccggcgaagtgtcgctggttggtgcccgcggccgcgacggcagcacggtgttttatccgctgacccgcaacctgcaccaggacggcattctgcgcgccagcgtcgccttcccgcaggccaatgcgcgccagcaggcgcaggccgaaagcatgctgacggcgatcatgaacgagctcaactacgtgggcgtgatggccatggagtgcttcgtcaccgccgagggactgctgatcaacgaactggcgccgcgcgtgcacaacagcggccactggacgcagaacggcgcttccattagccagtttgaactgcacctgcgcgccattaccgatttgccgctgccgccgccggtggtcaacagcccatcggtgatgatcaacctgatcggcagcgatctgaactacgactggctgaaactgccgctggtacatctgcactggtacgacaaagaagttcgtccggggcgtaaggtcgggcacctgaatctgaccgacagcgataccgatcgcctgagcgccacgctggaagcgctgaaaccgctcctgccagccgaatacgccagcggcgttttctgggcgcagtcgcagcttaattaa

SEQ ID NO: 87063 - DNA, 1077 bp, Enterobacter aerogenes
atggaaaatgggacacactatcgcgccatcctcagcgcggatacgccgcttatcgacgtccgcgcgccggtggaatttcagcaaagcgcgatgcccgcggcgattaacctgccgctgatgaacgatgatgaacgagccgccgtcggcacctgttacaagcgccaggggccggaagcggcattagccctcggacataaactggtcgatggcgacctgcgcgccagccgcctcaaggcgtggctgtcggcctgcgtccgctatccacagggctatctgtgctgcgcccgcggcggccagcgctcgcatatcgtgcagcagtggctgcgtgaagcaggcgtcgattatccgctgattgtcggcggctacaaagcgctacgccaggcggcaatacaggctaccgaggagctggtacagcaccctatcgtgctgattggcggctgcaccggcaatggcaaaacccagttggtttgctcgcgcccggacggtatcgatcttgaaggtcacgcccaccaccgcggttcgtcatttggccgtacgttgcagcagcaacacccgcaggcgacgttcgaaaaccatctggcggtctccctgcttaaaaaggctgaacaacaaacacgttgggtgctggaagatgaaggccatatgattggcgcgaaccacctgccggagtgtctgcgtatccgcatggcgcaatcgccgctggcggtggtggaagatccgtttgacgttcgtctggagcggttgcgcgaagagtacttcgatcgtatgcaccgcgactttattgccgcctatggcgaagagaaaggctggcaggaatatagcgagtatctgcatcacgggctgtttgccatccggcgtcggctggggctacagcgctttgctcagttaaccgaactactcgacgcggcattgttgcagcaacagcgtaccgccagtaccgaagctcacttcacctggctggtcccgctgttaaatgaatactacgacccaatgtatcgctatcagttggggaaaaaagccggaaaaattatttttcgcggcaactggcaggaggtcgccgcctggctggagaagtag

SEQ ID NO: 87064 - DNA, 1146 bp, Enterobacter aerogenes
atggcacataaaataaaagcgctggcgatctcgatcggcgcagcattagcgttaacctcttttgcatcccaggctgagattacgctgctgaaacaagatccgcaggcgggcgatccgttaagccgccttaactttaccgtcggcggcagtattcgtccgcagttcaacatgatgaccggcgatggcgataaaggttcctacaagcgtaacggtttcgacggcggcacccgtttccgctttgcggctgattactatctgtttgatgatattagctggatcagctactacgaattgggcgtgaatattccggcgctgttcgattgggacaatcactacgcggaaggggcgaacaataccactcgtcgtatgctttataccggtctgaagagcgatacctgggggacattaacctacggtcagcagaacagtatttactatgatgtcgtcggcgtgaaaaccgatatctgggactacgatatgatcggtcaggctccgggtaacggtattaacggcgactacgatggttcttatcgttcacgcaatatgttgaaatataagaaaaccgtcggtgatgtcgatctgtacggatcctatctgtttgaagatagcgagtatctgccgggcgatggtctgcgctacaaacgtaaaggcggcgggtctatcggcgtggattaccacatcatgaaggacctgacctggggtaccgcgtggaactacacccgcgccgagatgcgcgacccgtcaagctccgatagcaaaacctacgaccagaatattgtcggtaccgcgctgagctggactccggataactggaccttctccttcggcggcggttggtatcagaacttcctgactaccaagaaaaccaatgtgcatgattacttcgccggcgatgcctggggtattgaatactttgccggctataaattcccgatcaatcaatacgctgttaaatctattcagccgtactttatgggcgaccgtctggagtacgtgaatggccgcaactaccagcgtattgataacggtttgggtgttagcttccagctggattacggtttccgtgttgattacgagcacgtgtttacctccagcaccgatgatctgggcgatatgaacctggtgcgtctgcgctacgacttctga

SEQ ID NO: 87065 - DNA, 2415 bp, Enterobacter aerogenes
atgatagcccgctggttctggcgcgaatggcgctcgccttcgctgctcatcgtctggctggcattaagcatggcggtggcctgcgtgctggcgctgggctcaatcagcgaccgtatggaaaaagggcttagccagcaaagccgcgaattcatggccggggatcgcaccctgcgcagttcacgcgtagtgcctgccgagtggctcgcccaggcgcgtacgctagggttaaccgtcggcgaacagctgaacttcgccaccatgactttcgctggcgataccccgcagctggcggatgtgaaggcggttgatgatacttatccgctgtacggcacgctggagaccgcaccggcgggattaaaaccgcagcgcggcagcgtcctgctggcgccaaggctgatggcattactgaacctgaaaaccggcgataacattgacgttggcgacgccaccttgcgcatcgctggcgaggtcattcaagagccggacgccggattcaaccccttccagatggcgccgcggctaatgatgaatatcgccgacgtggcgaaaaccggcgcggtacagcccggcagccgcgtctcctggcgctataaattcgccggtagcgcacaacagctggcggcctacgagcggtggctgctgccgaagcttggtgcggaacatcgctggattggcctggagcaggatgatagcgcgttgggtaaatcgctggagcgctcgcagcaatttttactgctgtccgcgttactaacgttgctgctggcggtcgctgcggtagcggtagcgatgggccattactgccgcagccgctacgatttggtcgccatccttaagacgctgggcgccgggcgggcgcaactgcgtaaacttatcgtcggtcagtggctaatgttgctggtgctggccgtggtggcggggggcgcgatggggctgctgctggaaaaagccctgctgctgatgcttaaaccggtgctgcccgccgcgctgccgcccgccagcggctggccgtggttgtgggctatcggcgcgatggtggtgatttcgctactggtcggctggcggccgtaccggctgctgctggcgactctgccactgcgggtattgcggcaagatgtggtggctaacgtctggccgctaaaacactatattccggtggtttgcgcggtggttgtcggcggactggcatggctgatgggcggtagcccgctgctgtggtcggtgttggtcggggcgctggtactggcgctgttgtgcgggctggtaggctgggccttgctgtggttgctcaagcgcttaacgctgaaagcgttaccgttgcgcctggcggtgaatcgcctgttgcgccagccgtggtcaacgctgagccaactggcggcgttttcactgtcgtttatgctgctggctctgctgttggtgttacgcggcgatttgctcgaacgctggcagcagcagctgccgccggaaagcccgaactacttcctgattaatatcgcacccgaacaggtagtgccggtgaagacattccttgccgaacaccagacccgggcggcggagttttaccccatcgtgcgcgcgcggctgacgcagattaacggtcaaaccaccgagggcaataaagacgaagcgctaaaccgcgagcttaatctcacctggagcgagcagcgcccggatcataatccgctggtggccggcagttggccgccgaaggcgggcgaggtgtcgattgaagaggggctggcgcagcggttgggcgtcaggatcggtgatagcgtcacctttaccggcgacactcagcaatttaacgctaaggtgaccagcgtgcgcaaagttgactgggagagcctgcggccaaacttcttctttattttcccgccaggggcgctggatgggcagccgcaaagctggctcaccagcttccgctgggataatggcaacgcgatgctgacccagcttaatcgcgaattccccaccgttagcctgctggatatcggcgccatcctgcgccaggtaggccaggtgttgacgcaggtaagtcgcgcgctggaggtcatggtggtgctggtcaccgcctgcggcgtgctattgctgctggctcaggtgcaggtcgggatgcgtcagcggcatcaggagctggtcgtctggcggacgctgggggccggtaaaaacttgctacgtaccacgctgtgggcggagttcgctctgcttggcgtggtgtcggggctggtggcggccattggcgccgaggtggcgctggcgatgctgcaaaccaaagtgtttgattttccatggacgccggactggcggctgtgggttatgctgccattatccggcgctatattattatcgttgtgcggcggatggttgggattacgcttattaaaaggaaaagcgttattccgacaatttaaccagtaa

SEQ ID NO: 87066 - DNA, 687 bp, Enterobacter aerogenes
atgccagcggaaaacatacttgaagttcatcatcttaagaaatccgtcggtcagggagagcatcagctgtccatccttaccggagttgagctggttgtcaaaccggcgcaaaccatcgccctgattggcgagtccggttccgggaaatccacgctgctggcgattctcgccgggcttgacgacggcagcagcggcgaagtgtctcttctggggcagccgctgcatcaaatggatgaagaggcgcgcgcgaggctacgcgcaaagcacgtaggctttgtctttcaatcgtttatgttgattccaacgctaaacgcccttgagaacgtcgagctgccggcattgctgcgcggcgccagcgatagccagagccgtggcgatgcgcgcgcgctgcttgaacagctggggcttggcaaacggctgcaccatttgccggcgcagctttccggcggcgagcagcagcgagtggcgctggcccgcgcctttaacggccgtccggcgctgctgtttgccgatgagccgaccggcaatctcgaccgtcacaccggcgataaaatcgccgatctgctgttctcgctcaaccgcgaacacggtaccacgctgattctggtgacccacgatccgctgctggcggcgcgctgcgatcgtcgcttacgcctggtggatggcaagttgcaggaggaagcatga

SEQ ID NO: 87067 - DNA, 579 bp, Enterobacter aerogenes
atggttctgtttacctgccgcgcaatggcggcggatacgctgttagtgcttggcgatagcctgagcgccggctatcggatggcggcgaatactgcctggcctgctctgctcaatgataagtggcaggccaaaacgacggtggtcaatgccagtatcagcggcgatacatcgcagcagggcctggcgcgcctgccggcgctactgaagcagcaccaaccgcgctgggtgctggtggaactgggcggcaacgacgggctgcgcggtttcccgccgcagcaaacggagcagacgctacgcaccgttattcaggatatcaaagcggcgaaggcccaaccgctgctgatgcaaatacgcctgcccgccaactatgggcgccgttataatgaagcctttagcgcgatttatccgcagctggccaaagagttcgatattcctctgctgcccttttttatggaggaggtttatctcaagccacaatggatgcaggacgacggcattcatcctaatcgcgatgcgcaaccgtttattgccgactggatggcaacccggttggctcccttagttaatcatgactcctga

SEQ ID NO: 87068 - DNA, 768 bp, Enterobacter aerogenes
atgcaaaaatcggttttagttacaggatgttccagcggaattggcctcgaaagcgcgcttgatttaaagcgccagggcttccgggtactggccgcctgccgtaagagggaggatgtcgcccgtatgcaggggctgggtctgaccggtattttgctggatctcgatgatccgcaaagcgtcgaaaatgccgccgccgaggtcatcgcgctaaccgagaaccgcctgtacggcctgttcaataatgctggctacggcgtctacggcccgctcaccaccatcagccgtcagcagatggaacagcagttttccgccaactttttcggcgcccaccagctcaccatgctgctgctgcccgctatgcagccgcacggcgagggccgcatcgtgatgacctcttcggtgatggggctgatttccagccccggccgcggcgcctatgccgccagtaaatacgcgctggaggcgtggtccgatgcgctgcgcatggaactccgccacagtggcataaaagtcagcctgattgagcctggaccaatccgcacccgctttaccaacaatgttaaccagaccggcgacaagacggtagaaaaccccggtattgccgcgcgctttacgctcggcccggaggcggtggtggaaaaagtgcgtcacgccttcgtcagcgacaagccgaaactgcgctatccggtgacgctggtcacccacgcggtaggctggttaaaacgcctgctaccggcccgtgcgatggacaaaattatccagggctga

SEQ ID NO: 87069 - DNA, 855 bp, Enterobacter aerogenes
atgtccgaacagaatattgtcaatattaccgaagccaacctgcagcagacgctgcagcaatccatgaacgcgccggtgctgttttatttctggtccgcccgtagccagcactgcgaacaactgacgccggtgcttgagcgcctggccgcccaataccacggtcagtttacgctggcgaaggtagattgcgacgcggagcaaatgctggcttcgcagtttggtctgcgcgcgatcccaacggtgtatcttttccagaacggccagccggtagatggttttgaaggcccgcagccggaagaggccatccgcgccctgctggataaagtgctgccgcgcgaagaagaattgaaagcgcaggaagcgctggcgctgatgcaggaagaaaaatacgccgacgcgctgccgctgctgaaagacgcctggcagttgtctaaccaggatagccagattggcctgctgctggcggaaacgctaattgccctgcagcgttccgatgaagctgaaagcgtgctgaaaactgtgccgctgcaggatcaggacacccgttatcaggggctggtggcgcagattgaactgcttaaacaagcggctgataccccggaaatccagcaactgcagcagcaggtcgagcagaacccggacgacgcggcgctggcgtctcagctggcgttgcagctgcaccaggtcgggcgcaacgaagaagcgctggcgctgctgttcacgcatctgcaaaaagatttaggcgccggcgatggccaggtgcgcaaaatgctgcaggagatcctcgcggcgctcggcaccggcgacgccctggcggcgaaataccgccgccagctgtattcattgctgtattaa

SEQ ID NO: 87070 - DNA, 783 bp, Enterobacter aerogenes
atgaacgggcataatattactaacgaatcgctggcgctctcgatggtgctggtgctggtggcaatcgtcgtcagctatcgggaaaaattggcgctggaaaaagatatcatctggagtatttgccgggcgatagtgcaattgattatcgtcggctacgtgctgaaatatatctttaacgtcaatcatgcggtgttgacgctattgatggtgctgtttatctgctttaacgcggcgtggaatgcgaagaagcgcagtaaatatatcgataaagcttttgtttcatcgtttatcgctattaccaccggcgccggactaaccctggcggtgctggtcttctcggggtcgatcgcctttgtgccgatgcaggttattccgattgccggcatggtggccggtaacgccatggtggcggtagggctgtgctacaacaatatgggccagcgttttaacagcgagcagcagcagattcaggagaagctaagtcttggcgcgacgccgaagatggcctccgcgcggctgatccgcgatagcatacgcgcatcgttgattcccacggtagattcggcgaaaacggtcgggctggtgagtttgccgggcatgatgtcggggttgattttcgccgggatagatccggtgaaggcgattaagtatcagattatggtcacgtttatgttgctatcgaccgccagcctgtcgacgattatcgctggctatctgacctaccggaagttcttcaatgcccgccatcaattggttgtgacgcagttgaaaaagcgcccgtaa

SEQ ID NO: 87071 - DNA, 678 bp, Enterobacter aerogenes
atgaaggaaaataacgcgattttgcgcctcgagggcgtcggttttaaaaccgacgacgcggtcatcctgaataatatcgatctccggattgcggccggggaatttaagttgattaccgggccatccggatgcggcaaaagtacgctgctgaaaattatcgcctcgctgctgagcccgaccagcggagagatttttttcaacgataaagatatcgccacgctgtcgccggaaaactatcgccagcaggtttcttattgcgcgcaaactccggcgctattcggcgattcggtctacgacaacctggttttcccatggcagatccgcaacaaacagccggatcctaaagcgctggttgccgatctcgaacgcttcgggctggcggataatacgctggagaaatccattaatgagctttctggcggtgaaaaacagcgggtctcgctcattcgtaatttgcagtttctaccgcaggttctgctgcttgatgaaattaccagcgcgctggatgaaagtaataagcgcaacgttaacgagattattcatcgctacgcgacggaaaaagggatggccattctgtgggtcactcacgaccagaacgaaattgcccatgctgatgaagtgatcacgctacagcctgccggtgggaaaatgcaggaggtaaaaaatgaacgggcataa

SEQ ID NO: 87072 - DNA, 918 bp, Enterobacter aerogenes
atgctgatttttatccccgttcttatttttgtcgcactggtcattgtgggggcggcagtaaaaatcgtgccgcagggatatcaatggaccgtcgaacgctttggccgctacacgcagacgctgcagccgggtttaagtttagtggtgccgtttatggaccgcatcggccgtaaagtgaacatgatggagcaggtgctggatatcccttcgcaggaagtcatctctcgcgataacgccaacgtcactattgacgccgtctgcttcattcaggtgatcgatgcgccaaaagccgcctatgaagtcagcaatcttgagctggcgatcgtcaatctgacgatgaccaatattcgtaccgtactcggctcgatggagctggatgaaatgctctcccagcgcgatagcattaacacccgcctgctgcatatcgtcgacgacgccaccaatccgtggggggtgaaaatcacccgcgtcgaaatccgtgacgttcgcccgccggcggagcttatctcctcgatgaacgcccagatgaaagccgagcgaaccaaacgcgcctatatccttgaggctgaaggggtgcgccaggcggaaattctcaaggccgaaggcgaaaagcaatcgcagatcctcaaagccgaaggcgaacgtcagtctgccttcctgcaggcggaagcccgcgaacgttccgccgaagcggaagcccgcgccacccagatggtgtcatcggcgattgcctcaggcgatattcaggcgattaactacttcgtggcgcagaaatataccgacgcgctgcagcagattggcgccgccaacaacagcaaagtggtgttgatgccgctggatgccagcagcctgatgggctcgatagccgggatcggcgaactgctgaaagagagtagcgtcgagcggaaaaaatcatga

SEQ ID NO: 87073 - DNA, 459 bp, Enterobacter aerogenes
atgatcgccctgatcctcgcccatccgcatattttctggctgacccttggcgggctgttgctggcggcggagatgctcggcagcaacggctacctgctgtggagcggcgtagctggcgtcgtcaccggcctgctaatatgggctattccgctcagttgggaatggcaagggacgctgtttgccgtccttaccctgctggcggcgtggctgtggtcaaaatggctgcgtaaacgcatgaggcagcagcgccccgccgacgcgcagcttaaccagcgcggccagcagctggttggccgccgttttactctcgacagcgcgcttgaaaacggccgcggccacgtccgcgtcggcgatagctcctggccggtgcttgccgatgaagacctcgcggcgggctgcaaggtggaggtggtcgccgtagaagggattaccttgcgggtaagagccgccgtccgctaa

SEQ ID NO: 87074 - DNA, 411 bp, Enterobacter aerogenes
atgaatattagcgatgtggcgaaaaaaaccggtttaaccagcaaagcgattcgtttttacgaagagaaagggctggtgacggcgccgctgcgcagcgataacggctaccgtacctacactcagaagcaccttgatgaactgacgctgctgcgtcaggcgcggcaggtgggatttaacctggaagagtgccgcgagctggtgacgttattcaacgatccgtcgcggcacagcgccgatgtgaaaaaacgaacgctggagaaagtcgcggatattgagaaccatatccgcgagttgcaaaacatgcgtgcgcatttgctggcgctggcggacgcctgccccggcgatgagagcgcggattgcccgataattgataacctctccggctgttgtcaccgcaaagcgcaggcttag

SEQ ID NO: 87075 - DNA, 2502 bp, Enterobacter aerogenes
atgtctaacactatcgacctgacgcttgatggcctctcctgcggccactgcgttaaacgcgtgaaagagagcctcgaacaacgtcccgacgttgaacaggctgatgtaaccgttaccgaagcccacgtcacgggtagcgccagcgctgaagccctgattgagaccatcaaacaagccggatacggcgcggagctcagccacccaaaggctaaaccgctggcagaatcatcaatcccgtcggaagcactgacagcggccactcctgagcttccggcagcccatgacgaggatgacagtcaacagctgctgatcaacggcatgagctgcgccagctgcgtttcccgggtacaaaacgcgcttgccgcggtgccgggagtctcacaggcgcgggtaaacctggcggaacgcacggcgctggtgatgggcagtgcgtccgccgcagaattagtgcaggcggtggaaaaagccggctacggcgcggaggcgatcgaagacgatctggaacgccgcgaacggcagcaggaaaccgccatcgccaccatgaaacgttttcgctggcaggcgattgtcgccctgctggtcggcgtaccggttatggtctggggcatgatcggcgataacatgatggtcagcgacgacaatcgatcgctgtggctggtcatcggtctcgtcaccctcgcggtgatggtcttcgccggcggtcacttctatcgcagcgcctggaaaagcctgaaaaacggtaccgccaccatggatacgctggtcgccctgggaacgggcgtcgcctggctatattcaatgagcgtcaacctgtggccgcagtggtttccgatggaagcgcgccacctgtattacgaagccagcgcaatgatcattggtcttatcaacctcggccatatgctggaagcccgcgcgcgccagcgttcctcgaaggcgctggaaaaactgctcgacctgacgccgccttcggcacgcgttgtgacgcctgaaggggaaaaagatctgccgctcgcggaagttgaggcgggtatgaccctgcgcctgaccactggcgatcgcgttccggttgacggcgtgataagccagggcgaagcctggtttgatgaagcgatgctcaccggcgagccggtgccgcagcaaaaaggcgatggcgacgctattcatgccggtaccgtggtgcaggatggcagcgtactgtttaccgccagcgccgtcggcagccaaaccacgctggcacggattattcgcatggtgcgccaggcgcaaagtagcaaaccggaaattggccaactggcagataaaatctcggcggtatttgttccggcagtggtagccattgcgctgattagcgccgctatctggtacttcttcggcccggcgccgcaaatcgtctataccctggtcattgccaccacggtactgattatcgcctgtccatgcgcattgggcctggcgacgccgatgtcgatcatctccggtgtcggacgggcggcggaatacggcgtgctggtgcgtgacgccgatgctctgcagcgcgccagtgaactcgatacgctggtgttcgataaaaccggtaccctgaccgaaggcaagccgcaggtggtggccgtgaaaaccttcgccagctttgatgaatccactgtcgtgcggcttgccgccgcgctcgagcagggttcaagccatccgctggcgcgggcgatcctcgataaagccgctgacagcactttaccggaggtaagcggcttccgtaccctgcgcgggctcggcgtcagcggtgaagcggaaggccatcaactgctgctcggcaaccaggcgctgcttaacgagcagcatatcgctaccgctgaactggaaagcgagatgacggcacaggcctcgcgcggcgccacgccggtgctgctggcgatcgatggtcaggccgctgcgctgttcgccatccgcgacccgttacgggaagatagcatcgacgcgctggcgcgcctgcatcgtcagggctaccggctggtgatgctgaccggggataaccctactaccgccaatgccatcgccaaagaagcgggcattgatgaagtgatagccggcgtgctgccggacggcaaagccgatgccattaaacgtctgcagagccaggggcacaaagtggcgatggtcggcgacggtattaacgacgccccggcgctggcgcaggcggatgtcggtatcgccatgggcggcggcagtgatgtcgctattgaaactgcggcgatcaccctgatgcgccatagccttaacggcgtagccgatgctttagcgatttcgaaagcgacgttacgcaacatgaaacagaacctgctgggcgcgtttgtttataactcgctgggtatcccgattgccgccgggatcctctggccgctgaccggtaccctgctgaacccggtggtcgccggcgcggcaatggcgctgtcgtcaatcaccgtggtgagtaacgctaaccgcctgctgcgctttaaaccgaaagattag

SEQ ID NO: 87076 - DNA, 795 bp, Enterobacter aerogenes
atgggcctgttaaaccgaataaaaatgctgtggcgagccgccgtcggctcgtcttattcctggcctgcaatggatatcgtcctgcccggcgaacgttatttacatctcgtcggcagcattcatatgggcacccgcgacatggcgccgccgccggccaagctactgaaaaaaatacgtcaggccgacgccttaatcgtcgaagcggacatcaccggtaatgaaacgcctttcagtaatctcccctcttatcccccgctggctgaacgtctgagcgaaacgcaattagcagaattacgctcgcgcgccggcgagctgggtttgtcggtcgatcttttcgatagccagccgctgtggcaggtggcgatggtgctacaagccactcaggcgcaaaaactgggattacggcccgattacggcattgattatcagttgctgatggctgcccgcgagagcaacataagggtgatggagctggaaggcgccgatagccaaatcgcgctcctgcgcaatctaccagacgctggtaaggcgctgctggaagatacgttgacccactggcgcaccaacgcccgtttactgcaggtgatgattggctggtggctggagcaaccgccgtcgcgcggcgcggaaacgctgccaacgaccttcagccagtctttatatgatgtactgatgcatcagcgcaacatagcctggcgcgacacgctgcttgctctgccgccggggcgctatgtggtcgccgtcggcgcgctgcatctatatggcgaagggaacctgccggatatgttgacgtaa

SEQ ID NO: 87077 - DNA, 480 bp, Enterobacter aerogenes
atgactcccgccgttaaattactcgaaaaaaacaaaattacctttcagatccacagctacgaacacgatcctcaagagaccaattttggcgatgaagtggttcgcaagctggggctcaatgcggatcaggtttacaagacgctattagttgccgttaacggcgatatgaaacatctggcggtcgccgtcaccccggttgccggacagttggatttgaagaaagtggccaaagcgctgggcgccaagaaggtagatatggccgacccaatggtcgcacagcggatcaccggatacctggtcggcggcatcagcccgcttgggcagaaaaagcgcctgccgacggtgattgatgctccggcgcaggagtttgccaccatctatatttccggcggcaaacgcgggctcgacatcgaactggcggcaagcgatctggcgaagcttctggacgcgaagttcgccgatatcgcccgccgcgattga

SEQ ID NO: 87078 - DNA, 1653 bp, Enterobacter aerogenes
atgcattatttaaaacgcggcgtagcgctggcgttattcgccgccttatcgctgggcagcctgtcagcgcaggcctatgagcaggacaaaacctataaaatcaccatcctgcacactaacgaccaccacggtcatttctggcgcaacgactatggcgaatatggccttgcggcacagaagacgctggtggacggtatccgcaaagaggtggcggccgaaggcggtagcgtcctgctgctgtccggcggcgatatcaataccggggtgccggaatctgatttacaggatgcagaacctgattttcgcggcatgaacctgattggctacgatgccatggcggttggcaaccatgagtttgataacccgctcagcgtgctgcgccagcaggagaagtggtcgaagttccctttcctgtcggccaatatctatcagaaaagcaccggcgaacgcctgtttaaaccctgggcgctgtttaagcgcggcgggcttaaaattgcggtgattggcttaacgaccgacgatacggcgaaaatcggcaacccggaatatttcaccgatatcgaattccgtaatccggcggcagaagccaagctggtgattcaggaactgcagcaaaatgaaaagccggacgtgattctggcgaccacccatatgggccactatgacaacggtaatcacggctctaacgcgcctggcgacgttgaaatggcgcggagtttacctgcgggatcgctggcgatgatcgtcggcggccattcgcaggatccggtctgcatggcctcggaaaataaaaagcaggtcgattatatccccggcaccccgtgcgcgccggatcgccagaatggcatctggatcgtgcaggctcacgagtggggtaaatatgtcggacgcgccgattttgaattccgcaacggggagatgaagctggtgcactatcagctgatcccggtcaacctgaagaagaaagtcacctgggataacggtcagagcgagcgcgtattgtatacgccgcaaattgctgaaaacccgcagatgctctcgctgttaacgccgttccagaataaaggcaaggcgcagttacaggtaaaaataggcagcgtcaacggccaccttgaaggcgatcgcagcaaagttcgcttcgtacaaaccaatatggggcgtctgctgctggcggcgcagatggcgcgcagcaatgctgatttcgcggtgatgagcggcggcggtattcgcgactctatcgaagcgggtgatattacttataaagacgtgatgaaagtgcagccgttcggcaacgtgctgacttacgtcgatatgagcggtaaagaggtcactgagtacctgaccgccgtcgcgcagatgaagccggattccggcgcttatccgcagttcgccaacgtcagtttcgttgccaaagatggcaagcttaacgatctgaaaatcaaaggcgaaccggtggaaccggcgaaaacttaccgtatggcgacgctgagctttaacgccaccggcggtgacggctacccgcacatcgataataaaccgggatacgtaaataccggctttatcgatgccgaggtgctgaaagagtacatcgagaagaactcgcctctggatgcggcagcctacgagccgaaaggcgaggtcagctggcagtaa

SEQ ID NO: 87079 - DNA, 1221 bp, Enterobacter aerogenes
atgacaaccaaccaatccgctcagtccttacccggtaccggcgcgccgccgcaaaaagcgcgcacctcatttggcatcctgggggcaatcagcctttcccatctgctaaacgacatgatccagtcgctcatcctggcgatttatccgctgctgcaggcggaattctctttaactttcgtgcagatcggcatgatcaccctcaccttccaactgacgtcatcgctattccagccggtgattggttacatcaccgataaacgctcgatgccgtggtcattaccggtggggatgtgtttcaccctctgcggcttaattctgttagcgctggccggcagcttcggcatggtgctgctggccgccgcgctggtcggtactggctcttcggtcttccatccggagtcctcacgcgtggcgcggatggcttccggcggccgtcacggcctggcgcaatcgctgttccaggttggcggcaacttcggcagctcgctggggccgctgctggcggcggtaatcatcgccccctacggcaaaggcaacgtcgcctggttcgtgctggccgcgctgctggcgatcgtcgtgctgtcgcaaatcagccgctggtatgccgcgcaacacagaatgaataaaggcaaaccgaagccggttatcgttaatccgctgccgcgtaacaaggtcatcctggccgtcagcattctgttaatgctgattttctccaaatacttctacatggcgagcattagcagctattacaccttttatctgatacacaaattcggattatcggtgcaaaacgcccaacttcacttgttcgccttcctgtttgcagtggctgcaggaacggtgattggcgggcctgttggcgataagataggtcgtaaatatgtaatttggggctctatcctcggcgtggcgccatttacccttattttaccgtacgcatcgctggaatggaccgggatcctgacggtgataattggttttatcctcgcatcagccttttccgctatcctggtctatgcccaggagctgttgccggggagaatcggtatggtttccggcctgttcttcggcttcgcgtttggcatgggcggccttggcgccgcggtgttggggttgttagccgaccataccagcatcgatctggtttataaaatctgtgctttcctgccgcttctcggcattctgacgatattcctgcctaataaccatcaaaaagcctga

SEQ ID NO: 87080 - DNA, 1677 bp, Enterobacter aerogenes
atgcatcacgcaacaccgctaatcaccaccattgtcggcggccttgtgctcgcctttatcctcggcatgattgccaataagctacgtatttcaccactggtaggatatttattagcgggcgtgctggccggtccatttactcctggttttgttgcggatactaagcttgcgcctgaactggccgaacttggcgtcatcttgctgatgtttggcgtcgggctgcacttttcgctgaaagatctcatggcggtaaagtcgatagccattcccggagccatcgcccagatagccgtggcgacgctgctcgggatggcgctctcttccctgctcggctggtcgctgatgaccggcatcgtttttggcctgtgtctttccaccgccagtaccgtggtgctgctgcgcgcgctggaggaacggcagcttattgatagccagcgtgggcaaatcgccatcggctggctgatcgttgaagatttagtgatggtactaacgctggtgctgctgcccgctatcgccggaatggtcgaaaaaggcgatgttgggctggcgtcgctggcgctcgacatgggcattaccatcggtaaagtcgtcgcctttatcgccattatgatgctggtgggccgccgtctggtgccgtggatcatgtcgcgcagcgcggcaaccggctcacgcgaactatttaccctgtcggtactggcgctggcgctcggcatcgccttcggcgccgttgagctgttcgacgtctccttcgccctcggcgcattcttcgccgggatggtgcttaacgaatccgaactcagccaccgcgccgctcacgatacgctgccgctgcgcgacgccttcgcggtgctgttctttgtctccgtcgggatgctatttgacccgatgatcctggtcgaacagccgctggcggtgctggcgacgctggcgattatcatctttggtaaatccgccgccgctttcttcctggtacgtatgttcggtcactcgccgcgtaccgccctgaccatcgccgccagcctggcgcaaatcggggaattcgcttttattcttgccggtctcggcatggcgctggatctgctgccgcaggccgggcagaacctggtgctggctggggcgataatttcgattatgcttaacccggtgctgtttaccctgctggaaaaatatctcgataaaaccgaaacccttgacgagcagacgctggaagaggtgctggaagacgaaaaacaggtgccggtggatatctgcaaccatgcgctgctggtcggctttggccgcgtcggcagcctgcttggcgagaaactgatggcccaggggatcccgctggtggtgattgaaacctcccgcacccgcgtggatgagctgcgtgagcgcggcatcagcgccgtgttgggcaatgccgccaacgaagagatcatgaatctggcgcatctcgactgcgcccgctggctgctgctgaccatccctaacggctatgaagccggtgaaattgtcgcctcagcgcgggaaaaatgcccgaacattgagattatcgcccgcgcccattacgacgatgaggtcgattatattaccgaacgcggagccaatcaggtggtgatgggggaacgcgaaatcgcgcgggcgatgttacgtctgctggaaacgccgccagctggcgagattgttaccggttga

SEQ ID NO: 87081 - DNA, 1305 bp, Enterobacter aerogenes
atgaaatttcccggtaaacgcaaatctaaacactatttccccgttagcgctcgcgatccgctgctgcaacaaattcagccagaaaatgagtccaacgtctcctgggtggttggcatcgaccagacgttggtggatatcgaagcgaaagtggatgaggcgtttatcgtacgctacggtctgagcgccggtcattcgctggtgattgaagatgatgtcgccgaagcgctgtatcaggaactggtacgcgacggcctgatcacccatcaatttgccggtggcaccattggcaataccatgcacaactactcggtactggctgacgaccgctcggtgctgctcggcgtgatgtgcagcaatattgagatcggcggctacgcttatcgctacctgtgcaatacctccagccgtaccgatctcaactacctgcagggcgtcgatggcgccattggccgctgttttacgctgattagcgatagcggcgaacgtacctttgccatcagtcctggccacatgaacaaactgcgtccggaaagcattccggaagaggtgatcgccggcgcttccgcgctggtgctgacctcctacctggtgcgctgtaagccgggcgagccgatgccggacgcgacgatgaaagccattgagtatgccaaaaagcatgacgtgccggtggtgctgacgctgggaacgaaatacgtgattgccgacaacccgcaatggtggcagcagttcctcaaggaacacgtttcgattctggcgatgaatgaagaggaagcggaagcgctgaccggtatcgccgacccgctcaccgcggcggataaagcgctggactgggtcgacctggtgttgtgcaccgcaggtccggcgggcctgtatatggcgagcttcaccgaagaggaagcgaagcgtaaaacgcagcatccgctcctgccgggggcgattgccgagttcaaccagtatgaattcagccgtgcgatgcgccatcaggattgcgttaatccgctgcgtatctattcgcacatcgcgccttatatgggcggcccggagaagatcatgaacaccaatggcgcaggggacggcgcgctggcggcgttgttgcatgatatcaccgccaataactaccatcgtaataacgtgccgaactccagcaaacataagtgcaaatggctgacctactcatcgctggcgcaggtgtgcaaatacgccaaccgcgtcagctatcaggtgctgaatcagcattcaccgcgtttaacccgcggcctgccggagcgggaagatagcctggaagaggcctactgggaccgttaa

SEQ ID NO: 87082 - DNA, 963 bp, Enterobacter aerogenes
atgcatcagacgaaaacaggtattttgctagccaatttaggtactcccgatgcgcccacgcccgatgcggtaaagcgctatctgcgacaatttcttagcgacaaacgggtagtggatacgcctcgtctgctgtggtggccgctactgcgcggcatcatactgccgattcgcgctccccgcgtggcgaagctctatcagtctgtgtggatggcggaaggctcgccgttgatggtgtatagccggcaacagcaacaggcgctggcagccaggctacccgatgttccagtagcgctggggatgagctatggctcgccgtcgctggcaagcgcggtcgatgagctattggcccaggacgttgaccatatcgtggtattgccgctgtatccgcaatattcgtgttctaccgtggcggcggtatgggatgaactggcgcggatcctcgcgaaaaagcgcgccattccgggcgtttcgtttatccgcgactatgccgacgacgctgactatatccacgcgctggcggccagcgtacgcgcttcgttcgccgttcacggcgaaccggatgtgctgctgctctcctatcacggtattccgcaacgctacgcccatgagggcgatgattacccgcagcgctgccgggtaacgactcgcgagctggtttcagtgctcgggctgccgccggagcgggtgatgatgaccttccagtcgcgctttggtcgcgaaccctggttgacgccatataccgacgaaacgctaaaaatgcttggcgagaagggcacacagcacgtacaggttatctgtccgggcttctccgccgactgtctggaaacgctggaagaaatcgcggtgcagaaccgggaaattttccttgaggccggcggtaagcaatatgagtatattccggcgcttaatgccgatcctgcgcatattgagatgatggtgaacctgaccgcgtcgtatcgctga

SEQ ID NO: 87083 - DNA, 645 bp, Enterobacter aerogenes
atgcgtattattctgcttggcgctccgggcgcgggtaaaggaactcaggctcagttcatcatggagaaatacggtattccgcaaatctccaccggcgatatgctgcgcgccgcggtaaaatccggctccgagctcggtaaacaagcgaaagacatcatggacgccggcaaactggtgaccgatgagctggtcatcgcgctggtgaaagagcgtatcgcccaggaagattgccgtaacggtttcctgctggacggcttcccgcgcactatcccgcaggctgacgccatgaaagaagccggcatcgccgttgactacgttctggagttcgcggtaccggacgagctgatcgtcgatcgtatcgtgggccgccgcgtacacgccgcttccggccgcgtctatcacatcaaattcaacccgcctaaggttgaaggtaaagacgacgtgaccggcgaagagctgaccacccgtaaagacgatcaggaagaaaccgtgcgtaagcgcttggtggaataccatcagatgactgcgccgctgatcggctactatcagaaagaagcgcaggcgggtaacacccaatacgcgaaagtcgacggcaccaaagcggtggctgacgtgcgcgccgatctggaaaaaatcctcggctaa

SEQ ID NO: 87084 - DNA, 1875 bp, Enterobacter aerogenes
atgaaaggacaagaaacccgtggtttccagtcagaagtgaaacagcttctgcacctgatgatccattctctttattccaacaaagaaatcttcctgcgcgagctcatctccaacgcctcggatgcggcggataagctgcgtttccgcgcgttgtcccagccggatctgtatgaaggcgacggcgagctgcgcgtacgcgtatcgtttgataaagacaaccgcacgctgaccatcgctgataatggcatcgggatgaaccgcgacgaggtcattgaccatctcggcaccatcgccaaatccggcaccaaagcgttcctcgaatctatgggttccgatcaggcgaaagatagccagctgatcggccagttcggcgtcggcttctattcagcctttatcgttgccgacaaagtcaccgtgcgcacccgcgccgcgggcgacaagccggaaaacggcgtgttttgggagtccgctggcgaaggcgaatatactgtcgccgatatcactaaggccgatcgcggaaccgaaatcacgttgcatctgcgtgaaggcgaagacgacttcctcaacgactggcgcgtgcgttcgatcatcagtaaatattctgaccatatcgcgctgccggttgagattgaaaaacgcgaagaagtggacggcgaaaccgttatttcgtgggaaaaaatcaacaaggcgcaggcgctgtggacccgcagcaaatctgaagtcagcgacgacgaatacaaagagttctataagcatattgcccatgatttcagcgatccgctgacctggagccacaaccgcgtcgaaggtaagcaggagtataccagcctgctgtatattccgtcgcaggcgccgtgggatatgtggaaccgcgatcataaacacggcctgaagctgtatgtgcagcgcgtcttcatcatggatgacgccgagcagtttatgccgaactacctgcgtttcgtgcgcggcctgatagattccaacgatctgccgctgaacgtgtcgcgtgaaatcctgcaggatagcaacgtcacccgtaatctgcgcaccgcgctgaccaaacgcgtgctgcagatgctggaaaagctggcgaaagacgacgccgaaaaatatcagaccttctggaaacagtttggcctggtgctgaaagaaggcccggcggaagatgcttccaaccagcaagcgattgctaaactgctgcgcttcgccacgacgcataccgattcttccgcgcagaccgtgtcgctggaagagtacgtttcgcgcatgaaagaagggcaggagaagatttattacatcaccgccgacagctatgcggcggcgaagagcagcccgcacctcgagctgctgcgtaaaaaaggtatcgaagttctgctgctgtccgatcgcattgacgagtggatgatgagctacctgaccgagttcgacggcaaggcgttccagtcggttgccaaagccgacgagtcgctggagaagctggcggacgaagttgacgaatccaccaaagaagccgaaaaagcgctggagccgttcgttgagcgtgttaagggcctgctgggtgagcgcgtgaaagaggtgcgtctgacgcatcgtctgaccgacactccggcgattgtcaccactgatgccgacgaaatgagcacccagatggcgaagctgttcgccgctgccggtcaggcggcgccggaagtgaaatacatcttcgagctgaacccggcgcatccgctggtgaaacgcgccgccgatacccagaacgacgcgcagtttggcgagtgggtcgaactgctgctggatcaggcgctgctggcggaacgcggtacgctggaggatcctaaccagttcatccgccgtatgaatcagctgctggcatcctga

SEQ ID NO: 87085 - DNA, 606 bp, Enterobacter aerogenes
atgcaaaccagcccgctgttaactcagcttatggaagcgctgcgctgtctgccgggcgttggcccgaagtcggcgcagcgcatggcgtttacgctgctgcagcgcgatcgcagcggcggtatgcgtctggcgcaggcgctaacgcgcgcgatgtcggaaatcggccactgcgccgattgccgcaccttcaccgagcaggaggtgtgcaatatttgcagcaacccgcgtcgccaggaaaacggtcagatctgcgtggtggagagtccagcggacatttacgccattgagcagaccgggcagtattccggccgctacttcgtgctgatgggccacctgtcgccgcttgacggtatcgggccggatgacatcgggcttgaccgcctcgagcagcgcctcgaagccgagtcaatcagcgagttgatcctcgcaaccaacccaacggttgaaggcgaggcgacggccaactacatcgctgagctctgcgcgcagtatggcgttgacgccagccgcatcgcccacggcgtaccggttggcggcgagctggaaatggtcgacggcaccacgttgtcgcactcactggccgggcgccacaagattattttctga

SEQ ID NO: 87086 - DNA, 333 bp, Enterobacter aerogenes
atgtttggtggaaaaggcggcctgggtaacctgatgaaacaggcccagcagatgcaagacaaaatgcagaaaatgcaggaagagatcgcgcagctggaagtgaccggtgagtccggcgcgggtctggtaaaagtaaccatcaacggcgcgcataactgccgccgcgtggaaatcgacccaagcctgctggaagacgacaaagagatgctggaagatctggtggctgccgcattcaatgacgcagcgcgccgtattgaagagacccagaaagagaaaatggcctccgtttctgccggcatgcagctgccgccaggcttcaagatgccgttctga

SEQ ID NO: 87087 - DNA, 1908 bp, Enterobacter aerogenes
atgagttatcaggtcttagcccgtaaatggcgcccacaaacctttgctgacgtcgtcggccaggaacatgtgctgaccgcactggcgaacggcttatcgttagggcgcatccatcacgcatatctcttttccggcacccgcggagtagggaaaacctccatcgcccgtctgttggctaaggggttaaactgcgaaagcggtattaccgcgacgccgtgcggcgtctgcgataactgtcgcgaaatagaacaaggccgctttgtcgatctgattgagatcgatgccgcctcacgcaccaaagtggaagatacccgcgatctgctggacaacgtccagtacgcgccggcccgcggccgcttcaaggtctacctgatcgatgaagtgcatatgctgtcgcgtcacagcttcaacgcgttattgaaaacgctggaggagccgcccgcgcacgtcaaattcctgctggcgaccaccgatccgcaaaagctgccggtgacgattttgtcccgctgcctgcagttccacctcaaggcgctggatgtcgaacagatccgccatcagcttgaacacatccttggcgaagagcagatcgcgtttgagccgcgcgcgctgcaactgctgtcgcgcgccgcggatggcagcttgcgcgatgcgttaagcctgaccgatcaggcaatcgccagcggcgatggccgcttaaccgcgcagtccgtcagcgaaatgctcggcaccctcgacgacgatcaggcgctatccttgatagaagcgctggtggccgccgacggcgagcgcgtgatggcgggcgtcagcgacgccgcctcgcgcggcgttgaatgggaagcgctgctggtggaaatgcaaagtctgctgcaccgtatcgcgatggttcagctctcgccatcggcgctgggggcggatatggccgccgtcgagctacgtatgcgcgagctggcgcgtaccgtgtcgccggccgacgtgcagctttactatcagacgctgctgattggccgcaaagaactgccttatgcgccagaccggcgtatgggggttgaaatgacgctgctgcgcgcgctggctttccatccgcgtcagccgctgccggagccggaagcgaagcccatgcagaccgctgcgcctgcgccgcagcagcaaacagcgccgccggtcgcatcggctccgccgccgcagaatctgccgcaaagcaccagccaggtgctggcggcgcgcagtcggctgcagcgaaccccgggagcaaccaccccaaaaaagagtgaaccggcagccgcatcccgcgcgcggccggtgaataacgctgcgctggaacgactgagttcgattaccgagcgcgtacaggctcgtccggctgcggccgcgcttgagcaggccccggcgaagaaagaagcctatcgctggaaatcgacggccccgattgaagagacccaggtcgaggtcgccacgccgaaagcgctgaaaaaagcgctggagcatgaaaaaacgccggagctggcggcgaaactagccgtggaagcggttgagcgcgatagctgggcggcggaagtgagccagttggcggtaccgaaactggttgaacaggtggcgctgaacgcgtggaaagagcaggacggcaatcgcatatgtctgcatttacgcccgagtcagcggcatctcaactccgccggcgcacagcagaaacttgctgaagcactgggcgtgttgtacggtgcgccggttgaattgaccatcgttgaagatgataattcggcgatgcgcacgccgctggagtggcgacaggcaatttatgaagagaagctcgcgcaggcgcgcgacgcgattattgcggataacaacatccagaccctgcgacgattcttcgacgccgatctggatgaagagagtatccgccccatttga

SEQ ID NO: 87088 - DNA, 552 bp, Enterobacter aerogenes
atgaccgcaactgcacagcagcttgaatatctgaagaacagcatccaaagcgtccaggattatccgaaaccgggcatccttttccgcgatgtcaccagcttgctggaagaccctaaagcctatgcgcttagcattgaactgctgaccgagcgttataaagacgccggcatcaccaaagtggtggggaccgaagcgcgtggttttctgttcggcgccccggttgcgttggcgctgggcgttggctttgttccggttcgtaagccgcgcaagttgccgcgcgaaaccatcgccgaaagctatgagcttgaatatggcaccgatcagctggaaatccacgttgatgccattaaagaaggcgataaagtgctggtcgttgacgacctgctggcgaccggcggcaccattgacgccaccgtgaagctgattcgtcgcctgggcggcgaagttcacgatgccgcttttattatcaatctgttcgatctgggcggtgaacagcgcctggaaaaactgggcatcaattgctttagcctggtgcctttcccgggccactaa

SEQ ID NO: 87089 - DNA, 378 bp, Enterobacter aerogenes
atgccacgtattattttaatcatcattggctggctggcggtagtgctggggacgctgggcgtcttcttaccgctgttaccgacaacgccatttatcctgctcgccgcatggtgttttgcccgctcgtcgccgcgctttcaccactggctgctgtatcgctcgtggtttggcggctatcttcgccactggcagcagtaccgggcgatgccgccgggggccaagccgcgagccattatcatgattttactgacctttgccatttctctgtggctggttaagcttatgtgggtgcgcatcctgctgctggcgatcctcgcctgcctgctgatatttatgtggcgcattccggtggttgacgcaaagcaacaaaagcactga

SEQ ID NO: 87090 - DNA, 528 bp, Enterobacter aerogenes
ttgaaaacaacccggcttttacaaacgctgaaaaatcagttggctgaactggcgcttcaggtggcgccactgtccagccacgctacgttgagcccgcgtttcgaccgccagctgttccgtacccgcgacacccagatgcaggcgtatctcgacgaagcacagcataatctcgccgagctccagcatgccgttgagcatcagcatctgccccaggtcgcctggctcgccgagcggctggtggcacagattgccgccattagccgtgagacggcgacctggtcgttacgccgctgggatagcgcctcgccgacgctaaaccgctggcaacgccgccgcctgcagcaccaggagtatgagcgccgcctgctggcaatgcgcaacgatcgccaacgtcagctggcgtcggcaactacccttgccgaacagcaacggctaacgaaagaggtcgaggcctatgccgggcgcctggcccgctgtcgcgatgcgctggaaaatattgaaaacgtactggcgcgtttaacgcgctaa

SEQ ID NO: 87091 - DNA, 174 bp, Enterobacter aerogenes
atgtcgctggaaaatgcaccggacgaggtcaaactggccgtcgatttaatcatgttgttggaggaaaaccgggtcagcgcaaaaacggtgctgggagcgttggatattattaagcgtgactatgaaaacaaactgaaaaacgcccaacctgacgcgcccctgtcagaagaataa

SEQ ID NO: 87092 - DNA, 3345 bp, Enterobacter aerogenes
atgcagcatacaaatcgttggcctcatgctatttccaccattgtctttgcactggtccttatagttggcactctgagcttcagccaggttcaggctgcagatttacctgaccgttctgacattcaaagccagctcactacgctaaataagcaaaaagaactcacgccgcaggaaaaattagttcagcaggacctgacgcagactttagaaacgctcgataagattgagcgtataaagtctgaaactgtgcaactgcgtcagcaggttgaacaggcgccggcgaaaatgcgtcaggcggtagacagcctgaatgcgctgagcgatgttcctgatgatgaggtcacccgtaaaaccctgagcacgttatcgttgcgacagcttgaatccagggtgtctcaggcgctcgacgatctgcaaagcgcgcagaacgatctggcgacctacaacagccaattggtctcgctgcagacgcagccggagcgcgtgcagaacgcgatgtactccgcctcccagcagctacagcaaattcgtaaccgtctcaacggcaccgcgccgggcgaagagacgctgcgcccgactcagcaggggttgctgctggcgcagcaggccttgctgaatgcggagatcgaacagcagcgtaagagcctggaaggcaatactgtgctgcaggatacgctgcagaaacagcgcgattacgtgaccgcccacagcaaccggctggaacatcagctgcaactgttacaggaagcggtgaacagcaagcggctgaccctcaccgagaaaaccgctcaggaagcggtctcgccggaggagacctcgcggatccaaaataacccgttggtcaagcaggagcttgaagttaaccatcagcttagcgaaaagctgattcaggcgacggaaaacggcaaccagctggtgcagcgcaatatcagagtgaaaaactggctcgaccgcgcgctgcaatccgaacgcgatatcaaagagcagatttcggtattgaaaggcagcctgctgctgtcgcgtatcctctatcagcagcagcaaacattgccatcagcggatgagctgcaggatatgactaaccgcattgccgatctgcgcctggagcagtttgaagttaaccagcagcgcgatgcgttattccagagcgatgcctttgtggcaaagctggaagagggccatagcagcgaagtcacgccggaagttcacgacgccctgttggaagtcgtggacatgcgccgagaattgctcgaccagtttaacaaacagctggggaaccagctgatgatggccatcaacctgcagattaaccagcagcagttgatgagcgtctccagcaatctgaaatcgatcctgacccagcagattttctgggtgaacagcaataagccgatggattgggagtggatcaaatccttcccggaagcgctgaaagcccagttcaaatcgatgaaaatcaccgtcaactgggagaaagcctggccggcggtatttatcgcgttcctcgccgggctgccgctgctgttgattgccgggctgatccgctggcgcttgcagtggctgcgtgattaccaggctaagctggcctcccaggtaggccagttacgcaatgatactcagctaaacacgccaaaagcgatcctgatagatttaatcagagcgctgccggtggtgctgctcatcctcgccgccgggcttatcctgctgacgatgcagctgaatgtcagcaacctgctatgggcctacagtaaaaaactagcgatgttctggctggtgttcggcctgtgctggaaggtgctggaaaaagacggcgtggcggtgaagcatttcaatatgcccgcacagctcaccagccactggcggcggcagatcgtccgcgtcagcctggcgctgctgccgctgaatttctggtcggttgtttctgagctctctccgcttaatttgatggacgacgtgctggggcagtttgttatcttcgtcaacctgctgctcattgcggtgctggtgtggccgatgtgccgcgaaagctggcgtgacaaagagtcgcacagcctgcgcctgctgacggtgaccgtgctgtcgattgtgcccgtcgcgctgatggtcctcacggcgaccggttacttctataccacgctgcgtctggctggccgctggattgagaccgtctatctggtgatgatgtggaatctgctataccagaccgttctccgcggcctgagtgtggcggcgcgacgtattgcctggcgccgggcgctggcgcgtcgccagcatctggtgaaagaaggggcggaaggcgccgaaccgcaggaagagccgacgatcgcgcttgaacaggttaaccaacaaacgctgcgcatcaccatgctggtgatggtggcgttgttcgcggtgctgttctgggcgatttggtccgatctgataaccgtgttcgcctatctcgacagcattacgctctggcactacaacggcaccgaagccggcgccagcgtggtgaaaagcgtgacgatgggcagcctgctgtttgcgattgtcgcctcgatggtcgcctgggcgctgatccgcaacttgccgggcctgctggaagtgctggtgttgtcgcgtcttaatatgcgtcagggcgcttcctatgccatcacgacgatcctcaactacgcgattatcgccatcggcgcgatgacggtcttcggctccttaggcgtgtcgtgggataaactgcagtggctggccgcggcgctgtcggttggtttaggtttcggcttacaggagattttcggtaacttcgtctccggcctgatcattctcttcgaacgcccggtgcggatcggcgatacggtcactatcggtaccttctcaggcaccgtcagtaagatccgtatccgcgcgacgaccattaccgatttcgatcgcaaggaggtgattattccaaacaaggccttcgtgactgaacggctgatcaactggtcgctctccgataccatcacccgcgtggtgatccgcctgggcgtagcctacggatccgatctcgataaagtgaaagaggtgctgctgcaggcggcgcatgaacatccgaaagtgatgcaggaaccagcgccgtcggtcttctttaccaccttcggcgccagcacgctggatcatgaactgcgcctctatgtgcgtgaactgcgcgatcgcagctacgcggtggacgaacttaaccgctcgatcgatcgcctgtgccgcgaaaacaatatcgatattgccttcaaccagctggaagttcatctgcgtaacgagaagggagatgaagtgacggaagtgaagcgcgataataaaggggatgatacggcgccaggcgtcgcataa

SEQ ID NO: 87093 - DNA, 651 bp, Enterobacter aerogenes
atggcacgaaaaaccaaacaacaggcacttgaaacccggcaactgattcttgacgtcgccctgcgattgttttcgcagcaaggggtatcatctacctcgttggccgcgattgcaaaagctgctggagtgaccaggggcgctatatactggcatttcaaaaacaaatccgatctgtttaatgaaatatggagtctctctgacgccagcattagcgatctcgaagttgagtatcgggcaaaattccctaacgatccactgtcagttgttcgcgaaatactcgtctatatcctcgaagcgacggtagtagaggagcgtagacgcctgatgatggaaatcatcttccataaatgcgaatttgtcggagaaatggccgttgtccaacaagcacagcgcagtttatggcttgaaagctacgatcgtattgagcaaacattaaaagattgtatcactgctcaacaattacctgcgaatttactcactcgccgtgcggcaattctgatgcgcagttatctttccggattaatggaaaactggctctttgcaccagagagttttaaccttcatgcggaagcccgtgcttatgtcgatgcgctgattgagatgtatcagacctgcccgtcgctacgaagttcgtctgaggtcatggcctga

SEQ ID NO: 87094 - DNA, 1200 bp, Enterobacter aerogenes
atgaacaaaaacagagggttaacgcctctggcggtcgttctgatgctctcaggcagcttagcgctaacaggatgtgacgataaaccggctcaacaaggagcccagcaaatgccggaagtcggtattgtcacgctcaaatccgcacctctacaaatcaccactgaacttcctggtcgtaccaatgcttatcgtgtcgcagaagtccgtcctcaggtaagtggcattattctgaaacgtaacttcactgaaggcagcgatattcaggcgggggtgtctctttatcagatcgatccggcaacctatcaggcaagctatgaaagcgctaaaggcgacttagcgaaagcccaggccgccgcaaacatcgctcagttgacggtcaaacgttatcagaaactggttggcaccaaatacatcagccaacaagaatatgactcagccgttgccgacgctcagcaaagcaacgccgccgtcgtcgcggcgaaagccgcagttgaaaccgcgcgtatcaacctggcttataccaaagtgacgtcgccaatcagtggacgcatcggtaaatccgcggtcaccgaaggcgcgctggtgcaaaacgggcaatctaccgcgctggctaccgttcagcagctagaccctatctatgttgacgttacccaatcgagcaacgatttcctgcgtctgaaacaggaactggcgaacggtaaactgaagcaagaaaacggtaaggcgaaagtcgaactggtcaccaatgacggtctgaaatatccgcaagagggtacgctggaattctccgacgtcaccgttgaccagaccaccggttctatcacgctgcgcgctatcttcccgaacccggaccacactctgctgccagggatgtttgttcgcgcacgtctggaagaaggtattaacccggatgcgctgctggttccgcaacagggcgttacccgtaccccgcgcggcgatgccagcgtgatggtggtcggcgaaggcgacaaagttgaagtgcgtcaggtcaccgcgactcaggctatcggcgacaagtggttagtgaccgaaggtctgaaatcaggcgatcgcgtgatcgtcgctggcctgcaaaaagtcaaaccaggcgtacaggtaaaagcgcaggaagtagcttcagacaaccaacagcaaaccgccggcaacgcgaacgctcagtctgaacaaaccaagtcttaa

SEQ ID NO: 87095 - DNA, 3147 bp, Enterobacter aerogenes
atgcctaatttctttatcgatcgccccatatttgcatgggtgatcgccataatcatcatgttggcaggggggctttcgattatgaaactccccgtggcgcaatatccaacgattgcgccgccagcagtgacgatctcggccacctatccgggggctgatgcgaaaacggtgcaggacaccgtgacacaggttatcgaacagaacatgaacggtatcgataacctgatgtacatgtcctcgaacagtgactccaccggtacggtgcagatcaccctgaccttccagtccggtaccgacgcagatatcgcccaggtacaggtgcagaataagctgcagctggcgatgccgctgctgccgcaggaagtacaacaacagggcgtgagcgtggagaaatcctccagtagcttcctgatggttgtcggggttatcaacactaacggcaccatgacgcaggaggatatttccgactacgtgggcgccaatatgaaggatgccatcagccgtacctccggcgtcggcgacgttcagctgttcggttcccagtacgcgatgcgtatctggatggacccgacgaagctaaacaacttccagttaactccggtagatgtcatcaacgccattaaagcgcagaacgcccaggtcgcggcaggtcagttaggcggtacgccgccggtgaaaggccagcagttgaacgcctcgatcatcgcccaaacgcgtctgacttccgctgatgaattcagcaagattctgctgaaagtcaatcaggatggttcacaggttcgtctgcgcgacgtggcgaaagttgaactcggcggcgaaaactacgacatcatcgcaaagttcaacggccaaccggcttctggtctggggattaaactggccaccggcgctaacgccctggataccgccaacgccatccgcgcagagctggcgaagatggaaccgtacttcccgtcaggcctgaaaatcgtctacccgtacgatactaccccgttcgtgaaaatctctattcatgaagtggtaaaaacgctggtggaagcgatcatcctggtgttcctggtcatgtatctgttcctgcagaacttccgcgccacgctgatcccgaccattgcggtaccggtggtattgcttgggacattcgccatcctggcggtgtttggcttctcgataaacaccctgacgatgttcgggatggtgctggccatcggcttgctggtggatgacgccatcgtggtagtagaaaacgtcgagcgcgtaatggcggaggaaggattgccgccgaaagaagcgacccgtaagtcgatgggtcagattcagggcgcgttggtcggtattgcgatggtactgtcggcggtatttatcccgatggccttcttcggcggttcaaccggcgcgatttatcgccagttctcgatcactatcgtttccgcgatggcgctgtcggtactggtagcgctgattctgacgccagcgctgtgcgccaccatgctgaaaccgattcagaaaggcggccatggcgagcacaaaggcttcttcggctggtttaaccgcatgttcgataagagcacgcaccattacaccgacagcgtaggcaacattctgcgtagtaccggtcgttacctggtgctgtatctgattatcgtcgtcggtatggcttacctgttcgttcgtctgccaagctccttcttgccggacgaagaccagggcgtgttcctgagtatggcgcagcttccggcgggcgcgagtcaggaacgtacgcagaaagtcctcgacgagatgactgactactacctgaccaaagagaagaacaacgttgaatcggtgttcgcggttaacggttttggttttgcaggccgcggtcagaacaccggtatcgccttcgtgtcgttaaaagactggagcgaacgcccaggttcagaaaacaaagttgaagcgattaccggccgcgcgatggcccgtttctcgcagattaaagatgcgatggtcttcgcgtttaacctgccggcgatcgtcgaactgggtaccgctaccggctttgacttccagctcatcgatcagggtggtttagggcatgagaaattaactcaggcgcgtaaccagctgtttggtatggttgctcagcatcccgatctgctggttggcgtgcgtcctaacggcctggaagatacgccgcagttcaagatcgatatcgatcaggaaaaagcgcaggcgctgggcgtttcaattagcgacatcaacaccaccctcggcgcggcatggggcggcagctacgtcaacgacttcatcgaccgcggtcgcgtgaagaaagtgtacgtcatgtctgaagcgaaataccgtatgctgccagaggatatcggcaactggtatgtacgcggcagcgatggccaaatggtgccgttctccgccttctccacttcccattgggaatatggttcaccgcgtctggaacgttacaacggtctgccgtcgatggaaatcctcggtcaggcagcgccgggccgcagtacgggtgaagcgatggcgatgatggaacagctggcaagcaaactgccttcaggcgtcggttacgactggaccggtatgtcctatcaggaacgcctgtcaggcaaccaggccccggcgctgtatgctatctcgcttatcgtcgtcttcctgtgtctggcagcattgtacgagagctggtcgattccgttctccgtcatgctggtggtaccgttgggtgttgttggcgcgctgttagcggcaaccttccgcgggctgactaacgacgtttacttccaggtcggcctgctgacgaccatcggcctgtcggcgaagaacgcgatacttatcgttgaattcgccaaagacctgatggaaaaagaaggcaaaggcctgattgaagcgacgctggaagcagtacgtatgcgtctgcgtccaatcctgatgacctctctggcgtttatcctcggggtcatgccgctggttatcagctctggcgcaggttccggcgcacagaacgccgtcggtaccggcgtaatgggcgggatggtgaccgcgacggttctggctatcttcttcgtgccggtgttcttcgtggtggttcgtcgccgcttcagtaagaaaactgaagatattgagcataaccatccggttgagcatcattaa

SEQ ID NO: 87096 - DNA, 375 bp, Enterobacter aerogenes
atggacgagtactcgccaaaaagacatgatatcgcgcagctaagatttctctgcgaaacgttgtatcatgactgccttgcaaacctggaagaaagcaaccgcggctgggttaacgatcccacctcggcggtgaatcttcaattaaatgaattgatcgagcacatagcaacttacgcgcttaattataaaattaagtacgctgaggataataagctgatttctcagcttgacgaatacctggatgacacttttatgctgttcagtagctatggcataaacacaagcgatctccaaaaatggcgcaaatccggcaatcggttattccgatgctttgtgaacgccagccgggagaacccggcaagtctttcttgttag

SEQ ID NO: 87097 - DNA, 219 bp, Enterobacter aerogenes
atgtctggtaaaccattaactaaaacagactatttgatgcgtttacgccgctgtcagacaattgatacgctggagcgcgtaattgaaaagaataaatatgaactttccgacaatgaattggcggtattttactcagcagccgaccatcgtcttgctgaattgaccatgaataagctatacgacaaaatcccaacttcagtatggaaatttatccgctag

SEQ ID NO: 87098 - DNA, 564 bp, Enterobacter aerogenes
atgagcgaagaaaaaaggaaaatgatcgccggcgaaccttaccttgctggagacgccacgctaaaagcagaccgcctgcatgcccggcaggtgctgcaccgctacaaccactcagcaccggatgagcgcgaatcgcgcgccgctctgctggctgaactatttggtaagcccactgacgcgtatatcgaacccactttccgctgcgattacggctataacatcagcctcggcgccaatttttacgcgaactttgactgcgtgatgctcgatgtttgcccgatccgaattggcgataactgtatgctggcgccgggcgttcatatctataccgcgacccatccgctggacccaacggaacgcaacagcggtatcgagtatggtaaaccggtaacgatcggccacaacgtatggattggcggccgggcggtcatcaaccctggagtgaccattggcgacaatgcggttattgcctccggcgcagtggtggtgaaagacgtgccggccaatgcggtagttggcggtaatcctgcccaaatcatcaagctgctattaaccgaaaaatag

SEQ ID NO: 87099 - DNA, 465 bp, Enterobacter aerogenes
atgacagaaatacagcgcctgctaaccaataccatcgaggaactgaacgaaaaagaaaagcgcgataatcgcccgcgttttagtatcagttttattcgcaaccatccatggctatttgtcgctatgtacgccgcctttttggccactctcatcgtcatgctgcgctctgagacgctggtggattccgtgtggctgctgatcgttctgtttgttctgctgaacggctttttcttctttgacgtctacccgcgctaccgttatgaagatatcgatgtgctcgattttcgcgtctgttataacggtgaatggtataatacccgtttcgtccctgaacagctgattgacggcattctgcaatcgccacaggtcgcccatgagcagaaagctcaactgcagaaaatgatcgcgaccaaaggtgaactctccttctacgatgttttcaccctgacccgcgttgctgcctga

SEQ ID NO: 87100 - DNA, 1455 bp, Enterobacter aerogenes
atgaatattccggacgatgctttttttgccctactgacgcgcgggatacagcaacggggagacgcgacgctacagcgcgcactctatcaggcgctgcgcgaggccattttacagggcgagttactcagccatagccggttgccgggcgcgcgcgttattgcgcagcgtgctggcgtatcgcgcaataccgtaaatagcgcgctggaacagctggcgatagagggatatatgatccgcagtcgtcaggggacgtatgtggcagcgctcaatacgctggcggaaagcgagccggcgccaccaacgtttgttttgcctgagcgcttgcgcacgctaccgctgccgggtcgacgggactccccggcactgttgttgactaccggaatgcccgcggtgaactacttcccgctggctatctggcgtcgtttgctcgatcgggtactgcgcgaggatggcagcacgatccttggatacggggaggcggccggtgaaccggcgctgcgcgaggcgatagcccgtcatctgactttatcccggggcatacgctgcacggcgcggcaaattgtgatcactgaaggcgcgctggagggcgttaacctttgcacgcatctgctgagcgtcgcgggggatactgcctgggttgaagagcccggttatttcggcgcgaaaagcgtgtttattaaagccgggctacagctgaaggggatacctgttgacggtgatggcatgtgtcctgatagcgttaacgaggtagcgccgcggcttatctttacctcgccttcgcaccaatatccgagcggggcggtgatgagcgccggacgtcgtctggcattgctggaatatgcccgccagcatgacgcgtggattgtggaagatgactatgatagcgagtttcgctacagcggcgagccgattcaggcgatgctcggcatggtggcgcaggcgccggtggtttaccttggtaccttcagcaaaacgctatttccttcattaagaataggcttcgcggtgatgccgtcggcgctggccgaggcggcgcagggagcgatcggcgcgctgctgcgcggcggccatcgtctggaacagcgtgcgctggcgctgtttatcgaagagggccattatgcgcgccatctggcctcaatgcgccgattatatcgtcggcgtcagcagcaattacgcgaggctgtggtaagcgaattcacgctggcgaatgagatttggggtggagagggcgggctgcatttaacggttgctgtcgatgacattgacgatgtgcaaattgtcgagcaggcgcgtcagtatcaaatggcgccagcggcgcttagccgcttttatcttaacccgcataaggcgcgtagcggtttggttctggggtatggcaatacgtccgcggcgcatttcgtaccggcgctgcggacgttgaacaggctaatcaggcagcaacgcgggtcagggtga

SEQ ID NO: 87101 - DNA, 711 bp, Enterobacter aerogenes
atgacgcaatacaaccaattcaaccaactcgttggcgacgctttacctgactggcagccacgcccctggccgcagcgccagaccttgcaaggacagttatgccgcctggaaccgcttgacgtcaaacacgcgcaagcgctgttcaacgcctatcgacaggcacctgatacccgcgcctggacctggcttttgcgtgaaccggaaaacagcgttaccgagttcagcgcctggattgccagcatcagcgagctaaacgatccgcttcacttcgcggtaattgatgaacgcagtgggcagccggtcggatcgttagcgctgatgcgtattgacggcaaaaacggcgtcgtagaagtcggccatgttcacttttcgccgctactgagccgcaaagcaatggccaccgaggcacagtggctgctgatgcgttatgtctttgagtcgctcggctaccgccgctatgagtggaaatgcaatagtctgaatgaaccgtcgcggcgcgcggcgctgcgcttaggtttccagttcgaggggcgctttcgacaagcactggtgataaaaggccacaatcgcgataccgactggttttccattatcgatagcgagtggccacagatagatagcgcaatgcgccagtggctggccgccggtaattttgatgccaacggccagcaataccgcacgctggaaagctttcgcaaaccaacgaattaa

SEQ ID NO: 87102 - DNA, 141 bp, Enterobacter aerogenes
atgcaggtactgaactcattgcgtagcgctaaacagcgccacccggattgccagatagtgaaacgcaaagggcggctgtatgttatctgcaaaagtaacccgcgctttaaggcggtgcagggacgtaaaaaacggcgttaa

SEQ ID NO: 87103 - DNA, 261 bp, Enterobacter aerogenes
atgaaagctaatattcatccgcactaccgtaccgtcgtttttcacgatacgagcgtaaacgagtacttcaaagtgggatccactattaaaaccgagcgtgagattgaactggatggcgtaacctatccgtatgtcaccttagatgtttcgtctaaatcccatccgtattacaccggtaagcagaaaacacatgctaccgaaggcagcgccgctcgtttccgccagcgcttcggtggttttattgatgcgaaaaggagctaa

SEQ ID NO: 87104 - DNA, 1560 bp, Enterobacter aerogenes
atgacgactcgccatttaatgagtctggttacaggggtgcttattctcgccatcgtgctacccatcgccttaagtatctggctggcaatgcgccaggcgcaggcgcagttttatagcgagctcgaccactactcaaaacgcattgtcatgcgcgtagaacaagtcgccgctcaggccaaagaagcattacaagaagccgatgcgcacagcgccagtgcctgttcaccagaacatttgctgaatatgcgccgtattgcctacacccatcgctatgtgcaggaagtactctggttgcgtaattcggtgccgatgtgctcatcgcttgaggatcaccaggtctcggtgacgtttccgcagcccgaccacgtcaccgccgacggttacagcacctggcttacctcaatcaacgacctcggcctgcaacatcgcatgaccgcctttggcaacaaaaatcatattgtgatgatagacccggtgtcgtttattgatgtcatcgccaccggtcaggaaaagatccacacgatattatttggcaccgagcacgatcaggtggtgatcagtagccaaccgatcgatcccgcagtttggacgcgaattaaaaacctccatagcgagacgctaacgctgaatgacaccgtctatcgcgtgcatatcatccctgaactgggtcttggcgtcgccagttggtcgtccacgcagccactggatgcgcgccttcgccagcagctgctgctatggctgccgatagggctctttaccagcctgttgacctcttttttacttctacgcctgctgcgcagactacgctcgccgcgttatggcatgctggatgcgctgcaatccgatgccatccaggtttactatcagccgatcgtctcgctggaggatggcaaaatcgccggcgccgaagcgctggcccgctggcagcagccggatggcacttttttatcgccggatatttttatcccgctggccgagcaaaccgggctgatcacccggttgaccgaggatatcgtgcgtaaaatctttgccgacctcggcccctggctgcgccatcatccgcagatgcacatctctattaatctgtcggtggatgacctgcgctcacctacgttgccaacgctactcaaggaacaactggcgcgctggggaatcaatgcggaacagatctcccttgagcttaccgaacgcggctttgtcgatccgcaaaccactctgccggtgattattggctatcgccaggcgggacaccggatctcgatcgatgatttcggcaccggctattccagcctcagctacctgcaaacgctggatgtcgatacgctgaagatcgacaagtcatttgtcgataccctggaatataagccgctgacgccgcatatcattgagatggcgaaggcgctgaatctggcgattgtcgccgaaggagtggaaacgcccgctcagcgcgactggctgcgcgcgcatggcgtcaattacgcgcaaggctggctgtactgtaaggcgctaccgaaagaggaatttattcagtgggcggaacataatattaaaatgcattaa

SEQ ID NO: 87105 - DNA, 354 bp, Enterobacter aerogenes
atgaagtatgttgatggttttgtcgttgccgtccctgcggaaaataaggaggcataccgcgaactggcagcaaaatcggcgccgctgtttaaagagtttggcgccacgcgcgtcgtggagtgttggtcggatgatgtcccggaaggaaagctgacggatttccgcatgtcggttaaagcgcaggcggatgaggaagtggttttcagttggatcgagtacccgtctaaggagatcagggatgcggccaatgcgaaaatgatgagcgacccgcggatcaaagcgcttagcgatagcttgccctttgacggcaagcgcatgatcttcggcgggtttgcgccgattcttgacgagtaa

SEQ ID NO: 87106 - DNA, 615 bp, Enterobacter aerogenes
atggtccgtcgcttgctacaactttatattggtctggtgctctatggcgtgtcgacggcgttattcgtccatgccaacctcggggccgatccgtgggatgtgtttcatctgggggtggcgaaacaacttaatatcagtttcggtacggtgattattgcgaccggcgccgcggtgctgctgctgtggatcccgctgcgtcagatgccgggtctcggcaccattagcaatgtcatcgtgcttggccttgcggccgatgccacgctcgcggtacttccgccgctggaatcgctgcccgcgcgtagtctgctactcgccggcgcggtggtgatgaatgcgatagcaaccgggatgtatatcggcgccggttttggtcccgggccgcgtgatggcttgatgaccggattgcatgcgcgaaccggctggtctttgcgtggtatccgtaccgctatcgaagtctcggtactgctgattggctggctgctgggcggcaaagtcggggttggcaccgtggtttacgcctttgctatcggcccgctgatccagctgtttttaccctggttccgtcaaccgcgagcagtcagtacggcggcgaaaagccgggggctggcgtcctga

SEQ ID NO: 87107 - DNA, 1428 bp, Enterobacter aerogenes
atgtcagtacgtcgttttggaacacaatcgctggtacgcctgctcggcaactggcaatccccttcctcgcgcgcgccgctgtggcggcagctggcagaagcgctgcgtctgttgatccttgatggacggctggcgctggagacccgtctgcccggcgagcgagaactggcgacggcgctaaatgttagccgcaccactatcgccagcgcgctggggttattgcgagaagaaggctatctgcaaagtcgccagggaagtggttcacgcattgcgctacctgccggccctctgctccccggagagcagacgctttcggcgccatcggtcaatctcgccaccgccgccctcagcgccggaccggagattcatcaagcctacagccacgcgctgacgctgatgccgcagtatttgtcctataccgggtacgatcagcaggggttagtcgatttgcgcgcaatcattgcccgccgctatagcgaacgcggcctgccgacgcaggcggatgaagtgatgattgtgaatggcgcgctgagcggatttgccctggtactgcgtctgttaaccgggccaggcgatcgggtggtagttgacgcgccctcttacccgatggcgattaacgctattcgcggcgcctcctgccgaccgataggcgtctctttaccggaaaagggctgggactgcgacggcctggcggcgaccattgcgcaaacttcgccgcggctggcctttatgatgccggattttcataatcccaccggtcgctgcatggatagcgaaacccggcagcgcgtcgccgatctggccgccagcacgcgaacgacgctggtcgctgacgaaacaatggtcgatttatggtacaacgccccaccgccgccgccgctggcggctttcaaccctgaagcgccgataatcactattggttccgcgggtaaaacgttctggggtggactgagggttggctggatccgcgcgccagcgtcgactatcgcctcgctcatccaggcacgggatacgctcgatctcggctcgccgctgctggaacagctggcttgttgttggctactggagaacgaacaaacactgttgccgctgcggcgggcaatgctggccgcgcgtcgtgatatgtgcgctgcgttgatggcggaatattttccccgctggcgcttttgcgtccccgagggcgggctatcgttttgggtggagctgccgaagatgttggcaacgcagttttcggtgcgcgctgagaatgccggcattcatatcggtaccggtacgcgtttcggcctggagggggccttcgatcgttatttacgtttgcctttcaccctgacggatacggaattgcgcaacgccttcagcattttacaaccgctgtggcagacccttacgcaacagaaagaaatgacgcgaatgcgtaaaataatataa

SEQ ID NO: 87108 - DNA, 216 bp, Enterobacter aerogenes
atgaaacaacaattctctacagccagcagttacagtgaagcctgtgatctgcttcgttccgggtacgttaagcacgtgcgcctgaactggaatatcggtagtgatgagttttttcgcattgcttccgactggtgtgaaaccggcgcaaaaattaaaaaagatgacgatggctttattatttcgctaaaaggttttcctattccgcgccagcattaa

SEQ ID NO: 87109 - DNA, 258 bp, Enterobacter aerogenes
atgaccacagtagttctgaatgtgaaaattgacgcagagttaaaagataaactgcgtcattatgcggaagtgaataacgagaatttaggcacggcaacggagaagctgctgcaattggcgctggcggccattgattcagcagacgaggcgggggtttcgcatgaggatattgataaccagcataccgaagaggaagcgtcgccgttaacccctaaagaaatcaaagcattacgtaaacttctgaagaagaaaagatga

SEQ ID NO: 87110 - DNA, 363 bp, Enterobacter aerogenes
atgcccgccattgatggcgtaaccgtaccctttcacggcatgaattttctacgccccgagctgctgctggatttcgtcagcgtcagtcccgcgccgttgttatcggtgacccccgttgccctgctcttttccacggtgggcgtattgcaacacgtcgagctgcgtaagctgcccgttgaggttaaaggccgggtggtttatcccatttcatcgctcaaatacccgacgctgcgcggcaaactgattatcaatgcgcaatcgcagcggctgaagtttcttgaaagcctgattgccaacagcccgcatgacaatattcatggtatgcagatcctcgggctggcgctggaattcaccgtcctttga

SEQ ID NO: 87111 - DNA, 315 bp, Enterobacter aerogenes
atggaggacgtccacgacagctttccccagcgggtctggcagatagtcgcctcaattccggaagggtatgtcaccacctacggcgatgtcgctctgttggcgggctcgccgcgcgcggcgcgtcaggtgggcggcgtgttaaagcgcctaccggaaggctcaacgctgccatggcaccgggtggtgaatcgccacggcgatatttcgctgaccggccctgacctacagcgccagcgtcaggcgctgctggcggaaggcgtccaggtctccggcagcggtcatatcgacctgcaacactatcgctgggtttattaa

SEQ ID NO: 87112 - DNA, 513 bp, Enterobacter aerogenes
atgaaatttgcctatatgttaagtgctatcgccgttgctgcggccttatccgcctgtgcgaataacccgaacagcaacgccgctcatcagacgacggcacccgatccttacggcattgcctcactgagctcctcgcagcaacagcctaatgtttccgggactatcaatattcgccaacgcgtagcgttaccgccggatgcggtactgaccgtgacgttgtccgatgcgtcgcttgccgatgcgccagcgcgtgtattgtcgcaaaaagcggtccgtactgaaggtaagcaggcgccgttcaactttgtgctgccttacaaccaggcggatatcaaaccgaacgcgcggatcctgctgagttcggcgattaccgtaaatggccagttgatgtttatcaccgataccgtgcagaccgtggtaacccagggcggtaatcgcgccgatctggtgctggtgccggtgcagcatgcgccagtgccggtggctaatgatatggcgccgatggcgcaataa

SEQ ID NO: 87113 - DNA, 864 bp, Enterobacter aerogenes
atgagtcaggctctaaccaatctgctggcattattaaatctggaaaaaattgaagaagggctgtttcgcgggcagagcgaagacctcggcttacgtcaggtcttcggcggccaggtggtcggtcaggcgctgtatgccgccaaagaaaccgtgcctgaggaacgcttgattcactcctttcatagttacttcctgcgtcccggcgatagccaaaaacccatcgtttacgatgttgaagtgctgcgcgacggcaatagcttcagcgctcgccgggtggcggctatccagcacggtaaacccatcttttacatgaccgcctcgttccaggccccggaaccgggctacgaacatcaaaaagcaatgccggcagccccgtcaccggaaggcctgccctctgaaaccgatatcgcccgtaaactggcgcatctgctgccgccgcaggcgaaagagaagttcctcagcgataaaccgctggaaattcgcccggtggagttccataacccgctgaaaggccacgttgccgaacccacccgccaggtgtggatccgcgccaacggcgtagtgccggatgatattcgcgtccaccagtcgctgctgggctacgcatctgattttaatttcctgccggtagcgctacagccgcacggcgtcggcttccttgagccgggtatgcaggttgccaccatcgaccactcaatgtggttccaccgcccgttcaacatcaacgaatggctgctatacagcgtcgaaagcacttcagcctccagcgcccgtggctttgttcgcggcgaattctatacccaggacggtattctggtcgcctcgacggtgcaggaaggcgtcatgcgtaaccgcaataactaa

SEQ ID NO: 87114 - DNA, 891 bp, Enterobacter aerogenes
atggattatcgacagctacaggcatttacggttctggcggaagagttgcactttggtcgggcggcgcagcgtctgcatatcacgcaaccggcgctgacgcagcagattaaaagttttgagaacgcgctggaattgcggctatttacccgcgatcgacgcaacgtcgcgctgaccgccgaagggcaatttttgctggccgaggcgcggatgatcctcggccactgcgataaatttcgcgagaatgcgcgcagtttgcggcaggggcgcaaagggcagttgaaaattggctacgttggctcggctattttcgacccggcgttgagcgtgttaataggaaattatcgtcaacgtaaacccgaagccgatctgctgattgaagagcataacgttaacgacctgataaccgggctattaagcgaaacggtcgacctggcgtttattcgctcgccaggggcgcaatatgatgaactggagtcgctggatattgcgacccggccgctggtggcggtggtacctcgccatcatccgctcgccagccggcgcgctattccactcgcggcgctggcggaagagacgttttttattcagcaagatccgtgcggcgtcggactgggttggtcagccatcagcgcctgtcggcaggcgggttttacgccccgtaagattcagtactcgcgtgatgtctccacggcgataggccaggtatcgatgggaatgggcgtgacgttggtgcccgagacgcaaagcgccatgttggtgtcggaggtcagctattgcctgctggaagagacttttgccgtgacgacgcttacgctgtgctggcggcgggagagtcgcaatgggctattgggtgattttattgccggtgcgcgcgaactgcttggccgttaa

SEQ ID NO: 87115 - DNA, 1488 bp, Enterobacter aerogenes
atgtctgaaccacaaatgaaagtaaccgatctgcgttctgctttggcggtattaagccagtacgatgatgaactgatctacaccgacgaacccgttgaccccatcgccgagctctccggcgtgtaccgctatgtcggcgcccacggcaccgttcagcgcccgacccgcgttggcccggcgatgatctttaataaggtcaaaggctacgatgatgtcagagtgcttattggcctgctgtgttcacgccagcgcgtcgcccgcctgtttggcaccacgccggaaaacctggcgtttatgctcaaagactccgtggcgaatcctatcgcgccaatcaccatcccgcgcgaccaggcggcctgccaggaggtggtacatctggcaagcgatcctgatttcgatattctcaaaattttgcctgcgccgactaacaccccggaagacgcgggtccctactttaccctcggcatgtgctatgccgcggatccggaaaccggcgatcatgatgccaccatccaccgcctgtgcgtacagagcaaagacgaaatctcgatgtatttcgtaccgggacgtcatctcgatactttccggcaaaaagccgaggcggccgggaaagcgttgcctatctcgattagcatcggcgtggatccggcgattgaaattggcgcctgctttgagccgccgaccacccctctcgggtttgatgaactctccatcgccggcgctctacgtaatcaggccgtcgagctcagcgaatgcgtgagcgtcaacgcccgcgccatcgccaacgccgaaatcgttattgaaggtgaacttctgccgggcgtgcgggtacgcgaagatcagaataccaacagcgggaaagccatgccggagttccccggctacaccggtagcgctcaggcggaagtgccggtgatcaaagtcaaagcaattacccaccgccgtcacccgattctgcaaacctgtatcgggccgagcgatgaacataccaatcttgccgggatcccgaccgaagccagcattctgcaaatggtagagcgcgcgcttccaggctttgtgcaaaacgtccactgtccttcgccaggcaccggtaaatatctcgccgtgctgcaggtgaagaaacgcacccccagcgatgagggccgtcagcgtcaggccgcgctactggcgttttccgccttctcggagctaaagcacgtaatgctggtcgatgaagacgtcgacgttttcgacatcaacgacgtcatgtgggcgatgaccacccgctatcagggcgatgtcagcaccgtgtttattcccggcgtacgttgccatccgctggatccatcatccgacccggccttcagcccatcgattcgcgatagcggtattgcctgcaaaaccattttcgactgcaccgtcccgtggaatatgaaagcccacttccagcgcagccagtttatggaagtggatgttgaccgctttattcctggcttcagtaagaaataa

SEQ ID NO: 87116 - DNA, 1290 bp, Enterobacter aerogenes
atgatgagaacgacgatgaaaacggctctgggagcgctggcgctgcttccgggactggcgctggcggccgaacaggcggtggcggataaagccgacaacgcctttatgatgatttgcaccgcgctggtgctgtttatgacaatccccggcattgcgttgttctacggcggcctgattcgcggtaaaaacgtgctctcaatgctcactcaggtcattgtgacttttggcctggtttgcgtgctgtgggttatctatggctatacgcttgccttcggtagcggcggtagcttcttcggcagcttcgactgggtgatgctgaagaatattgaactgaaagcgttgatgggctcgttctatcaatatatccacgtcgctttccagggctctttcgcctgtatcaccgtgggcttgatcgtcggtgcgctggcggaacgtattcgtttctccgcggtactgatttttgtggtggtttggctcacgctctcctacgtgccgattgcgcatatggtgtggggcggcggcctgctggcgacccatggtgcgctggacttcgccggcggtaccgtcgtacacattaacgctgcggtagcggggctggtgggcgcctatatgatgggcaaacgcgtgggctttggcaaagaagcgtttaaaccgcataacctgccgatggtcttcaccggtacagcgattctgtatgtcggctggttcggctttaatgctggttccgcaagcgcggccaacgaaattgccgccctggccttcgttaataccgtcgtggcgaccgctggcgcgattctggcctggaccttcggcgaatgggccacccgcggcaaaccgtcgctgctgggcgcctgctccggcgcgattgccggtctggtcggcattactccggcttgcggttatgttggcgttggcggctcgctgattatcggtatcatcgccggcctggccgggctgtggggcgtcacggtgctgaagcgctggctgcgcgtcgatgacccatgcgatgtgtttggcgttcacggcgtgtgcggcatcatcggttgtatcctgactggcatcttcgcttccactacccttggcggcgtcggctatgcggaaggcgtcacgatggggcatcagttgctggtacagctggaaagtatcggcattaccgtggtctggtccgccgtcgtcgcctggatcggcttcaaagtggcggcgatgaccgtcggcctgcgggttccggaagagcaggagcgcgaagggctggacgtcaacagccacggcgaaaacgcctacaacgcctga

SEQ ID NO: 87117 - DNA, 339 bp, Enterobacter aerogenes
atgaagctggttaccgtggtaatcaaaccattcaaactggaagacgttcgcgaagcgttgtcctccatcggcattcagggcctgacggtcacggaagtgaaaggcttcggccgccagaaaggccacgccgagctctatcgcggcgccgaatacagcgtcaatttcctgccaaaagtaaaaattgatattgcgattgccgacgatcagctggatgaggttgtcgaggtgataggcaaggccgcctggaccggaaaaattggcgacggcaaaatttttgtcgccgaactgcagcgcgtgattcgtattcgtaccggcgaatccgacgaagcggcactgtaa

SEQ ID NO: 87118 - DNA, 1779 bp, Enterobacter aerogenes
atgcgtaatttcgccgatctctggccgaccctgaaacgtctgctggcctacggttcgccgtggcgtaagccgcttatcattgccgttatcatgatgtggatagcagcggcggcggaagtcagcggcccgctgctgataagctatttcattgataacatggtggcgaaacagtcgctaccggtgaagctggtctgcggcctggcggcggcttatatcttcctgcagatccttgccgctacgttgcactataaccaggcgctgctgtttaaccgggcggcggtcggcgtggtgcagcagttgcgcagcgatgtgatggacgccgcgctgcgtcagccgttaagcgagtttgatacgcaacctgtcggccagttgatatcacgcgttaccaacgataccgaagtgatccgcgacctgtacgtgacagtcgtggcgacggtgctgcgtagcgcggcgctgattggcgcgatgctggtggcgatgtttagtctcgactggcgaatggcgctggtggcggtggctatcttcccggcggtgctgatcgtgatggctatctatcagcgttacagcacgccgatcgtgcgtcgcatgcgcgcctggcttgccgatatcaatgatggcttcaacgaagtcatcaacggcatgggtgttattcagcaattccgccagcaggcgcgattcggcgagcgaatgcgtgaagccagctatggccactatctggcgcgtatgcagacattgcgtctggatggtttcctgctgcgcccgctgttaagcctgttttcatcgctgatcctctgcggcctgctgatgctgtttggctttagcgcttccggaagtatcgaagtcggggtgttatatgcctttattagctatctcgggcggcttaacgaaccgctgatcgaacttaccacccagcagtcgatgctgcagcaagcggtggtggcgggcgagcgcgtgtttgagctgatggatcgcccacgccagagctggggtaacgataacgcgccgttacgcagcggcgcggtggcgattgataacgtctcttttgcctatcgcgacgatcggctggtgctgcaggatatcaatctggatattccttcgcgcggttttgtggcgctggttggccataccggtagcggcaagagcacgctggccagcctgatgatgggctactatccgttgaccaaaggcgaaattcgtcttgatggccgcccgctgtcgtcgttaagccacagcgctttacgtcggggcgtcgcgatggtgcaacaggatccggtggtattagccgataccttctatgccaacgtgacgctgggctgcgatatcagcgagcagcaggtctgggaagcgctggaagcggtgcagctcgctgaccttgcccgtgaaatgagcgacgggatttatacccaactgggtgagcagggcaacaacctgtcggtgggccagaaacagctgctggcgctggctcgcgtgctggtggaaacgccacaggtgctgatcctcgatgaagcgacagcgaatatcgactccggtaccgagcaggctatccagcaggcgctggcgaaagtgcgcgagcacaccacgctggtagtcatcgcccaccgtctgtcgaccatcgtcgaagcggatacgatcctggtgctgcatcgtggccaggccgtcgagcgtgggaaccatcagcaattgctggcggcgaagggccgctactggcagatgtaccagctacagcttgctggcgaagagctagccgccagcgttgaggaggagtcgctgagcgcctga

SEQ ID NO: 87119 - DNA, 1770 bp, Enterobacter aerogenes
ttgcgattatttgctcaacttagctggtactttcgccgggagtggcgccgctatctcggcgccgtcgctctgcttgccgttattgccgtactccagctaatcccgccgaaagtagtggggattgtggtcgatggcgtgactaaagaacattacactgcagagcaggtgtggatgtggatcggcgcgctggtggttatcgcggtgatgatttatctgctgcgctatgtctggcgcgtgctgctcttcggcgcctcttatcaactggccgttgaactgcgtgaagacttctaccgtcagctcagccgccagcatccggccttctatctgcgtcaccgtaccggcgatcttattgcccgcgcgaccaacgatgttgaccgcgtcgtcttcgccgccggcgagggtgtcctgacgctggtggattcattggtgatgggctgtgcggtactgattgtgatgtcgacgcaaatcagctggcagttaacgctgctggcgctggtgccgatgccgtttatggcgctggcgatcaagcgtaatggcgatgccctgcatgagcgtttccgcgtggcgcaggcggctttttccagcctcaacgatcgcacacaggaaagcctgaccagcatacggatgattaaagcgttcggccttgaggatcgccagtcggcgcagtttgccgccgatgcggcggataccggggcgaagaacatgcgggttgcgcgtatcgatgcccgtttcgacccgacaatctatattgccattggcgcggccaacctgctggcaatcggcggcggcagctggctggtgttgcagggcgagctgacccttggtcagttaaccagttttgtcatgtatctcggcctgatgatttggccaatgctggcgctggcgtggatgtttaacatcgttgagcgcggtagcgccgcctatggacgtattcgttcgatgctggaagaagcgccggtggtcaacgatggtagcgaaacggtgccggaggggcgcggggcacttaacgtggcggtgcgcgaatttatctatccgcaggcgacgaaaccgtcgctggagaaggttaacttcaccctgcagccggggcaaatgctcggtatctgcggcccgacgggagccgggaaaagcaccatactttcccttattcagcgccattttgatgttaccgagggggatatccgtttccatgatattccgctgtctcgcctgcagcttgatagctggcgcgggcggctggcggtggtcaatcaaaccccattcctgttctccgataccgtggccaataacattgccttgggtaaaccggacgcgacccgggaacaaatcgaacatgtcgcacggctggccagcgttcatgatgatattctgcgcctgccgcagggctatgaaacggaagtcggcgagcgcggcgtcatgctctcaggcggtcagaaacaacgtatttctattgcccgagcgctgctgctggaggcggaaatcctgatccttgatgacgcgctgtcggcggttgatggacggacggagcatgatattttgcataacctgcggcagtggggagaagggcggacggtgattatcagcgcccaccgcctttcagcattaaccgaagccagtgaaattttggttctgcaacacggccatattgcccagcgcggacgccatgagcagcttgccgcccagtctgggtggtatcgcgacatgtaccgctatcagcaactggaagcggcgctcgacgatgcgccgcaggatgaggaggcgatagatgcgtaa

SEQ ID NO: 87120 - DNA, 459 bp, Enterobacter aerogenes
atgctagataaaattgaccgtaagctgctctcattgctgcaaactgactgcaccctctctttgcaggcgctggcggatgccgttaatctgaccaccacgccctgctggaaacggctcaagcgtcttgaggacgaaggcatcctgcgcgagcgcgtggccatcctggatgcggaaaaactggggctcgggttaaccgcctttgtgttgataaaaacccagcaccacagcagtgactggtactgccgctttgtcagcgaagtgtcgcaaatggcggaagtgctgggtttctggcgtatggccggcgagtacgattacctgctacgggtgcaggtcgcggatatgaagcgctatgacgacttttataaacgtctggtgaacagcgtgccggggctgtcggatgtcacttcgagttttgccatggaacagataaaatacaccacggccttacctattgattaa

SEQ ID NO: 87121 - DNA, 1053 bp, Enterobacter aerogenes
atgaacagcgcctgggtaaaacatgccattagtgaaattaacgccgactatcagcgttccgccgatacgcacctgatccgcctggcgttgcctggttttccggggatccctatttatctgaaagatgagagtacgcatccaaccggtagcctcaagcaccgactggcgcgctcgctgtttctctatggcctgtgcaacggatggatcaaagaaggcaccacgattatcgaatcgtcttcgggttcgacggcggtctcagaagcctattttgctcgcctgctgggcctgccgtttattgccgtgatgccctcctgcacggcgaagcgtaaaatcgaacagattgatttttatggcggacgctgtcatttcgtcgacaacgcctgcgaaatctacgccgcttctgaaatgctggcgcgcgagttgaatggccactatatggatcagttcaccttcgccgagcgcgccaccgactggcgcggcaataacaatatcgccgacagcattttccgccagatgacccatgagccgtatccgcagccgtcgtggatcgtcatgagcgccggtaccggcggtacttctgcaaccattggccgctatattcgctgccagggttacgagacgcaactgatggtcgtcgacccgcagaattcggtgttcctcgattactggcaaagccgcgacgccagcctgcgcagcccggtcggcagcaagatcgaagggattggccgtccgcgcgtcgagccatcgttcattcctgacgtcgtcgatgagatgctgcgcgttccggatgccgccagcgtcgctaccgccctgtggctggaaaagcagcttggaagaaaagtcggcgcctccaccggtaccaatatgtggggcgtgctgcaactggccacgcgcatgcgcgatgaaggacgccagggttccatcgtcaccctgttgtgcgacagtggcgaacgttatctcgaaagctattacaacccgcagtgggtcgcggcaaatatcggcgatattagcccgtggcagacgcagattatgcaactgagcggcgcacaataa

SEQ ID NO: 87122 - DNA, 819 bp, Enterobacter aerogenes
atggcaaaactggcggcatttgatatggacggcaccctgttgatgccggaccatcgtctcggagaacagactctgacggcgctgagacggctgcgtgaacgcgatatcgccctgacctttgccactggtcgccatgctctggaaatgcaccatgtgatcggcgagttttcccttgatgcttttctgattaccggtaacggcacgcgcatccattcactggaaggtgaagagctgtatcgccaggatctgaatccggaagtggcggaagaggtgctgcacagcgtgtgggatactcaggcgagtatgcacgttttcaatgatggcggctggtttaccggccaggcaaggccggaactgctccgggctcacgccttcagcggctttcattatcaactgcgcgatccgaaacggatgccggcgcatcacgtcaccaagatctgtttctgcggcgatcatgacgatctgcgccctctgcggatccagctaaatgacgtgctaggcgatcgcgcgtttctttgtttctcggcgatggattgcctggaggtgctgccggtcggctgtaataaaggggctgcgctggcggtgctgagccagcacttaggtttcactttgcaggactgcatggccttcggcgatgcaatgaacgatcgcgagatgcttggtagcgtagggcgagggttcattatgggcaacgcgatgccgcagctcaaagctgaactgccgcatctaccgatcatcggagactgccgtcatcaggctgtttctcattttttaacacattggctggataatcctgatcttccttattcccccgaatag

SEQ ID NO: 87123 - DNA, 1701 bp, Enterobacter aerogenes
atgagattattaaatcgtttaaatcagtaccagcgcctttggcagccgtcgtccggcgctccgcagcaggtgaccgttggcgagctggctgaacgctgcttttgtagcgagcgccatatccgtacgctgttgcgccaggctcaggaggccggctggttaagctggcaggccagctccgggcgcggcaagcgcggaatgctctgtttttacaaaaccccggaaagtttgcgtaacgagatgatggaacaggcgctgaataagggtcagcaacaaaacgcgctggagctggcgcagctggcgccggttgagctgaaagcgttgttgcaccccttcctcggcggccagtggcaaaacaataccccgaccctgcgtattccttactatcgtccgctggaaccgctgcgccccggttttcttcccgggcgcgcagaacaacatttggccgggcagatctattccggcctgacgcgtttcgacgatagcgacaatacgccggtgggcgatctggcacaccactggcaggtatcacccgatgggctgcgctggcacttttatatccgctctaccctgtgttggcataacggcgataccgtgaaaacctcacagctgcagcaaagactactgttgctcctggaactcccggctctccgcaccctctttgccagcatcagccgtatcgatgtcacccacgcccaatgtttgacgattacgctgcatcgcccggactactggctaccgttccgtttagccagctattgcagcgtgctggcgcatcctgatgatccggcgctcggtagcggtccgttccgaataaagctttttggcccggatctggtccggctggagaaccatccccgctaccatttacagcatccgctgatccaggcggtagaatattggatcacgccgcagctattcgaaagcgatctcggcaccagctgtcgccatccggtacagatcaccatcggcgatcccgaagagctcaataatttgcgccaggtgagcaacagcatcagcctcggtttctgctatttgaccctgcgtcagagtccacgtctcagtaaagcgcaggcccagcggctgatttcgattatccaccgctcgtcgttgctggaaacgctaccgctggacgaagatctgatcacgccgagccatgaggtactgcccggctggtccattcctcagggcccggaaaaccatgaggtgccgctgcctcgccagcttaccctgctctatcatttgccggtcgaattacacactatggctgagcagctgaaacggcgcctcgcctctctcggctgcgaactgacgctcatttttcacgacgccaaaaattgggacggctgccgatatctggcacaggccgatatgatgatgggcgatcgcctgattggcgaagcgccggaatatacccttgaacagtggctacgctgcgacacgctatggcctaatttgctgaccggggcgcaatatgcgcatctgcaggcaacattagatgccgtgcaggcgcagcccgaagcgcgtagccgcaacgatgccctgcgcaacgtcttcaatacgctgatggatgacgccatcatgacgccgttattcaaatacaattaccgcatcagcgcaccgccgggtgttaacggcctgcgccttaatgccagagggtggttcgactttgccagcgcctggctaccggcatcatcggcgtga

SEQ ID NO: 87124 - DNA, 711 bp, Enterobacter aerogenes
atgaaacgcgccgtagttgtcttcagcggaggacaagactcaacaacctgcctggtgcaggcactggaacagtatgatgaagtgcattgcgtcacttttgattatggtcaacgccaccgcgccgagattgacgtagctcgcgagctggcgctaaaactgggcgcggtggcgcacaaagtgctggacgttacgctgcttaacgaactggcggtgagcagcctgacccgcgatagcattccggtaccggattacgagccggatgccgatggtattccgaataccttcgttcctggtcgcaatattctgtttttaaccctgacggcgatctacgcctatcaggttaaggccgaagcaattattaccggcgtttgcgagaccgacttctccggttacccggactgccgcgacgaatttgttaaagcgctgcaccacgcggttagccttggtatggcgaaagacattcgctttgaaacgccgctgatgtggctcaacaaagccgagacctgggcgctggccgattattggggccagttggatctggttcgccgcgaaacgctcacctgctataacggcatcaagggcgacggctgcggccagtgtgcggcctgcaacctgcgcgccaacggcttgaatcagtatctgggcgataaggccggcgtgatggcgcaaatgaagcaaaaaaccgggctgggccaggggcacgaagcttaa

SEQ ID NO: 87125 - DNA, 402 bp, Enterobacter aerogenes
atgcagactcaaattaaagttcgcggttatcacctggatgtttaccagcacgttaacaatgctcgttatctggagtttctcgaagaggcgcgctgggatgggctggagagtagtccggcgtttcactggatgaccagccataacatcgcttttgtggtggtcaatatcaatattaattatcgtcgcccggcggtacttggcgacgtgctcaccgtgaccagtaagcttgagcagttgaacggcaaaagcggcacccttagtcaggttgtgacccttaaccctaacggtgaagtggtggccgatgcgctgattacctttgtctgcattgatttgaaaacgcagaaggcgcagccgctggaaggggagttgtgcgaaaagctcgaccagatgaatttacgctaa

SEQ ID NO: 87126 - DNA, 366 bp, Enterobacter aerogenes
atgaacagaggaatgaaaatggttattgtcgccgtgttgctggcttgtgcggcgggttctcagggggcgctggcggcatcggcgagcggcaaggcggcatcggcaaaagaaactattcaggcgccgcagacgaaaatgccggaggaggtcaaaacggcggatacccacggcacgcaggttagcatcaataatgccagcgcggaggagttagcacaggctatgaacggcgttgggctcaagaaagcgcaggcaatcgtcagctaccgcgaagaatatgggccgtttaagactctcgacgatcttaaacaggtccctgggatgggcagttcactggtagagagaaatctgtcacatctgacgctgtaa

SEQ ID NO: 87127 - DNA, 1875 bp, Enterobacter aerogenes
atgatggacaacctacgcacggccgccaacagcgtcgtgctcaagattattttcggtatcattatcgtctcgttcattttgaccggggtgagtggttacctgattggcggcggcaacaactatgccgcaaaagtgaatggtcaggagattggccgcgcgcagtttgaaaatgccgttgccagcgagcgtaaccgcatgcagcagcagctaggcgatcagttctccgagctggcggccaacgaaaactacatgaagaccatgcgtcagcaggtgctgaaccgtctgatcgatgaatcgctgctggatcagtatgcccgtgaactgggcctgagcatcagcgacgaccaggtgaaacaggccatcttccagacccaggccttccagtcgaacggcaagtttgataacgagcgcttcagcggcatcgtgaatcaaatgggcatgaccaccgatcaatacgcgcaagcgctgcgtaaccaactgacgacgcaacagctgatcaatgcggtagccggtaccgatttcatgctgccgggcgagtccgaccaactggcggcgctggtatcccaacagcgcgtggttcgtgaagcgactatcgacgttaacgcgctggcggcgaaacagaccgttagtgatgaagagattaacgccttctggcagcagaaccaggcccgttttatggcgccagagcagttccgcgtgagctacatcaagatggatgccgccagcatgcaggaaaacgcctctgacgaagaaatccagtcatggtatgaccagcataaagatcagttcactcagccgcagcgtaatcgctacagcgtgattcagactaaaactgaagctgatgcgaaagcggtgctcgccgaactgcaaaaaggcgccgatttcgccacgctggcaaaagagaaatctaccgacatcatctctgcgcgtaacggcggcgatatgggctggatggaagaggcctctaccgtgcctgagctcaaagatgccggcctgaaagacaaaggtcagctttccggagtgatcaaatcttccgtaggcttcctggtggcgcgccttgacgatgttcagccggcgcaggtaaaaccgctggccgatgtgcgtaacgacatcgcggctaaagtgaaacaggaaaaagcgctggacgcgtactacgcgctacagcagaaggttagcgatgcagccagcaatgataacgaatccctggcgggcgcggcgcaggttgccggcctgaaagtggttgagaccggctggttcggccgtgacaacctgccggaggagctgaacttcaagccggttgccgatgctatctttaatggcggtctggtgggtgaaaacggcgcgccgggtagtaactccgatatcattaccgttgacggcgatcgcgcctttgttctgcgcattagcgagcacaaagcggaaagcgttaagccgctggcggaagtgaaagcgcaggtgactgatatcgtgaagcgcaataaagcggaacagcaggcgaaactggatgctgacaaactgttagccgccctgaaagcgggcaaaggtgatgaagcgatgaaagccgcagggctgagcttcggtgcagcgcagacgctgtcccgtaccggccaggatccactgagtcaggctgcattctctttgccgctgccgcagaaagataaagccagctacggcgtaggcagcgatgctaaaggcaacgtagtattgctggcgctggatgaagtaaaagcgggcgctatgccagaagagcagaagaaagcgatggtgcagggtattacccagaataatgcgcaaatcgcattcgaagcgttgatgagcaatctgcgtaaagaagccaaaatcaagctcggcgatatcatcgaccagcagcaataa

SEQ ID NO: 87128 - DNA, 273 bp, Enterobacter aerogenes
gtgaataaatctcaactgattgacaaaattgctgcgggtgcggacatttctaaagctgcagctggacgtgcgttagatgctttgatcgcttctgttactgaatctctgcaagctggggatgatgttgcgctggtagggttcggtacttttgctgttaaagagcgtgctgcccgtactggtcgcaacccacaaacaggtaaagaaattaccattgctgccgctaaagtaccgggcttccgtgcaggtaaagcgctgaaagacgcggtaaactaa

SEQ ID NO: 87129 - DNA, 2355 bp, Enterobacter aerogenes
atgaatcctgagcgttctgaacgcattgaaatccccgtattgccgttgcgcgatgtggtggtttatccgcacatggtcatacccctgtttgtagggcgggaaaaatctatccgttgtctggaagcggccatggaccatgataaaaaaatcatgctggtcgcgcagaaagaagcgtcgacggatgagccgggtgtaaacgatcttttcaccgtcgggaccgtggcgtcaattttgcaaatgctgaagctgccggacggcactgtgaaagtgctggtggaaggcttacagcgtgcgcgtattactgcgctgtctgataacggcgagcacttctccgccaaagcagagtaccttgcttctccggtcattgaagagcgggagcaggaagtgctggtgcgtacggctatcagccagtttgaaggctacatcaagctgaacaaaaaaatcccaccggaagtgctgacgtcgctgaatagcatcgacgatcccgcgcgtctggcggataccatcgctgcgcatatgccgcttaagctggcggacaaacagtccgtgctggagatgtccgacgtgaacgagcgtctggaatatctgatggcgatgatggaatctgaaatcgatctgctgcaggttgagaaacgcattcgcaaccgcgtgaaaaagcagatggaaaaatctcagcgtgagtactatctgaatgagcaaatgaaagccatccagaaagagctcggcgagatggatgacgccccggacgaaaacgaagcgctgaagcgtaagatcgacgcggcgaagatgccgaaagaggcgaaagaaaaaaccgaagcggaactgcaaaagctgaagatgatgtccccgatgtcggcggaagccaccgtcgtgcgcggctacatcgactggatggtgcaggtgccgtggaatgcccgcagcaaggtcaaaaaagatctgcgtcaggcgcaagagatcctcgataccgatcattatggtctggagcgagtcaaggaccgcatccttgagtatcttgcggtgcagagtcgcgttaacaagctgaaagggccgatcctgtgcctggtagggccgccgggggtgggtaaaacctcgctgggtcaatctattgccaaagccaccgggcgtaagtacgtgcgcatggcgttgggcggcgtgcgtgatgaagcggaaatccgtggtcaccgccgtacctatattggctcgatgccggggaaactgatccagaaaatggcgaaagtgggggtgaaaaacccgctgttcctgctggatgagatcgacaaaatgtcctccgacatgcgcggcgacccggcttcagcattgctggaggtattggatccggaacagaacgtggcctttaacgaccactatctggaagtggactacgatctcagcgacgtgatgttcgtggcgacctccaactccatgaatattccggctccgcttctggaccgtatggaagtgattcgtctctccggttataccgaagatgaaaaactgaacattgctaagcgccacctgctgccgaagcagatcgaacgcaacgcgctgaaaaagggcgagctgacggtcgacgatagcgccattatcggcattattcgttactacacccgtgaagcaggcgtacgtagcctggagcgtgaaatctccaagctgtgccgtaaagccgttaaacagctgcttctggataagtcgctgaaacacatcgagattaacggtgaaaacctgcacgattatcttggcgtgcagcgctttgactacggccgcgcggatagcgaaaaccgcgtaggtcaggtgaccggtctggcgtggacggaagtgggcggcgatctgctgaccatcgaaaccgcctgcgttccgggcaaaggcaagttaacctacaccggttcacttggcgaagtcatgcaggagtcgattcaggcagcgctgaccgtggtacgcgcgcgtgctgagaagcttggtatcaatccggacttctacgaaaaacgcgatattcacgtgcacgtaccggaaggggcaacgccaaaagatggtccgagcgccggtacggcgatgtgcaccgcgttggtttcctgcctgaccggtaacccggtacgcgccgatgtggcgatgacaggggaaatcaccctgcgcggccaggtgctgccaatcggcggtctgaaggaaaaactgctggcggcgcatcgtggggggattaagactgttctgattccttacgaaaacaagcgtgaccttgaagaaattccggaaaacgttatcgccgatttggatattcatccggtacagcgaatcgaggaagttctgacacttgccctgcaaaatgaaccgtttggcatgcaggttgtaagcgcaaaatag

SEQ ID NO: 87130 - DNA, 1275 bp, Enterobacter aerogenes
atgacagataaacgcaaagatggttcgggcaaactgttgtactgctctttttgcggcaaaagccagcatgaagtgcgtaagctgatcgccgggccatccgtgtatatctgcgacgaatgcgttgatttatgtaacgacatcattcgcgaagagattaaagaagtcgctccgcaccgcgagcgcagcgcgctgccgacgccgcacgaaattcgccaccatctggacgattatgttatcggtcaggaacaggcgaaaaaagtgctggcagtggcggtatacaatcactacaaacgtctgcgcaacggcgacaccagcaatggcgtggaactgggtaaaagcaacattctgctgatcgggccgaccggttccggtaaaacgctgttggctgaaacgctggcgcgtctgttggatgttccgtttaccatggccgatgccaccaccctgaccgaagcgggttacgtgggcgaagacgtggaaaacatcatccagaagctgctgcagaaatgcgattacgatgtgcagaaagcgcagcgcggcatcgtgtacatcgatgagatcgacaaaatttcccgtaaatcagataacccgtcgattacccgcgacgtgtccggcgaaggcgttcagcaggcgctgttgaagcttatcgaaggtaccgtagccgctgttccgccacagggcgggcgtaaacatccgcaacaggagttcttgcaggttgatacctccaagattctgtttatctgcggcggcgcgttcgcaggcctggacaaagtgatttcccaccgtgttgaaaccggctccggcattggttttggcgcgacggttaaagcgaaatccgacaaagccagcgaaggcgaactgctggcgcaggtcgagccggaagatctgatcaagtttggtctgatcccggaatttatcggccgtctgccggttgtcgcgacgctgaatgaactgagtgaagaagcgctgattcagatcctgaaagagccgaaaaacgccctgactaagcagtatcaggcgctgtttggcctcgaaggcgctgagctggaattccgtgatgaagcgctggatgcgatcgccaagaaagcgatggcgcgtaaaaccggcgcccgtggtctgcgctcgatcgttgaagccgcgctactcgacaccatgtacgatctgccgtccatggaagatgtcgaaaaagtggtgattgacgagtcggtgatcgaaggtcagagcaagccgctgctgatctacggcaagccggaagcgcagcaggcatctggcgaataa

SEQ ID NO: 87131 - DNA, 624 bp, Enterobacter aerogenes
atgtcatacagtggcgaacgagataactttgcaccccatatggccctggtgccgatggtcattgaacagacctcacgcggtgaacgttcttttgatatctattcccgtctgctcaaggaacgcgttattttcctgaccggccaggtggaagaccacatggctaatctgatcgtggcgcagatgctgtttctggaagcggaaaatccagaaaaagatatttacctgtacattaactctccgggcggcgtgatcaccgccgggatgtcaatttacgacaccatgcagttcatcaagccggatgtcagcactatctgtatggggcaggcggcttcaatgggcgccttcctgctgaccgccggggcgaaaggcaagcgtttctgtctgccgaactcccgcgtgatgattcaccagccgctgggcggctatcagggtcaggcgacggatattgaaatccacgcccgtgaaattctgaaagtgaaagggcgtatgaatgaactgatggcgcatcatacgggtcaatcccttgagcagatcgagcgcgataccgagcgtgaccgcttcctgtcggcgtcggaagcggtggaatacggcctggtcgattccatcttgacccatcgtaattga

SEQ ID NO: 87132 - DNA, 1299 bp, Enterobacter aerogenes
atgcaagtttcagttgaaaccactcagggccttgggcgccgtgtaacgattactatcgccgctgacagcatcgagaatgctgtcaaaagcgagctggtcaacgtagcgaaaaaagttcgcattgacggcttccgtaaaggcaaagtgccgatgaatgttgttgctcagcgttatggcgcttccgttcgccaggacgtgctgggcgacctgatgagccgtcatttcgttgacgcgatcatcaaagagaaaattaatccggccggcgcgccgaactacgttccgggcgaatacaagctgggcgaagacttcacctacgcggtagagttcgaagtgtatccggaagttgagctgaaaggtctggacgcaatcgaagttgaaaaaccggttgttgaagtcaccgacgctgacgttgacggcatgctggacaccctgcgtaagcagcaggcgaactggaaagaaaaagaaggcgctgttgacgctgaagatcgcgttaccatcgacttcaccggttctgtagacggcgaagagttcgaaggcggtaaagcgtctgacttcgtactggcgatgggtcagggtcgtatgatcccgggcttcgaagacggtatcaaaggccacaaagctggcgaagagttcaccatcgacgtgaccttcccggaagagtaccacgctgaaaacctgaaaggtaaagccgctaagttcgttatcaacctgaaaaaagttgaagaacgcgagctgccggaactgactgctgaattcatcaagcgtttcggcgttgaagatggttccgttgaaggtctgcgtgcggaagtgcgtaaaaacatggaacgcgagctgaaaggcgccgtgcgtaaccgcgttaaatctcaggctatcgaaggcctggtgaaagcgaacgacatcgacgttccggctgctctgatcgacagtgaaatcgacgtactgcgtcgtcaggctgctcagcgtttcggcggtaacgagaagcaggctctggaactgcctcgcgaactgttcgaagagcaggctaaacgtcgcgtagttgttggcctgctgctgggcgaagtgattcgcaccaacgagctgaaagctgacgaagagcgcgtgaaaggcctgatcgaagagatggcttccgcgtacgaagatccgtcagaagtggttgagttctacagcaagaacaaagaactgatggacaacatgcgcaacgtggcgctggaagagcaggctgttgaagccgtgctggcgaaagctaaagtgtctgaaaaagccacttccttcaacgaactgatgaaccagcaggcgtaa

SEQ ID NO: 87133 - DNA, 315 bp, Enterobacter aerogenes
atgatacgtgagcagatcgaagcaaaacttagagcagcgttcgacccgatgtatctggaagtcgtggatgaaagctatcggcacaacgtccctgcgggctctgaaagtcattttaaagtggtgttggtgagcgaccgcttcaccggcgaacgtttccttaatcgtcatcgtatgatttacggtacgttgaccgaggagctgtcaagcaccgtgcacgcgctggcgctgcatacttacacgattaaagagtgggaagggctacaggataccgtctttgcctctccgccatgccgcggagcgggtagcatcgcgtaa

SEQ ID NO: 87134 - DNA, 579 bp, Enterobacter aerogenes
atgctgaagaaaattctattcccgttggtcgcgatgtttgtactcgcaggatgcgccaccccgccgacgaccattgaagtatcgccgaaaatcaccctgccgcagcaggatccgagcctgatgggcgttaccgtcagcatcaacggcgcagaccagcgtaccgatcaggcgctggcgaaggtcacccgtaacaaccagctggttacgctgaccgcctctcgcgatctgcgcttcctgttgcaggaagtgcttgagaagcaaatgacgtcgcgcggctacatgattggcccgaacggcgccgtcgacctgcagatcattgttaacaaactgtatgctgacgtctcgcagggcaacgtgcgttacaacatcgccactaaagcggatatcgccatcatcgcgaccgccgctaacggcaccaagatgaccaaaaactatcgcgccagctactccgttgagggcgctttccaggcttccaacgagaacattgcgaacgcggttaatagcgtgctgaccgataccatcgccgacatggcgcaggacaccagcattcacgacttcatcaaacaaaacgctcgttaa

SEQ ID NO: 87135 - DNA, 1476 bp, Enterobacter aerogenes
atgtccaatcactacttgcgtatttttcagcagcccaaatcagctattttgctgatccttggctttgcttctggtttacctctcgcgctgacctccggcacgctgcaagcgtggatgaccgttgaaaatatcgatttaaaaactatcggcttcttttctctcgtcggtcaggcctacgtatttaagtttttgtggtcgccattaatggaccgctacacgccgccgtttttaggccgccgccgcggctggctgctgacgactcagcttgcgctgcttatcgccatcgccgcgatgggctttcttgaacccgcaacgcagttgcgctggatggcggcgttggctgtggttattgctttttgctccgcatcgcaggatatcgtctttgacgcctggaaaaccgacgtcctcccggcggaagagcgcggcgccggtgcggcgataagcgtgctcggttatcgtttgggaatgctggtttccggagggttagcgctctggttggccgaccgttggctgggctggcaaggtatgtactggctgatggccgcgctgcttattccttgtattatcgccacgctgctggcgccggagcccagcgacgtcattccggtgcctaaatcgcttgagcaggccgtcgccgcgccgttgcgcgatttcttcggtcgcaacaacgcctggcttattctgctgttaattgtcctttataagctcggcgatgccttcgccatgagcctgaccaccactttccttattcgcggcgtcggttttgatgccggcgaagtcggaatggtgaataaaacgttgggcctgttcgccaccattgtcggcgcactctacggcggcgtgctgatgcagcgcctgacgctgttccgcgccctgctgatctttggcttgctgcagggggcctccaacgccggatactggatcctctcggtcaccgataaacacctttattcgatggcggcggcggtattttttgagaacctgtgcggcgggatgggcaccgcggcgtttgttgcgctgttaatgacgctgtgtaacaagtcgttttccgccactcagtttgcgctactgtcggcgctgtcggcggtgggtcgcgtttacgttgggccgattgccggctggtttgtcgaagcgaacggctggccgacgttttatcttttctccgtcgttgccgccgtgccggggattttgctcctgcttctgtgtcgccgtacgctggaatatacccaacgcacggaaagcttcttgccgcgcacgcaataccctcagacttacgccctggcgctgcttatcctggcggtaggttgcttgatgctggcgatatggctgctgctgttggcgatgaacgcgctggattacacctctttctccttcctgcctggcctgctggaagtcgccgcgctgaccgctatcggtggtattttgctcggcgcgattctggactatatggcgctacgcaaaacgcagctgatttaa

SEQ ID NO: 87136 - DNA, 945 bp, Enterobacter aerogenes
atgagactcaggaaatacaataaaagtttgggatggatgtcattaatcgcaggtactgtattactcagtggttgtgattctgcgctccttgacccaaaaggacagattggactggagcaacgctctttgattctgacggcattcggcctgatgatgattgtcgttattcccgccgtcttaatggcagtaggatttgcctggaagtatcgcgcgagcaataaagatgcgaagtatagcccgaactggtcacactccaacaaagttgaagctgtggtctggacggttcctattctgatcatcttgttcctggccgttctgacctggaaaaccactcacgctctggagccaagcaaaccgcttgtccacgacgagaaagcaatcaccatcgaagttgtatcgatggactggaaatggttctttatttacccggaacagggtatcgctaccgtcaacgaaatcgccttcccggcgaacgtaccggtacactttaaagtcacttccaactccgtgatgaactcgttctttattccgcgcttaggtagccagatttatgcgatggccgggatgcagactcagctgcacctcatcgctgatgaagcaggcacttatgacggtatctccgcaagctatagtggcccgggcttctctggtatgaagttcaaggctatcgccaccccggatcgtgcaaccttcgatcagtgggtagcaaaagcgaaacagtccccgaactccatggactccatggctgcattcgacaaagtggctgtgcctagcgaaaacaacaaagtggaatacttctctaacgtgaaaccggatttgttcaaagatgttgttaacaaattcatgtctcacgagagcatgaacatgtctaaacctgaaggcgagcacgctgcgcacgaaggtatggaaggcatggacatgagccacgcggaaaccgctcactaa

SEQ ID NO: 87137 - DNA, 1992 bp, Enterobacter aerogenes
atgttcggaaaacttacactggatgcagtgccctaccacgaacctattatcgtggtaacggttgctgcaatcatcgtcgggggactggcgatactggcagcgatcacttacttcggtaagtggtcctacctatggaacgagtggctgacgtccgtcgaccacaaacgtctcggtatcatgtacgttatcgtggcaatcgtcatgctgctgcgtggctttgctgacgccgttatgatgcgtagccagcaggtgctggcctcagccggggaagcaggattcctgccacctcatcactacgatcagatctttaccgcccacggcgttatcatgatcttcttcgtggcaatgccattcgttatcggcctgatgaacctggtggttccgcttcagctcggcgcgcgtgacgttgcgttcccgttcctcaacaacctgagcttctggttcacggttgtgggcgtgattctggttaacctgtctctgggcgtcggtgagttcgcacagaccggttggctggcgtatccgccgctttcgggaattgagtacagtcctggcgtaggggtcgattactggatttgggcgctgcagctctccggtatcggtactaccctgaccggtatcaacttctttgtgaccattatcaagatgcgtgcccctggcatgaccatgttcaagatgccggtattctcatgggcatctttgtgcgccaacatcctgattatcgcctccttcccaattctgaccgtcaccgtcgcgctgctgaccctggaccgctacctgggcacccatttctttaccaacgatatgggtggcaacatgatgatgtacatcaacctgatttgggcctggggtcacccggaagtgtacattctggttctgccggtattcggggtcttctccgaagtcgcagcgaccttctcgcgtaaacgtctgtttggttacacctcgctggtgtgggcaaccgtctgtattaccgttctgtcgttcatcgtttggctgcaccacttcttcaccatgggtgccggcgcgaacgtaaacgccttcttcggtattaccactatgattatcgcaatcccgaccggggttaagatcttcaactggctgttcaccatgtaccagggccgcatcgtcttcaactcggcgatgatgtggactatcggcttcatcgttaccttctccgttggtgggatgaccggtgttctgctggcagtaccgggtgcggacttcgtactgcacaacagtctgttcctgattgcgcacttccataacgtcatcattggcggcgtggtattcggttgcttcgcaggcctgacctactggtggccgaaagcctttggtttcaccctgaacgaaacctggggtaaacgcgcattctggttctggatcatcggcttcttcgtcgcatttatgccgctgtacgtgctgggcttcatgggtatgacccgtcgtctgagccaggacatcgatccgcagttccactccatgctggttgttgcagcatgcggcgcggcgctgattgcttgcggtatcctgtgccagctgatccagttctacgtttctatccgcgatcgcgatcagaaccgtgacctgactggtgatccatggggcggtcgtactctggagtgggcaacctcttctccaccgccgttctataacttcgctgtcgttcctaacgttcacgagcgtgatgcgttctgggaaatgaaagaaaaaggcgaagcgtacaagcaacctgcgcattatgaagaaattcatatgccgaaaaacagcggcgcgggcatcatcattgctgcattcgcaacggtgtttggcttcgcgatgatctggcatatctggtggatggcgattgttggtttcgccggcatcgtagtgacctggattatcaagagctttgacgaggacgtggattactacgtaccggttgcagaagtcgaaaaactggaaaatcagcatttcgatgagattaacaaagcagggctgaaaaatggcaactga

SEQ ID NO: 87138 - DNA, 612 bp, Enterobacter aerogenes
atggcaactgatactcttgcgcacaatgcccacgcgcatgaacacgggcaccatgatacaggaccgatgaaagtcttcggtttctggatctacctgatgagcgactgcattatcttcgctacgctgttcgcaacctatgccgttctggtgaacggcacggctggcggcccggcgggtaaagatatctttgaactgccgttcgttctggttgaaaccgcactgctgttattcagctccatcacctatggcatggcggctatcgccatgtacaagaacaacaagagccaggtcgtttcctggctcgccctgaccttcctcttcggtgcagggttcgttgggatggaaatctatgaattccatcacctgattgttgaagggatgggtccggaccgtagcggcttcctgtcagcgttcttcgcgctggttggtacccacggtctgcacgtcacctctggtctgctgtggatggcggtattgatggttcaggtatcccgtcgcggcctgaccagcactaaccgtacccgtattatgtgcctgagcctgttctggcacttcctggacgtggtgtggatctgcgtgttctctgttgtttatctgatgggggcgatgtaa

SEQ ID NO: 87139 - DNA, 330 bp, Enterobacter aerogenes
atgagtcattctaccgatcatagcggcgcttctcacggcagcgtgaagagctacatgacagggttcatcctgtcgatcattctgacggcaatcccgtttgcaatggttatgagtggctctgcctcgcatgcagcgattctgggaaccatcctggtcacggctgtagtgcagattctggtgcacctggtgtacttcctgcacatgaacagtaaatctgacgaaggttggaacctgaccgcgtttatcttcaccgtaatcatcattgctatcgttgttgtcggctccatctggattatgtggaacctcaactacaacatgatgatgcactaa

SEQ ID NO: 87140 - DNA, 888 bp, Enterobacter aerogenes
atgtttaagcaatacctgcaagtaacgaaaccaggcatcatttttggcaacctgatctccgtgatcggcggtttcctgctggcctccaaaggccacatcgactatccgctgttcgtctggacgctcctcggagtatccctggtggtcgcctcgggttgtgttttcaacaactacatcgaccgtgatatcgatcgtaagatggaacggacgaaaaaccgggtgctggtcaaagggctgatctcgccagaatcatcgctggtatacgccaccttgctgggtattgctggcttcatgctgctgtggttcggcgctaacccgctggcctgctggcttggcgtgatggggtttgtggtttatgtcggcatctatagcctgtatatgaaacgccactctgtctacggcacgctgattggctcactctccggcgctgcgccgccggtgattggctactgcgcagttaccggtgattttgacagcggcgcggcgattctgctggcgatctttagcctgtggcagatgcctcactcttacgccatcgcgatcttccgtttcaaggattatcaggcggcgaatattccggttctgccggtagtgaaaggcatctcagtcgcgaaaaaccatatcacgctgtacatcgtggcctttgccgtggcaacgctgatgctttctctgggggggtacgccggatataaatatctggtcgtagcggccgcagtcagcgtctggtggcttggcatggcgctgcgcggatataaagtggcggatgataaagtctgggcgcgtaagctgttcgtcttttccatcgtcgctatcaccgcgctgtcagtcatgatgtctgtcgacttcatggtgccggattcacataatctgctggcttacgtcagataa

SEQ ID NO: 87141 - DNA, 333 bp, Enterobacter aerogenes
atgaaagaactaacattcaacgaaatggaatctgtctcaggtggttttaacctggtgagcgctgcaactggcttcgctagctttgtcgctaattctgcggctgggtttacctcatttgcgctgacttccggtctggcttttgcctctttcgttggcgatagcgcgattgagtttggcaagttcctccttggtcaggcaaactgggaaagcgtcgttagcacaggtcaagagaactgggcaaacttcgtttctaccgctggtaacagctggaacacattcgtgaacaacgccgctaccgactggaatagcttcctggagcaggccgcttcctaa

SEQ ID NO: 87142 - DNA, 1368 bp, Enterobacter aerogenes
atgaacgataacaaaatgacgccaggagaactgcgcgcaacctggggtttagggaccgtattttcactgcgcatgctcggcatgtttatggtcctgcccgttttgaccacatatggcatggcgctgcagggggccagtgaagcgctgattggtttggccattggcatttacgggcttgctcaggctatcttccagatcccgtttggtctactgtctgaccgaattggccgcaaaccgctaattgtcggaggactgctaatcttcgtcattggcagcatcatcgctgccctgaccgactccatttggggcattattcttggccgcgcattgcagggctctggtgctattgccgctgcggtcatggccctcctttccgatttaacccgtgagcagaaccgcaccaaggctatggccttcattggcgtcagttttggcgtgacctttgccatcgctatggtgctcggccctattgtcactcaccagttagggttgcatgcgctattctggatgatcgctattctggccagcctcggtattttgctgactttgtgggtagtaccaaatagccacaatcatgtactgaaccgtgaatctggcatggtaaagggctgtttcagcaaagtgcttgctgaacctaaactcctcaagctgaacttcggcattatgtgcctgcacatcatgttgatgtcgacttttgttgcgctacctggacagttggaggccgcaggtttcccggcagccgaacactggaaaatttacctggtgaccatggtcatttcctttatcgccgtggtgccgttcatcatctatgcggaagtgaagcgcaagatgaaacgtgtgttcctgttctgcgtcgctctgctactgatagcggaaattgtactctggggagcaggtggctatttctgggagttggtcgctggtgttcaactattcttcctcgccttcaatctgctggaagcgttattgccttcgttaatcagtaaggagtctccagcaggctacaaaggcacagcaatggggatttattctaccagccagtttatcggtgtggccatcggtggcgccctgggcggctgggtagatggattctttgactcgcagaccgtgtttttactgggtgcgctactggcgatgctgtggctactggtggccagcaccatgagtgaaccgccttatgtcagtagtcttcgtgttgagatcccggatgatgtcatcattaatgatgaactacagcgccgtctgcagtcgaaaccaggcatagagcaggttatgattgtcgctgaagaacgttcggcctacataaaaattgacagcaaagtgaccaaccgctccgaggttgaacagaccatcattgcaacttcataa

SEQ ID NO: 87143 - DNA, 327 bp, Enterobacter aerogenes
atgaaagaattaaccgcaaacgaaatggaatatatctctggtgcaggtattatcgacctgccttgtgctttggttgatttcacgattcaatctgcactgggtctggttgctgcgggtattaatgctggtatgattctggcctcctccgctctggaaaccacgattgacctggtttccaatattcttggtggttcgccatccagcctgggaagcattctgaccgaccatatcaactccctgctgtatgccgaatctggggtttggtctaattttgtttataatgctgcgactgattggggcggcgttgttgatgccctgcaaagctaa

SEQ ID NO: 87144 - DNA, 990 bp, Enterobacter aerogenes
atgattccggattatttaacgtttattcgtcgtcaggatcggtcgcttttaccgtatttgtactttcttactacattactaattgcattttacgtcaaaaacagagggtatctgttaaccgtagaggatgcctttccagtaagtgccatcttttcgttaactatgttcagctttgtttatgagttaaagggatattgggcatataaatatgcgataaggaatatcaatttttcttggttgcaggggaaaagctattcgcgatttgagataatactgtggcagccgcttgtcgctacaacgtgctgtttactgagttgctatctggttgttacaggatttctactctttttttcaaccattgtagccatgttctgtattgctatttttgtgccaatgataatctatataatgtgttggatggcgagaaattgttacgtcaagcagttgcagcaggcaactatctatacgcttaaatatcgtaatctccatcactatacctgcttgaacgttaccgtgactgtcttgaccagttttgcggttatcagtccgctgattgcagatgatgatttttccttagccgatggttttttttcacctcgcttgatggtggctatgctgatcctatgttcattaatcctgctggttaatctgtctttcgctcacccttccaggcgttatacctttttaggtagacttttgcaaaaagagtttgatgtaaaccttgtcaatacgatgatacttcctgggataaatagcaaacctttgtggcttagattggttattttcttcacccttcaggttttctggattgtgactgttagtctgttgttgaaacttttagggtgggaaatatatttttatgcatattttattttatgtatgatacctgcgataggatacttttacttgcatgtctattggaagtggcatgaagattacatgactgcctgtgatatgtatctcagatgtggtgaaaataataaaaattag

SEQ ID NO: 87145 - DNA, 930 bp, Enterobacter aerogenes
atgataaagctatcagaccagccaacggtgcttatttttgccggtcagggaaatcctgccgtcggaatgggagctgatttatgggatttgaatacaacgacgagacaaatctgggactgcgccagcgatgtgacagggttagatcttcgtcggttgtgtcagaagggaccgatgaatcgtctggtgaaaacgacgacgcagcagtcggcggtgacagctatcaatatcactctctatagtttgtatgccgagcgattcgctgacgctaacgttgttggttcgtgcggccatagcgttggtgaatatagcgcactttatgcggccggcgccttaacgctggaaaatgtgttcaagctaatattggcgcgctctactatcatgggcgatttaagcaatattcataaaggcgcgatgctagccgtgagaggtgccgattttcaaacggtaagtcagttgattatcgactccggaagcccggtcgtggtgagttgtgataatagtccctctcagcaggtgattggcggtacgctaccagatttaagtgaattctctggggttctgatgggggctggtctggatgctgtcaagctaggtgttagcggagcctggcatacgcctcttatgtctgaggggattcagcccatgcgggatgtgctcaagacggtggagattgtacggccaaattatcctgtactgatgaatgtcactggacgggaagaatataatccggagaaaattaaagagaacttatctttgcatttgacccatagagtacggtggagcgcatcgatagccgcctttttacaacatatcccctccgtcaggtttgttgaaatcagtaacaaggtgtatcttgggcatctgctaaatgatttcgacggtttctctgtagaatattttacacattgtcgaaaaatgttggcggcgtaa

SEQ ID NO: 87146 - DNA, 1389 bp, Enterobacter aerogenes
gtgaagggccatctgggtacattgctatttgctttgtcactaacaccattatggggaatggctaattgtctgtcaggtgaccaaatacgctcgaatggccagattattttgaacgcgcaggcatcttttgcgcacaaaagtgactccatttggcgcatcaatggcgctaatccatacacggccgataacgcgtataatgatatttctattaatctttcaagcgcttgttccttcattgaggatgtgctgggattagatttttcattatatagtttaggatattatgcgataaaagaagtaggattattcgaacaggatgatcatcgcgcaaaaatattaattgatcggctcaagattaactggtcgttgtctgatagcataagttttgaaggtggaaaaataaattcatttccaggtgcctttcatttaaaatcaccagcatcactgttgacttcctattatgccggatttaaaccgacacgaatatacgatccgaagctggagtccgcctatagcgagtcgtattggggggggcggttagccaaagaatttcgtgattatgcattctcgcttactgttatacccaaattagcaagtatcgataaatattatgaatcatccagtaactggacagccaatcaaagggctaacagcagtgaatactatttattaagttataccgattatcggcttgttaaccatcggctagcagcgaatataatgcttggcgactctccttcattggcactatctgatggctataatttaactcctcagtttgttgtcaacgtagaagcggctttgcacaaaacgcaacagtggcgtcacttttctgttgaaaaacggaacgaggtgctttctgggctatatccttcatcgctatatgcgcagaatgacaaaaaaggttatgaattagccgttggtgggcaatacaccactgacttttttagtgtgtttggcattgagtactactatcaaagcgaaggctactcaaaatcggcatggcgagagcaggctgattttattaggctattaagtaaaaaaaccggttattccagcttagaccaagtattagatgattataagtatctgatgggttcagaaataagtaatacaggaaataaaggtatgctgcaggggcggcattacattacttcatggttaagtttacagagtatagatcattcaacttttcagccttatttagtggtgaacttagtcgatggtagctccttaatcggggcccattttgtccagccattaaaaggggtgagcgaacaggctgagacttatacggggttgtatagcgcattaggtagtcgtgattctgagttcgcactttttggcgagactctcggagtttacgttggatttaaatattatttataa

SEQ ID NO: 87147 - DNA, 789 bp, Enterobacter aerogenes
atgaaaaccagtgtattgtatttatttatcatagctatatatttgcattctgtcccggtgcaggctacgagtaatagcctgcaagctctgaatataattcggagagctgatgatgttcgctcaccaaatgagccttttcgctataacgtgactgtacttgagtataaagagggtggcaaagtgcctgaaaacatgcagtcgctagatatatcgatgcgctttattaaaccagaaaacggtttgaaagctgatgctcgttcacttatccgttttacctatcctccgcgagataaaggcaagatcatgttatctgattggtatgacttatggttttatacgccagaattacgcaggcctattcctatttcgcgctcacaacgattaatcggtcagatctctaatggcgatgttatagtgacgaacttcgagtatgcttatgattcgaccctggaaggggaagagccttgtggagataaaatttgctatcgactgtctctcactcggaaatctgaggccgttacttatcctaaagtgatttacctggtggaaaaaaatgcggaatatcggccatttaaagcatcatattattctcttgataatcaacttctcaaaagtgtcttgtataaaaactatcagatagtattagggaagaatcgtccaacagagattattgtgcagaatgctcgctatgaaaaaggttattctgtcatgaagtatagtgatgttcgccttgaatcgttgcctgaattccacttcactaaagagtttattcagcgaggcgcgaagtga

SEQ ID NO: 87148 - DNA, 1311 bp, Enterobacter aerogenes
atgtcaaaggatatgatattttttaattctattctggttttaatattgatgtttgttatttataatgtcatctttaattttggcgatgcaaaattctcatttttgaacttgctacgacatcggcggagaacaatatctactctttctgccatcattttaggtggttgcgcaatatttttgtatggtggttttatcaactactctttttggatacttaaagaacaaacgatacgtaccaacattggtcatgtgcaaatttataacaggacctattttgaaaccgctaacaaaaataagagcctgatctctgattatgctacgttaaaaaataaaattttacataacgccgatttttctaatgagatttcaacaatagctggccagcttgaatttaccggaataatttcacactacgaaagtgaaacgtcaaattatttttcagcacaaggcgtagaacctttaccagccctgaagttaggggcatttgataagatagtttttggtagcgatttatctcgcgtaaaacacaatgaagttactattggcagtggtctggcaaaaacactagatagccactatggtgactggcttgatgtcatggcggttaatatagccggagggcagggggctatctctgtcaaactacgcggcgtctttgaatcaggaataaaggattatgacgatgttgttataaaaatgcctcttgagactgcgcagcgaattatggggactgatggtgttagtaagatagtcatcttgctaaacaacgatgatgtaacatcttttgttaagaaaatgagagagtatatagcagaccagcatttgcctctgatcgttaaggactggaaggagaactctattttttaccagcaggtggagggcatgctgtcggggatctatttttttattaaacttattgtggcgctaatcgtggttttcatgatcggtaattcaatgacgatgaatattgttgaacgaacccgggaaattactacacttcgcgcaattggtttacaatcaagtcgtgttacgcgtttattctggatggaaggcatatatatcggtatctttggcgcattggggagtcttttctttggtttcactattgctgccataattaatatttctggtattgcgatgccaccttcgccgggccaatcagtaggctacaccgcatttattaaaacaaatgatgttgaattgatctgggtaaccatgatattaccaattttaacatcagtcgtggcttccattattcccgcataccgtgcatcgcgccttaacatcactgatgcattcaaattttcatag

SEQ ID NO: 87149 - DNA, 651 bp, Enterobacter aerogenes
atgattcagcgaagtaatctttttaaaattctcctcctgtgtctgaccatgtttacatttgcagtatttgctgagatgggatcaactcctgcgacctcccgtgtcttacagaacggatttcctggtgagccagaagctttagcatctatcactgctgatttatttaaagaatatgaacatactaacaacgtcggcgcgctgatcttttactcatggggaatgttgcgacaggctaactattatcagagcgttaatgatctaattaacgcttctgaatacgcgaagactggattcttttatctggatgaatcagtagatgctaatgaagataacatgctaattcgatatttgcgtgcaagagtggatgcctggcttcccgtggaattaggtcgctgcgtgattacaatcgaagatactgatttacttcttgaaaataaagaaaaatttagcggtgaggttattaataatataattacaatgcgtttgcgagcactgcataattgccatcgcaaacagcaagaaaagcaactcactgagcatcttcgcagaatcaatcagcagcgtgaaattgattttgaaagtaaccagtcgccggtttgggaaatggctgaagtcatgcaggttatcgttcctgttattaagggtgattaa

SEQ ID NO: 87150 - DNA, 708 bp, Enterobacter aerogenes
atgcgcagcaatataacagaactaccggatatttcgttatctggaatatataagacctatggttgtctggacaatataacttatgctttaaacaatattaatctggacgttgtgaaaggcgagtttcttgtattgtgtgggccttccggtagcggaaagagtactttgctaaatatactttctggtattgatatgccaacttcaggccatgtcttctttctgcataaaaatctcaatgtgttgtctgaaaaaaatcttgcacaccttcgcagtcgacatctaggtttcatttttcaattttttaatttaataccggtgcttagtgtttttgataatgtttattatcccctgacgctgaatggtcattttaatgcgaaagaggcccgagagcgaacgctgcatttcctcgatagtgttggtttatcccacttattggctagaaaacctggccagttgtcaggtggtcaacagcaaagggtcgctattgcaagggcactagcgcatagccctgaagttattgttgctgacgaacctaccggtaacttggatctggctaccggtgaatcgattttggacctcctggttgagattaatcagcgaacgaaaacaacttttattatctcaacccattcgactcaacttaaagatcgcgcaagacggagcgtggaaattaaggatggagcaataatttatgattcagcgaagtaa

SEQ ID NO: 87151 - DNA, 954 bp, Enterobacter aerogenes
atgtatctgtcatcatattctttccttgaaccggaagaaccattttatttatattatccaagctggctaaatgtttgggaatcacactcctacaatacagcattgaaggcaactggagctaatggttggaggttcaaacgctttggaacaagaaatgatgtatacacgcgcgagattacaagacgaccagatcatataccttatataaatgctcttgataaggtatcagatgccgctttacacagcttgtcagcaaaagaacggatgttattacttaaatcgcgaaccgcatttatctatatcgattcatggggagagtcaggcgtgtttgaatacaatatcagtagccttaatttatccactattgatactttaccaaagagtctgatcaaaaaattttccatcaatgatgtaacctgcaaaattcgcggtgaaaatagttcactctttcaggctatggcaatggctcaagattatctcggctgggatgtttttgattttgtcgttatctgtggtggataccgagctgtaccattgttagctttcactgcagaaagtatgaaacaacgtaaagaaaaaaagaaatatcatcatattcctggtgtgaatttatctatcgaacgggtaggttgctttgtttttagtaaaagagaaggtggtttcaaagtacactgcagcccatacacatatgctgatgtaaatgaaattagtctgccgggtcataaaaatatcaatgatattgactgcattgcctatgccggaggtataaataaatccataacagcctctgagaacgtgatagatcttatcgctcgctacggttgcagcggatgtgtgacaccggcgttaacttggcaatatattaaccagtacgcattacataatggttgtatcagaaccgttattccgggagtagctagcggctatgcctactttgatacctggtaccaatag

SEQ ID NO: 87152 - DNA, 1233 bp, Enterobacter aerogenes
gtgaacgaaagagcaattatttctggtttcagtgtttgtttgccttatgcagagaatagttcgctgctaattgaaagtttaaagcagggaaaatgcgtgaacttatctccatggtttgcatcagataaccaagctatagaatgtgggttctctggcaatataaatattgcaaaactaaagcagaataatgatagcgctcttgaccatttgtatagacttatcgatgaagccttacttcaggctggtctcaatgatgactgcctgaaaggcgacagggtcagagtgtacattactgggatcggtcctcgtgtcgatgtcatggattatagaaatttctataattataatgatatggaggatgtgtcggtaacatcctcaattaaaaatctggctgtgaaaaatatgtctcaggatagcttttcttacaatctggcgaagaaatatgaattaagttaccttccgccgaatatgaactgcacaagtaactcgtcgctaacagctatccatctggccaccagagcaattgaaaaaaatggtattgatcttgcactgattatcaatatctcaaaaattaaatatcaagatctggggtttcttgcgagccagggaatgctggatagtgagattgttcaaccctttggtgtgaatagcaatggtgtgctttttgctgagggttatggtgttatgctgctggaaaaccaacgacatcgattagggcgagggaaaagtccaggaataagcatttactcggcttataaacaaattaatgctggtcgtagtaatgatgcctactggcaaagtgccagcattctaaaattaataaattcactgctgaatgattcgggtgtgcaaaaagaagaactttgtgcatttatacctcacggtaatggcacctcatcaagtgataatgttgaagcaaaagctatcgctatatttacaagtgaaatgactcttccagtactggcctataagggacaaatcggttataccgcaaccggttcaggattgatagatatagtaattggttatcactctttgaaaaacggtgagttaattttccctgttgttaatgatgacatcataaatgatgtctcgcgccatataccgacagagggcagggtaagcagacatgacaagaaacatttattaaagactgggttgggtgtagatggttccgtcattgcactcttaatgactaatttaaataccaacactggctacgagggagagtga

SEQ ID NO: 87153 - DNA, 2559 bp, Enterobacter aerogenes
atgaaaacgagcagaaaaagagtagttattaccggtatgggaatactgtcgtcgctggctgataatattacagacttcagacaagcgctgttggagaaaaaaaatggtataactgacagtgctcgtttttctaaatggtttgagaatgcccgtgcggcggaaatgttgcacgaaattcattgtcctgaattatccgaagagattgtctcatcactcgataatgccgcgctttgggcgtataaagtcggcaaggaggcactaaatcaggcggaccttttcagcaatcaacagtgtctggaacagatgggtctgattgttggcgtgtcttcggcggggactgaagcatttctaccactctttgaacagcgtgttgacgatttctcgttacgtaaagctcttttctcaggcggcttttcttcatgttgttccagcgcttctacgcttctgggtctaaagggtggagtggaactcgtcgcaacggcttgtacggcgagtccgaatgctgtcggcatggcttttgattatatccagaatggcaaaagcaaggcgatgttagcgataggaacggagcctatctatctgcctaccttcgctggattctatgccctgaatgttatgcatccgcaatcatgctcgccattttcagggcaatctgggatgtcgattggcgaaggggccggcgccgttgtactggaagagtacgagcatgcggttgctcgtggcgcgaccatttttggcgaaattctctcttatgcaacatcttgcgatgcctatcatgaaaccgggcctgacccaagagccaatggcgcagtgcaggttatgcagaaagcaatggcgaatgcaggggtgcaacctgagcatattgattacgtcaatgcgcatggcacaggcactgaagccaatgatcaaatagagactctggcgatgaagaaagttttctcaggggcagaaaatttattgatcagctccaccaagtcctattttggtcacaatattggcgctgccggaattgttgagctgattgcatgtttggttactctgcctgagcaaaatgttctaccaacgttgaatttttcactggcgcgcccaaattgcgatcttgactacgttgcgaacgcattccgggaaaaagatatcaatatctttatgaagaacaactacgcattcggcggcaataattgctgcatgattgtgagtacaaaacctggctctgttcctctcacctcctatgacgcaaaacgtgttgccattacagggattggcgcagtatcggcgataggccactcgataaatgaaatccttcactatatccatgaagcagatagccctgtagaactcagcggtgtcgtattccctgatgatacactcgaggaggcgaatgcactgttggatgtactggcaacaaccaatcagcttacagaaattttcggtcctgaatatcagaaagagacctatcaacagccggaggatgagaagaattttaaaacttaccaggtaaatgatctggaacctcgtaaacatctacgccgatacgatccgcgtaaagcaacgcgcggcgggacttttgctctcatcgcactcactgaaacgttgaatatggctaaacgtaagattaaacgcgatggcaatgacctgggcatggtgctgggaatggcgcgaggtccacaagagacaacctataagtatttgcagagtttgaaacctgacccgagaaaagtacgtacttctgaatttcccggttccctgatgaactcaattacaacattctgcgggatttccgaggggataaaaggatatacgacaacgctggcgacaggtgaaaacgctgcgcttggcgcattgacttatggttatgaaattgttcgccagcagctccagccgcaggtgattgtgggcggagccgatgaatatttcccttccatgtctctgtatatggatgctgtgacaaataaaattcatatgacctcagatgcttcggattatcagatatatgctaaagaggcgaatggatatgttcctggcgaaggtgcctgtatgctgttattagaagacccacaggctgcggtttctcgcggagccgaggtattggccgaaatcgccggatatggtaagtcatgtagtaattcctactttgatatcactcaggttgaagaaaaatccgcagcaatgtctctggccattactcgtgcgcttgttgatgcaggtattacatcgaaagatattgatttggtatgtggtaccagcaatggcagcgaagtgaattctttgatagaaatgaatgcaatttatatgtcgtttaattgccataatccacgtgtcccagtagtgaattataatgctttctttggttttgtcgcttcggttgcgggtcttttaaacctgtcagtgattcttgattgtattaaaaaacaatcagttcctgccattccctatacacaagcattcgctgataaaaggattaattttgtgcataagccattaaatctaaatatcaagtatgctcttttaattggtgctaccgaaggtggtaattattacgcaattgtaataaaaggatag

SEQ ID NO: 87154 - DNA, 1170 bp, Enterobacter aerogenes
atgaaattactttctgaacttcacctgcaaaataatgcgctaatgggcatttataatgataaatgcgtgccttcttcatatcatgatatttttgaagagtataaggccgtacgcgaaaatgttttgcttgttgattattcccatatgtcaattaccagcgtgatgggtgatgatgcatgggcgctagtgaactacatggcttcagcagatgtatcaattatccgtgatgagcagggtatttattctctagtacttaacgttgatggaaccatccgcggtgaagtttatattctttgtgctgaagaaggctattatattttgtcagaggatatgacttctaaggaaattataaacattctaaatgaagttctccttaaggccgaagagctagatatacaggatattccagaaatcaaatcgatggacggagaagattgggggattgttatgctggaaggcccctatgcctgggaaataatggcggaagcttatggttttgatatcatcggtctgccttattacgaatatatgaataccgatgatggtttaatggtatttcgctgcggtaaacatggtgagtttgcatatcaattaatcggttctcaagcagtcctggttacaatgtggatgaggctacaagaaataggatcaaaatatttactaaaaacgggtggtttagattatcaagggctggtgaggattgagaatccaggatgggatgaaagcctttattctagttactcacgtaatccagtggaattgcaaatgcagtgggcgattcaatacgataaagaggattttatcggtaagagcgcagtcgaagagttatcccttaagagtgctgaacgtaaacttgttggaattataccggatgaagggtgtggccatatcgattctgatgaccttgtgatggtaaatgggcatcaggttggtgtcattgttaacgccgtatattctccagcgaagcaaaactggattgcgttggcacttattgatgaatgctatgcgttagcggatattactggatttagtattgtaactacaaacggagaatttgctgctaaaacgcaaagtgttccatttatttataatcgtagtttattaattaacccaacaactcatagctatgttgatgcttcgaaggctaagagcgcgcttgaaacgtattaa

SEQ ID NO: 87155 - DNA, 282 bp, Enterobacter aerogenes
atgaccaatatcaatgacgaaatcgaaaaaagaaaaaatataattgttaaaattaaagccgagattatccagcgtctgaatgttcagcgtgaacctcatcaaattgatgatgatacgccattgtttggaaacggtttgaaactggattctgttgatgcaacagagattatcgttatgcttgataaaatcttcgatattcaggtttctgagggtgatgatccatcttatatgcgaagtgtaaataatctggcatcttttattttaaagaagaagtctttctaa

SEQ ID NO: 87156 - DNA, 531 bp, Enterobacter aerogenes
atgggagggtggcgtcaaccgcttatcatggtcgataaaatagttgattacaaatatggagagagtggcttcattaaagttattaagcatgtaacttacaatgacccctatctacttgggcattttccagaagacccgattatgcctggagccattatctctgagatatttggtcaggcaagtgaatattattcatttctgactgacatttgtgatatttatcaacaacgctatggtgaaaatcttagttcattacgtgacctctacgctcttatcagacatccagatatgctgagtacgatacgtactcggcgagcccaggtccgaggcgtattagcttcacagaatttaaaatttaaagggacagcttaccccggagatacgattgaagtagtaagcaaactttcgttttctgatgatagtggttttaagcattattcagttacagctaacgtagggaaaaagattattagccagggtgtaattattaattttagagaagttactaaattacaaggagagcaggcatga

SEQ ID NO: 87157 - DNA, 756 bp, Enterobacter aerogenes
atgtataactataacgatctaataggtaagaaagtgctggttactggcgccagcggcgacatagggcttgcaatttgtggaaagtttctcgagcaaaaatgtacggtttatgcactgtataagacgaatgccgggccattgcttagtctgaaagaaaatcacatcgctggtgaactgcttcacatcttaccttgcgatctttcgaagcaagacgaagttatagcgctgtgcgagcacttgaccagagaagccgggagactggatgtactggtaaataatacagggattgttaaagatagcctctttgcatcaatgacctttgatgatttttattcggttatcaatactaatctccttagtttgttccgattgacgaaagaagcactaatgttattacgttcagcggaaacacccgctgtaattaatgttgcgtctgtggctgctattgttccaagcatcggacaggccaactatagtgcatcaaaaggggccatactaagctttacccgtacgcttgcggcggaactggcgccacggggggtacgtgtcaatgcggtggcgccagggatgattgagtctaaaatggcgaagaaggttccacgcactgtcgttcgcgaagtgactaactctattccattaaaaagactaggaaggtgcgacgaagtagctgatgtcatcgtttatttaagctctgccgcatcaagctatatcattgggcaaaccatcgtggtcgatggtggcatggtaatgcggtga

SEQ ID NO: 87158 - DNA, 369 bp, Enterobacter aerogenes
atgcgtattggtactgatatagtcgaagtagcccggatcgaaaaagctataaccaatgaaaaatcaggttttctctcgagagtttttacagctaatgaaatcagagatattggaattattgattctaattatgaacgtgcggcaggtttttgggcggcgaaggagtctttggtaaaagctgttggttatggatttagtcatggcatttgttttcatgatattgaagtcacgcatgacgaaaatggaaaaccagactttatagtgtcaggcaagatcaaagatatacttaatgaacaatatattatgaatatttcactaagcatttcgcattgtcgaacttatgcgatagccgcaaccattctttattaa

SEQ ID NO: 87159 - DNA, 1647 bp, Enterobacter aerogenes
atggatattcgcaatatagtaattattagcctggtattgttgattgctggccctgcagtagcggctgatgctcagttagggcggcttgtaaaagagcagcaaaacaatgataacgctgctttcaaagaccgaaaaatagaacaaaaggatgtgttctccgatgctatcgcaaaaaaagaaaccgatagcacattcccgttggaaaatccgtgttttcaaattgatgaattagtacttagtaatgattttttagacgaccgcggattaaataaaataaaaaaactggttgctggaaaatgcttaggaatgaatgggttgaaaaaagcggctgtgctttttcaagattactatataaatgcaggctatataacaacgagggtggaaattccatctcaagatctcttgactaaaaaattaaagttagcagtgatacctggaaggatttctgagattatcattgttgataacgatataagtaagtgggttttgccattttcacaaggtgatattctcaatattagggatgttgagcagagtttggaaaatatacagagaacacctgaggttgatgttaaaattaacatagtgccaggccctgaaaatggcacgagcaatctggtaattaatacacaacgaaaaaaaaaatggagtgccagaacttcgtataataactatggtgatgacagcacaggaaaccaacttattggtggagtggggtatttatataatatcactagcttgagcgatgttttttatcttgcgggaacaggtagccaaaccgggggttataaaaatgctagtgcctattatagtgtgccttttggttacaccgatctcagtcttttttatagtaaaagtaaatcaactcagggtattgatcttggtgcatatacttttgactatgtaggtgagacggaatatttcagtctcaaaagtaatcgtatgctttaccgcaatgtgaactctaaattgtctgcgagtgccgaactgatcagacggaagtatgactatacattgggaggcacagagctagttttgcaaaagcgtgatatgggcaacatacggttaggcttaaattataaaagaaactttaccggagctgcgctggattcaacgttaacctggcagcggtttactaaggcttttggcggtactgatacaccagacatgcgtacagggaccgttagtaagcgaagtcagattttgaatctgaatgtgaactatgtgaaatggttaactatgttacccgttaacgcctattacgaactgaatattggggctcagtattcaccagataatttgacgttgcaggatcaattcacaataggcgatcgctggagtgtgcgtggttttcaaaatagtgatggtatttatggtaataaagggttcttcttacaaaacacgctaaatgtggttgctggatataatggtttcgtcccctatattggcacggattatggtcaaataattggtaagctaccttcgcaggatcttaacggtaagaaaataatagggggagttttcggtataaaaggggctgttaaagcgctggaatatgatgcttcattatcttcaccctttctatatccggatgatctggatgtagacagctataagattaactttaatcttgcttaccaaatttaa

SEQ ID NO: 87160 - DNA, 2583 bp, Enterobacter aerogenes
atggcgcaagcggaaatttcgattaaaaatggcagcgttactgaagcctccaatggggtgccggttgttaatatcgcgaaagcgaacagtaatggcctttcacataacgtatatgacacgctgaatgttggcaccgaaggcgttatttttaataacgcgaccagcgcagcacagtccgtgctggcagggcagattgcggctaacccaaatcttaccgaccgcagcgccatggttattcttaacgaagtgacttcaacgaatgccagtaccattaatggcatgatggaagttgcaggtgattccgctcacttaatcattgccaaccctaatggcatcacgactcagggtggtgggttcatcaatgctgaaaaagggacattgacgactggtacgccaaagataggtgacgatgggctattaaatggctattccgtaaatggtggaacgattactgtaaatggatttcagagcgaatcgccgaccgaaattctggcgcgtagtatcgttgtgaagggagcgctttctgcaagtgagcttaagatcgtcgcggggagtaatgcgatcaacgccgacggtgtggtcaccgactccgttacgccaaccggtaacgcaagtacctatggcgtggatgtttctaagctcggtggtatgtatgcgaataaaattagcctggtcagcaccgaaagtggcgtaggtgtacgtaacctggggacgatttctgccggggatagcggtattaagattaccagtaacggtaaactgcttaacaacaacgcggttatacaatccagtggcgatatcaccttaaacaccaatggtgttctggaaaatagtgcaggaaaaatcaacagcgataaaatgattgctattgatactgcgggcaataaagtaagtaatatcaatggtggtaacatattagcaaccactaacaactacattaatagcggtaagttcgataatagcaatgggaaactggctgctggccaaacgctggctgtcaataccagtggcaatacttttaccaatactggtaaagctaaaaccgcgggtattgaggcgggtatcgttgctatcgaatcaggtagttttgataataacaacggtcagattcatgctggctatgttggcctaaaaaatacatcattaaccaataatggcggtactattgattcaacaggcaatgtcgaagttgaaagtactggaaacattgaaaacgtaagtggcttgattcgctccagttctggtgctgtaaaattaacgacaactaaagcagtaaaaaataatgacaacaaatcggccgataccacgggcggtgaatccttgggtatcgtctcaggtaatggcatcgagattgctgctgactacttattcaactgggctggcgaaattgcctcagatggtgatgtgagtatccaaaccaccagtgatattgataactatatgggtaaaattgaaagcagtaagactgtttcaattactggtcgcgacatgaataccagccaatccggtattaacggcggagaaggtgtaaatatcgatctcgataattactacagtcgattgggagtgataacttcagtaaacggtgatgttactatcaaagccaacaccgttagcacagacagttcagtcattaaagctaaaaatatcagtatcgagtccggagctgatatcgatgctaaatatactatgatggttgctgatcaaaaactagcgcttaatgcggttggtaaaatcaccagtactgacagtgacaaatttggtttctacgtggggcaatacttcggctacgggaatcagcaaggcggtctaattggcggtgaaggggttgatattacggctaagagtctgaataacgaatctggccgtattattgcgcaaaccggtgatgtaaatattaatctgactggcgatctcgcaagtaacaaagggcaaattattgctaattccggaaaaatgacgattgctgcgaaaaaagttgctgctgattacgcaacaatttatagttcaggcaatatgcagattgatgcaactacgatatcatcaaaagcaagtggctctgttgccaaaaataccgctaccggtatcatctcttcagatagtgatattttaattaatattactggtgactacaataacactggatgggtgaatgcagcaggcaatctgacagtaaatacttccggttacgtgacaaataatcacgcctttaatgcaggtggtgatttaaatctgactggcaaaactattactaataacagcgatattgcagctggtaatacacttaatatcaccactgctaatgatttaactaataatctcggcgcgaatattacagctaagactactaatgtcaccgctaaaaatatctcgaactggtctaacctggttgctgatagtcagttaaatgtcactgcaagtaataatatttacaactacggtaatttgtataccagcggtaaggctgttatcaatgccaagaaaatagtcaatactggtttctgggctgtattaggtggcgctcaaggacttgagactactgccaatgttgtaaatgtatttggtaccgttgtaggtaaataa

SEQ ID NO: 87161 - DNA, 492 bp, Enterobacter aerogenes
atgccatctttcgatattgtctctgaagtcgatcttcaggaagcgcgtaatgcggtcgaaaacgcaagccgcgaagtcgagtcacgatttgattttcgtaatgttgaagccacctttgagctgaatgaaaccagtaaaaccatcaaggtgctgagtgagtctgatttccaggtcaatcagttattagatattttacgcgcgaagctgctcaagcgcggcattgagggaagttcgctcgacgtaccagaatcctttgtacatagcggaaaaacctggtttgtcgaagctaagctgaaacagggcattgagagcgcaatacagaagaaaatcgttaaattgattaaagacagcaagctaaaagtacaaacgcagattcagggcgaagaaattcgtgtcacaggtaaatcccgtgacgatttgcagtcggtaatggcgttggtgcgtagcggcgatcttggccagccattccagttcaagaatttccgcgattaa

SEQ ID NO: 87162 - DNA, 912 bp, Enterobacter aerogenes
atgaaagtaaccgtactgggatgcggtgcattggggcaactatggttaaccgcgctgtataaaaacggacatgaggttcagggctggttacgcgtcccgcaaccattttgtagcgttaatctcattgagactgacggtagtaatttcaacgaatcaatgaccgctaacgatcctgattttctcgccaccagcgatttactactggtgacgctaaaggcatggcaggtttcccaggcagtgagaaatctggctgctatcttaccggcttctgcgcctatcttgctcattcataacggcatgggcactcttgatgaattaaaaagcgttaaacacccactgctgctggcgtccaccactcatgccgcccgccgcgatggcaacgtcatcattcacgtcgcgcagggaacaactcatattggaccagccaaaagctatagcgaagattacagcggcctcgccgacattctgcaaaacgtcctgccggatgtcgcctggcacgacaatattcaccctgctctttggagtaagctggccgtcaactgtgtgattaatcccctgactgcgctgaaagattgtagaaacggcgatctgcgagattttccgcaagagatcggcgcaatctgtcatgaagtcgcagcggtaatgcaacgtgaaggcattcatacatctgcggaaaacctgttattgtatgtaaatcaggtaattgaaagtacagcagacaatatctcatcgatgttgcaggatattcgcgcgcagcggcatacggaaatcgactacatcaccggttttctgctgaatcgcgcccgggcccacggtctgtcagtaccagaaaatgcccgtttatttgaacaggtaaagcggaaggagaatacttatgagcgcgtcggcactgatttgcctcgcccctggtag

SEQ ID NO: 87163 - DNA, 594 bp, Enterobacter aerogenes
atgagcgcgtcggcactgatttgcctcgcccctggtagtgaagagaccgaagcggtcaccactatcgatttattagcgcgcggcggcgtgaaagtgactaccgccagcgtcgccagtgatggcaatctgaccatcgtttgctcgcgcggcgtgaagctacttgcggatgcgccgctggtcgaagtcgctgatggcgattttgatatcattgttttacctggcggtattaaaggcgccgagtgctttcgcgacagccctttgctggtagaaaccgtgagacaatttcatttatccgggcgcatcgtggcggctatctgcgccgcgccagcgaccgttctggtgccgcataatctgtttcctatcggcaacattaccggtttcccggcgctaaaagagcaaatccccgccgaacagtggcaggataagcgcgtcgtctgggacccaagggttaatctgttaaccagtcagggtccgggaacctctattgatttcgcgctaaaaatgattgacctgctggtcggtcgcgaaaaagcatacgaagtggcttcgcagttggtcatggctgctggcatctataattactacgaatcctga

SEQ ID NO: 87164 - DNA, 477 bp, Enterobacter aerogenes
atgtcccgtagcgcaaccgattctcgtgacctcgtcatcagccgcctactcagcgcccccacgacagccctctggcgcgcgtgggccgacccggctttactcaaaacctggtggtgtcctaagccatggtataccgacgttctggcctttgatttgcgtcccggaggggcttttcacaccgtgatgcacggccctgacggtgaacgtagcgataatcccggctgctttcttgaagtcattccgcagcaaaaattagtcatgacctcaatgctgaccgcagactttcgccctgccgtttccccatttgccatgacggctattatcacctttgcggatgaaaacgacggctgtcgctatacggcaacggtactgcatgcagatgatgaaacccgtgagcaacacgaaaagatgggattttttgaaggctggaatatcgttatcgatcagttgaatgccctggcgatgacgctacgctaa

SEQ ID NO: 87165 - DNA, 1449 bp, Enterobacter aerogenes
atgaagtttatcattaaattgttcccggaaatcaccatcaaaagccaatctgtgcggttgcgctttattaaaatcttaaccgggaacattcgtaacgttctcaaaaactatgatgagacgctcgccgtcgttcgtcattgggatcatatcgaagttcgcgcgaaagacgaaaaccagcggccggttattcgcgatgcgctgacccgtatccctggcattcatcatattctggaagtggaggacgtacctttcacttctctgcataacatttttgaacagacgctaccgctgtggcgtgaacagctcgaaggcaaaagcttctgcgtgcgtgtgaagcgccgtggtaaacatgaattcacctcaattgaggttgagcgctacgttggcggcggcctgaaccagcatatcgaatcggcgcgcgtgaagctcaccgatccggacgtgacggttaacctggaaatcgaaaacgatcgtctgttgctggtgaaagggcgctatgaaggtattggcggcttccccattggtactcaggaagatgtgctgtcgcttatttccggcggcttcgactccggcgtctccagctatatgctgatgcgtcgcggctgccgcgtacactactgcttcttcaacctcggcggcgccgcgcatgaaattggcgttcgtcaggtggcgcactatttgtggaaccgcttcggcagctcccatcgcgttcgcttcgtggcaatcaatttcgagccggtggttggcgaaatccttgagaaagtcgaggatggccagatgggcgtggtgctcaaacgtatgatggtgcgtgcagcatcgaaagtcgctgagcgttatggcgtgcaggcactggtgaccggcgaagccttgggccaggtatccagccagactctgactaacctgcgtcttatcgataatgtctcagacacgctgatcctgcgcccgctgatttctcacgataaagaacacattatcaatcttgcgcgcgaaatcggcactgaagattttgcccgcaccatgccggaatactgcggcgttatctcgaagagcccaaccataaaagcggtaaaagcgaagatcgaagcggaagaagaaaacttcgattttagcattctggataaagtggttgaggaagcgaataacatcgacattcgcgacatcgctcagcaaacgcagcaggacgtggtggaagtcgaaaccgtcagcggcttcagcgcgaacgacgtgattctcgatattcgttctgtcgatgagcaggatgataagccattgaaagtggaaggcgtcgatgttgtttcgctgccgttctataaactgagcacccaattcggcaacctcgatcagagcaaaacctggctgttgtggtgtgagcgcggcgtaatgagccgtctgcaggcgctgtacctgcgtgagcagggctttactaacgtgaaagtgtatcgcccgtaa

SEQ ID NO: 87166 - DNA, 243 bp, Enterobacter aerogenes
atgccaaagaaaaatgaggccccggccagctttgagagcgctttaggcgaactcgagcagatcgttaatcgtctggaaagcggctcactaccgctggaagaagcgctcagcgaatttgaacgcggcgtgcagctcgcgcgccagggccagacgaaactgcaacaggccgagcagcgtgtccaaatcctgctggccgatagcgaagatgcgccgttgactccctttacgccggacgctgaataa

SEQ ID NO: 87167 - DNA, 900 bp, Enterobacter aerogenes
atggacttcccgcaacaattacagacctgtgtcacccaggccaatgacgcgctgcgccgttttatctctccgctgccatttcagaacactccgctggttgaagccatgcactatggcgcattattaggcggcaaacgcctgcgtcctttcctggtttacgccaccggcgagatgttcggcgttagccgttccacactggatgccccagccgctgccgtcgaatgcattcatgcctactcgctgatgcatgacgatctgccggcgatggacgacgacgatctgcgccgcggtcaacccacgtgccacatcaagtttggcgaagcgaacgctattcttgccggtgacgccctgcaaacgctggcattttctatactgagtgatacgccgatgccggaagtaccggatcgcgaccgtctggcgatggtttccgaactggcccaggccagcggcgtcgccggaatgtgcggcggtcaggcgttggatctcgaggcggaaggcaagcaggtcgatctacaggcgctggagcgaattcaccgccataagaccggagcgcttattcgcgcggcggttcgccttggcgcgctgagcgccggcgagcgtggccgtcaggcgctaccagcactcgatcgctttgcggagaatatcggtctcgccttccaggtgcaggatgacattctggatgtggtaggtgatactgcgactcttggcaaacgtcagggtgccgaccaacagttaggcaaaagtacctatccggcgcttttgggtcttgagcaagcccagcagaaagcgcgcgatctgattgccgatgcccgccaggctttagatgaactggctgcgcaatcgctggataccacggcactggaagcgctcgcgaattacattattcagcgcgataaataa

SEQ ID NO: 87168 - DNA, 1863 bp, Enterobacter aerogenes
atgagttttgatattgccaaatacccaaccctggcgctggtagattccacccaggagttgcgcctgctgccaaaagatagcctgcccaagctttgcgatgagctgcgccgctatcttctggacagcgtgagccgctcaagcggccattttgcctctggccttggcacggttgaactgaccgtggcgctgcactatgtctacaacacgccgttcgaccgcttaatttgggatgtcggccaccaggcttacccgcacaaaattctcaccggccgccgcgacaaaatcggcactatccgccagaaaggcggcctgcatccgttcccgtggcgcggcgaaagcgaatatgacgtactgagcgttggccactcttctacctctatctccgcgggtattggtgtggctattgccgccgaaaaagaaggcaaacagcggcgcaccgtttgcgtcatcggcgatggggctatcaccgccgggatggcgtttgaggcgatgaaccacgcgggcgatatcaaaccagacatgctggtggtgctgaacgacaatgaaatgtcgatttcagaaaacgtcggggcgctgaataatcacctggcgcagctgctgtccggcaagctgtattcctcgctgcgtgaaggcggcaaaaaagtcttctccggcgtaccgccgattaaagaactgcttaaacgtaccgaagagcatattaaaggtatggtggtgcccggcacgctgtttgaagagatgggctttaactacatcggcccggtagatggccacgatgtgctgggtctggtcaatacgctgaaaaatatgcgcgacctgaaagggccgcagttcctgcatatcatgaccaaaaaaggccgtggatatgaaccggcggaaaaagatcccatcaccttccacgcggtaccgaaattcgatcacaccagcggcgtgctgccgaaaagcagcggcggcctgccttcctattcgaaaatctttggagactggctgtgcgaaaccgcggccaaagacgacaaactgatggcagtcaccccggcgatgcgtgaagggtccgggatggtcgagttctcgaaaaaattccccgatcgctatttcgatgtcgcgattgccgaacagcacgcggtgacctttgccgccgggatggcgattggcggctataagccgatcgtggcgatctattccaccttcctgcagcgcgcttacgatcaggtgatccatgacgtcgccattcaaaagctgccggtgctgtttgcaatcgatcgtgcgggcatcgtcggcgccgacggtcagacccaccagggagcgttcgatctctccttcctgcgctgcattccggaaatggtgatcatgaccccgagcgacgaaaatgaatgtcgccagatgctctacaccggataccactataacgatggccctagcacggtacgctatccgcgcggcacaggtaccggcgcggaactagaaccactggcgccgctgccgctcgggaaaggcgtggtgaaaagaaacggcgagaagctggcgatccttaacttcgggactttaatgccggaagccgctcaggttgcggaaaaactcaatgcgacgctggtcgatatgcgttttgtgaaaccgcttgatgaggcgctgatcctgcagcttgccgccgatcacgaagtgctggtcacccttgaagagaacgctatcatgggcggcgctggcagcggcgtaaacgagctgttgatggcccaccgtcgcgcggtgccggtgctgaatatcggtctgccggacttctttatcccgcaggggactcaggaagaagttcgcgccgacctcggcctggatgccgccggtatcgaagccaaaatccgcgactggttggcataa

SEQ ID NO: 87169 - DNA, 975 bp, Enterobacter aerogenes
atgcactacattcctcttggcgatacccatcttcgcgtttcccgactctgtctcggctgcatgaccttcggcgaacctgaccgcggcaatcatgcctggacgctgccagaagagagtagccgtccgctgattaaacgtgcgctggaaggcggaattaacttcttcgatacctcgaacaactactccgacggcagcagcgaagagatcctcggccgcgcgctgcgggagtatgctcgccgcgattcggtgatcgtcgccaccaaagtttatcatcaggtcggcgatctgccgcaggggctgtctcgcgcgcaaatcatgcgatccattgacgatagcctgcgtcgcctgggaatggactatgtcgacctgttgcagatccaccgctgggattactccacgcccatcgaagagacgctggaggcgctcagcgacatcgtacgcgccgggaaagcgcgctatatcggcgcatcatcaatgcatgcccgccagttcgcccaggcgctcgccctgcaggaacagaacaattgggcacgcttcgtcaccatgcaggatcactacaacctgatttatcgcgaagaagaaaacgagatgctgccgctctgccagcgcaaagggattgcggtcatgccgtggagcccgctggcgcgcggtcgactaacacgaccatggggagaaacgaccgcgcgtctcgtctccgatgaattcggcaaatcgctgtatagcgccaccgacgccaatgatgagcagattgcgcagaagctggaggaagtggctgaggagttagacgccaaccgcgcgcaggtggcgctggcctggctattaagcaagcccggcgtggctgcgccgattattggcgcctcgcggcaggaacagctggatgagctcctgcatgccgtcgatttaaccctgacgccagaacagatcgacaagctggaggcgccctatcggccccacccaatcgtcggcttcaagtaa

SEQ ID NO: 87170 - DNA, 507 bp, Enterobacter aerogenes
ttggcacgcagtagagacgaggcgaaaagccgcctcaatatgcgcaatccctggcatctgctggcgaccgggttcggcagtgggctgagcccggtggtgccgggaacgatggggtctctggcggcgattccgttctggtatctgatgacttctctcccctggcagctctattcgctggtggtgatgatgagcatctgtatcggcgtctatctttgtcaccgtacggctaaagatatgggcactcatgaccacggcagcatcgtttgggatgagtttgtcgggatgtggatcactttgatggcgttaccgacgatggactggcagtgggtggccgccggtttcgttattttccgcatttttgatatgtggaagccgtggccaattcgttggttcgaccgcaacatccatggtggaatggggatcatggtcgacgatatcgtcgccggggtgatctccgccggcgtactgtatctgattggccaccactggccgataggtctgctctaa

SEQ ID NO: 87171 - DNA, 978 bp, Enterobacter aerogenes
atggcatgcggcgaattttccctgattgcccgttattttgatcgcgttaaaagcgcccgccttgatgttgaaaccggcatcggcgatgactgcgcgctcctgaatatccccgagaaaaaaacgctggcaatcagcaccgacaccctggtggcgggcaaccactttttagccgacatcgaccctgccgacctggcgtataaagcgctggcggtgaacctgagcgatttggcggcgatgggggcggaaccagcatggttgacgctggccctcactttgccggaagcagacgaagcgtggcttgaagcctttagcgacagtctgtttgtccagcttaactattacgatatgcagctgatcggcggcgacaccacccgtgggccgctgtcgatgacgctgggtatccacggctttgtgccgccgggccgcgcgatgaagcgttccggggccaggcctggcgactggatttatgtcaccggcacgcccggtgatagcgcagccgggctggcgcttttacaggaccggctaacggtagattcgccagcggatgccgattatctgctggcgcgccatttgcgtccaatgccccgcgtgctgcaggggcaggcgctgcgcgatctggctaattcagcgatcgatctctctgacggtcttatctctgaccttggtcatattctcaaggccagcgcctgcggcgcgcgtatcgatctcgatgcgatgccgtattccgatgccatgctgcgccaggttgatcctgaacaggcgctacgctgggcgctcgccggcggcgaagattatgaactgtgctttaccgttcccgagctgaaccgcggagcgttggatgtcgcgattggtcagcttggcgcacgctttacctgtatcggccagatcgtggcggaagcggatggactgcagtttacccgtgagggtaagccgattaaattggatttaaaggggtacgatcattttggcacgcagtag

SEQ ID NO: 87172 - DNA, 420 bp, Enterobacter aerogenes
gtgaaacctgctgctcgtcgccgcgcccgtgagtgtgccgtccaggcgctctactcctggcagttgtcccagaacgacatcgctgatgttgaataccagttcctggcggaacaggatgtaaaagatgtagacgttctgtatttccgtgaactgctgtccggagtggcgactaacagcgcgtatctcgacggtctgatgaagccatacctgtcacgtcagttggaagagctgggtcaggtagaaaaagcggtactgcgtattgcgctgtttgagctgtcgaagcgtgacgacgtgccgtacaaagtggctatcaacgaagctatcgagctggcgaaaaccttcggcgctgaagatagccacaagttcgtcaacggcgtgctggataaagcggccccggtaatccgtccccgcaaaaagtaa

SEQ ID NO: 87173 - DNA, 471 bp, Enterobacter aerogenes
atgaacattattgaagctaacgttgctaccccggacgctcgcgtcgccatcaccattgcgcgtttcaacaactttatcaatgacagcctgctggaaggcgcgattgacgccctcaagcgcattggtcaggtaaaagatgaaaacatcaccgttgtttgggttccaggcgcgtatgagctgccgctggcggctggcgcactggcaaaaaccggtaaatatgacgcggtaatcgcgctgggtacggtgattcgcggcggtaccgcccactttgaatatgtggctggcggtgcaagcaatggcctggcgcacgtcgctcaggacagtgaaatcccggtagccttcggtgttctgacgactgaaagtattgaacaagccatcgaacgcgctggcaccaaagccggtaacaaaggcgcagaagccgcgctgaccgcgctggaaatgattaacgtattgaaagccatcaaggcctga

SEQ ID NO: 87174 - DNA, 1104 bp, Enterobacter aerogenes
atgcaggacgaaatgtacatggcgcgagcgctgaagcttgccgcgcgcggacgctttactacccatcctaatcccaacgtcggctgtgtgattgtaaaagacggcgagatcgtcggcgagggtttccactatcgggccggcgagccgcacgccgaagtgcacgcgctgcgtatggccggcgataaagccaaaggcgcgaccgcctacgtcaccctggagccctgtagccaccatggtcgcacgccgccgtgctgcgacgcgctgatcgccgcaggcgtggctcgcgtggtagcggcaatgcaggacccgaatccacaggtggccggtcgcggcctgtaccgcctgcagcaggccggcattgacgtcagccatgggctgatgatgaatgaagcggaagcgctgaataaaggttttctcaagcggatgcgcaccggttttccgtggatccagctgaagatgggcgcttcgcttgatggccgtacggcgatggccagcggtgaaagtcagtggatcacctcgccacaggcgcgacgcgacgtgcagcgcctgcgcgcgcagagccacgctattctcaccagcagcgcgaccgtgctggcggacgatccggcgctgaccgtgcgctggcaggagctgagcgccgatacgcaggcgctctatccgcaggagaacctgcgtcagccgctgcgtatcgtcatcgatagccaaaaccgcgtcacgccggagcatcgaattatccagcagcaaggtgaaaccctgttcgctcgcacccatgccgatgaacgtgcctggcctgacaacgtgcgtaccctactggtgccggagcataacggccatctcgacctcgtgttgctaatgatgcagctcggtaaacagcaggtgaacagcatttgggtggaagcggggccgacgctggccggcgctttgctacaggccgggctggtggatgagcttatcgtctatattgcgcctaaactgttaggcagtgacgcgcgcggtttatgcgcgctgccggggcttgagaaactgagccaggccccccatttcaaattcaacgagatacgtcaggtcgggcccgatgtctgcctgcatttaacgactgcgtga

SEQ ID NO: 87175 - DNA, 450 bp, Enterobacter aerogenes
atgcattgccctttctgtttcgccgtggataccaaagtcatcgattctcgcctggtcggcgaaggctcctccgtgcgtcgtcgtcggcaatgtctggtctgcaatgaacgctttaccacttttgaagtggctgagctggtaatgccgcgggtggtaaaaagcaacgacgtgcgcgaacctttcaacgaagacaagctgcgtagcgggatgttgaaagcgcttgaaaagcgcccggtcagcgccgatgacgtcgaaatggcggtaaatcacattaaaacccatctgcgcggcaccggtgagcgtgaagtcgcgagtaaaatgatcggtaatctggtgatggagcagctgaagaagctcgataaggtcgcctatattcgcttcgcttccgtctatcgcagtttcgaagatattaaagagttcggcgaagaaatcgcccgtttacaggactaa

SEQ ID NO: 87176 - DNA, 540 bp, Enterobacter aerogenes
atgacaagacgttacctacaactggctatcatcggcagcctgttcacccttaccgcctgcgcccagcaaagcgaagttcgtcagatgaacgagagcgtcagtacgctgagcaaagagatgacccaactgaatcagcaaacgataaaaatcacccagcaaaacgcactgaatgctaaatcaacccgcggcgtttatctgctcccggaggccaaaacccccgcgcggctggagagccagatcggcaccctgcgcatgtcagtgggtagcattacgccagatggcgacggttcgcgcctgaccttacgcatccagggcgagtctaacgatccgctcccggccttcaccgcgaccgtcgcttccggacagattaccggcaccacccacagctatcaggaagtcaacgtccaggatcagctgattagcgccccggccagcatcctggcgcccagcgatgtggatatcccgctgcgcctgaatgtgacgcctgataaagtcggctttattcgtatccacgatatccaacccgccagcgcgcagtaa

SEQ ID NO: 87177 - DNA, 885 bp, Enterobacter aerogenes
atgaaaaaaacattactggcagcgagcgctgttgtggcgctttccgcttctttcaccgctggcgcggcagaaactgaaaaaccgcagtacctgtctgattggtggcaccagagtgtgaacgtagtcggtagctaccacactcgttttggaccgcagatccgtaacgatacctatctggaatacgaagcgtttgctaaaaaagattggtttgatttctacggctatattgatgcgccggtcttcttcggcggcaacagcacggcgaaaggtatctggaacaaaggctccccgctgtttatggagatcgaaccgcgtttctctatcgacaagctgaccaacaccgacctgagcttcgggccgttcaaagagtggtacttcgcgaacaactatatctacgatatgggccgcaacgactctcaggagcagagcacctggtatatgggtctgggtaccgacatcgataccggtctgccgatgagcctgtcgctgaatatctatgctaaataccagtggcagaactacggcgcctccaacgaaaacgagtgggacggctaccgcttcaaggtgaaatacttcgttccgctgaccgacctgtggggcggttcgctgagctatattggcttcaccaacttcgactggggttctgaccttggcgacgacaacttctacgatatgaacggtaagcacgcgcgtaccagcaactctatcgcgtccagccacatcctggcgctgaactacgcgcactggcactactctatcgtcgcgcgttacttccataacggcggccagtgggctgatgatgctaagctgaacttcggcgacggcgacttcagcgttcgctctaccggctggggtggctacttcgttgtcggttacaacttctaa

SEQ ID NO: 87178 - DNA, 690 bp, Enterobacter aerogenes
atgacccgacgcgccgaccgtttatttcagattgtacagatcctgcgcggcaggcggctaaccaccgcggcgctgctggcggagcggttgggcgtgtcggagcgaaccgtctatcgcgatatccgcgacctctcgctctccggtgtaccggttgagggcgaggccgggagcggttatcgtctgctggcgggctatgatctgccgccgctgatgctgaccagcaaagaatccgaagcgctaatcgccgcgattcgactactgaagacctggggcggagatgcgctttcgcagtcgttggagtcagctcaggaaaaaatgctggcgattttgccggaagaccggcggcgcaaagcggagcagacccggctgtttgcccctgaccttggcgcgcatcgttatgctaaaacccattttgacgttatccatcaggccgtatccaatcagcaggtgttgcagcttcactatcaggatgaatctggtcaggtaacgcggcgtgaagtgctgccgctggggctatttttctggggggagcgttggctgctggtggcctggtgcgaactgcgcagtgattatcgtaactttcgtctcgatcgttgtctggaggtgaaggtgatcgaacgtcgtttcagcgagtgcgccgaccgttcactgagcgatttcttacgtaaggtgagatgtggggagcgataa

SEQ ID NO: 87179 - DNA, 366 bp, Enterobacter aerogenes
atgaacaacgtgattaactggtttgaaattccggtcgctgatatggatcgcgccgtcgcgttttatgagccggtaatgcaggtgacgctgcgtcgtgaaaccatggattgtgcggacctggctgtcttcccgcatcaggatccggctcccggcggcgcgttggctaaatttgacggtatcgcgccatcgccgcagggcgctattatttatctgcataccgacaacctggccgccacgctggatcgtatcgcctcggcgggaggagcgtgcgtatttggcccgctggcgctgccgaatgatattggcaccatcgccctgtttaccgacagcgaaggtaaccgcgtaggtttgcatcaaccggtttaa

SEQ ID NO: 87180 - DNA, 972 bp, Enterobacter aerogenes
gtggcacaggaatatactgttgaacaattgaaccacggccgtaaagtctgggactttatgcgctgggactactgggccttcggcatttcaggttttctgctgattgtgtcgatcgccatcatcggcgtccgcgggtttaactggggtctcgatttcaccggcggtacggtgattgaaattaccctcgaaaaaccggttgatatggaccagctgcgcgattcgctgcagaaagcaggctttgaggagccgcagttgcagaacttcggcagcagccgcgacatcatggtgcgtatgccgccggtacacgatgccaacggcagccaggagctgggcagcaaagtcgttaacgtgattaacgaatcgaccagccaaagcgcgacggtgaaacgtattgagttcgttggcccgagcgtgggcgcggaccttgcgcaaaccggcgctctggcgctgattgcggcgctggtgtgtatccttatctatgtcggcttccgctttgaatggcgactggcggcaggggtcgttattgcactggcgcacgacgtggtgattaccatgggcgtactgtcgttgttccacatcgagattgacctgaccatcgtcgcatcactgatgtcggtaattggttactcgttgaacgatagtatcgtggtgtcggaccgtatccgtgaaaacttccgtaagatccgtcgcggtacgccgtacgaaatctttaacgtgtcgttgacccagacgctgcaccgtaccttgatcacctccggtaccaccctgatggtgatcctgatgctgttcctcttcggcggcccgattctggaaggcttctcgctgaccatgctgatcggtgtatccatcggtacggcttcttctatctacgtcgcgtccgcgctggcgttgaaactgggcatgaagcgcgagcatctgatccagcagaaggtcgaaaaagaaggggcggatcagccgtccattctgccgtaa

SEQ ID NO: 87181 - DNA, 1815 bp, Enterobacter aerogenes
atgctggtcgtcgtgattatcgtcggcctgatttacgcgcttcccaacctgtatggtgaggatccggctgttcaaatcactggcgcgcgcggcgtcgccgccagtgagcaaacgctgatccaggtccagaaaactttacaagaagaaaaaatcaccgcgaagtctgtggcactggaagagggcgcaattcttgcgcgcttcgacaccaccgacactcagctgcgagcgcgtgaagcgctggttaacctgctgggtgacaaatacgtcgtggcgctaaaccttgctcctgctaccccgcgctggctggcggcgatgtatgccgagccgatgaagctgggtcttgacctacgcggcggcgtgcacttcctgatggaagtagacatggacaccgcattaggcaaactgcaggaacaaaacatcgatagcctgcgcagcgagctgcgtgacaaaggcattccttactccaccgtgcgtaaggaagacaactacggtctgagcatcgtcttccgcgacagcgcggcgcgcgaccaggctatctcttatctcagcccgcgccatcgcgatctggttatttcaagccagggtaacaatgcgctgaaagcggtgatgaccgacgaacgtctgaaagaagcccgtgaatacgccgttcagcagaacatcaacattctgcgtaaccgtgtaaaccagctcggcgtggccgaaccgctggtgcagcgtcagggttccgaccgtatcgtggttgaactgccgggtatccaggataccgcgcgtgcgaaggaaatccttggcgcgaccgcgacgctggaattccgtctggtgaacaccaacgtcgatcagtccgcagccgcttctggccgcgtaccgggcgattcggaagtgaaagatacccgtgaaggccgtccggtggtgctgtataagcgcgtgatcctgaccggcgaccatatcactgactccacttccagcatggacgagtacaaccagccgcaggttaacatctcgctcgatagcgcgggtggcaacatcatgtctaacttcaccaaggacaatatcggtaaaccgatggcgaccctgttcgtggagtacaaagacagcggtaagaaagatgccaacggtcgcgctatccttgcgaaagaggaagaggtgattaacatcgccaatatccagtctcgccttggcaatagcttccgtatcaccggtatcagcaacccgaccgaagcgcgtcagctttctctgctgctgcgtgcgggcgccctgattgcgccgattcagatcgttgaagagcgtactatcggcccaactctgggtatgcagaacatcaagcagggcctggaagcgtgtctggccggtctggtggtctctatcctgttcatgatcttcttctataagaagttcggcctgattgcgacttccgcgctgattgctaacctggtgctgattgtcggcattatgtccctgattcctggggcaacgctgaccatgccgggtatcgcgggtatcgtcttaacccttgcggtggcggtcgatgctaacgtactgattaacgagcgtatcaaagaagagctgagcaacggacgtaccgttcagcaggcgattgacgaaggttataagggcgcatttagctctatcttcgacgccaacgtgacgacgctaattaaggttatcatcctgtacgcggtcggtaccggtgccattaaagggtttgcgattactaccggtatcggtatcgcgacctcaatgtttaccgctatcgtcggcacccgtgccatcgtgaacctgctgtacggcggcaagcgcgtgaaaaagctgtctatctga

SEQ ID NO: 87182 - DNA, 333 bp, Enterobacter aerogenes
atgagcttttttatttctgatgcggtagcagcaaccggcgcgccggcgcagggcagcccaatgtctctgattctgatgctggtggtgttcggtctgattttttacttcatgatcctgcgcccacagcagaaacgtactaaagagcacaagaatctgatgaactccatcgccaaaggtgatgaagtcctgactaacggcggtctggttggtcgcgtgactaaagtcgcggaaaacggctacatcgctatcgcgctgaacgataccaccgaagtggttatcaaacgtgacttcgtagctgccgttctgccgaaaggcaccatgaaggcgctgtaa

SEQ ID NO: 87183 - DNA, 1128 bp, Enterobacter aerogenes
atgaaatttgaacttgataccaccgatggccgcgcgcgtcgcggccgtttggtgtttgatcgcggcgtagttgaaacgccagcctttatgcccgtgggtacctacggcaccgtcaaagggatgacgccggaagaagttgaagccaccggcgcgcaaatcatcctcggcaacaccttccacctgtggctgcgcccgggccaggaaatcatgaagctgcacggcgatctgcatgatttcatgcagtggaaagggccgatcctcaccgattccggcggtttccaggtcttcagtcttggcgatatccgtaagatcaccgagcagggcgtgcacttccgcaatccgatcaacggcgatccgattttcctcgatccggaaaaatcgatggagattcagtacgatctcggttccgatatcgtaatgatcttcgacgaatgtacgccgtacccggcagactgggattacgctaagcgttcgatggaaatgtctctgcgctgggccaagcgcagccgtgaccgtttcgatggcctcggcaacaaaaacgcgctctttggcatcattcagggcagcgtttacgaagatttacgagatatctcggtgaaaggtctggtagagattggctttgatggctacgctgtcggcggtttggctgtcggcgagccgaaggaagacatgcaccgtatcctggagcacgtttgcccgcagatcccggcagataaaccgcgatacctgatgggcgtcgggaaaccggaagacctggtggaaggggtacgtcgcggcatcgatatgtttgactgcgttatgccgacgcgcaacgcgcgtaacggccatctgtttgtgaccgatggcgtagtgaaaatccgcaacgcgaagcataaaagcgatacatcgccgctggatgccgagtgcgattgctatacgtgtcgcaattattcacgtgcttacttgcatcatcttgatcgttgcaacgaaatattgggcgcgcgcctcaataccattcataacctgcgctactatcagcgtttaatggctggtttacgcaaggctatcgaagagggtaaattagagagcttcgtgaccgatttttaccaacgtcaggggcgttccgttcctcctttgaacgttgattaa

SEQ ID NO: 87184 - DNA, 1065 bp, Enterobacter aerogenes
atgcgcgttaccgatttttcctttgaattacctgaatccctgattgctcactatccgcagccggagcgcagtagctgccgcttgctgtcgctggacgggccgacgggcgcgctgacgcacggtactttcaccgatctgctcgataagctcaaccctggcgatctgctggtctttaacaacacccgggtgatcccggcgcgtctgtttggccgtaaagccagcggcggcaagattgaagtgctggtcgagcgaatgctggatgataaacgtattctggcacatattcgcgcctctaaagcgccgaagccgggggcggagctgctgttaggcgatgacgaaagcattaacgccacaatgctggcgcgccacggcgcactgtttgaagttgagttcaacgatgagcgcccggtgctcgatattctgaacagcatcggtcatatgccgctgccgccgtatatcgaccgcccggacgaagacgccgatcgcgagctgtaccagacagtttacggcaccaagccgggcgcggtcgccgcgccgaccgccggcttgcattttgacgacccgctgctggaaaaactgcgcgcgaaaggcattgagatggcgtttgtgacgctgcacgttggcgcggggaccttccagccggtgcgcgtcgatagcatcgaagagcacatcatgcactcagaatatgcggaagtgccgcaggatgtggtcgatgcggttctggcggcgaaagcgcgcggtaaccgcgtcatcgccgtcggcaccacttccgtgcgttcgctggaaagcgcggcgcaggcggctaaaaatggcctgattgagccgttctttgccgatacgcagatctttatctatccgggatatcagtacaaagtcatcgatgcgctggtgactaacttccatctccctgaatccacactgattatgttggtctccgctttcgctggctatcagcacaccatgaacgcctataaggctgcggtagaacaaaaatatcgcttttttagctacggggacgcgatgtttatcacgtacaatccgcaggctatttctgagcgtccctaa

SEQ ID NO: 87185 - DNA, 582 bp, Enterobacter aerogenes
atgaattttctcgcgcatttacatctcgcccatcttgcggatagctcgctgccgggcaacctgctggccgattttgtccgcggtaacccgcagggcgagtatcctgcggatgtggttgacggcatttatatgcatcggcgtatagatgtaatgaccgacaatctggcggaagttaaaacggcgcgcgaatggtttcgccccgagacccgccgcgtcgcgccaatttccctcgacgtcatgtgggatcatttcctgtcgcatcactgggcgcagctgtcgccggatctgccgctaaacgagtttgtgcgctacgcccacgcgcaggtagcgcaaattctgccggattcgccgccgcgctttgttaatctcaatgaatatatgtggtccgaacgctggctggaacgttatcaggatatggaattcattcagcgcgtcctgaacggtatggccagtcgccgcccgcgcctcgatgcgctgcgtgattcatggtacgaccttgataaccactatgggcaactggagcagcaattctggcgtttttatccgcgaatgatggagcaggcgaaaaagagaacgctgtaa

SEQ ID NO: 87186 - DNA, 603 bp, Enterobacter aerogenes
atggttctggttactcgtcaggctccggactttaccgctgcagcagtattaggtaacggcgaaatcgttgagaaattcaacttcaaacagcacaccaacggtaaagctaccgtcctgttcttctggccaatggatttcactttcgtttgcccgtctgaactgatcgctttcgacaagcgctacgaagaattccagaaacgcggcgtagaagtggttggcgtttcctttgactccgagttcgttcacaacgcatggcgtaacaccccggtagaccagggcggtattggcccggttaaatacgcgatggttgccgacatcaaacgtgaaattcagaaagcttacggcatcgagcatccggacgaaggcgttgcgctgcgcggttccttcctgatcgacgctaacggcatcgttcgccaccaggttgttaacgacctgccgctgggccgtaacatcgacgaaatgctgcgtatggttgacgcgctgcagttccacgaagagcacggtgaagtttgcccggctcagtgggaaaaaggaaaagaaggtatggccgcttctccggaaggcgtagctaaatacctgaccgaaaacgtatccagcctgtaa

SEQ ID NO: 87187 - DNA, 1869 bp, Enterobacter aerogenes
atgtcgcaaactgccacactgattctgacccacggtcagattcatacactcgaccgcgcgaacccactggcggaagccgtggccatcgccgatggaaaaattctcgcgaccggaagccacgatcgaatcatgacgttcgccgccgaggggacgcaaattgtcgatcttaaaggccatacggtgatcccaggtcttaacgactcccacctgcacctgattcgcggcggcctgaactataacctcgagctgcgctgggaaggcgtgccatcgctggcggatgcgctgcgtatgctaaaagatcaggccgatcgcacgccgtcgccgcagtgggtgagggtggtcggcggctggagcgaattccagtttgccgaacgccgcatgccgacgctggaagagctgaatgaagcggcgcctgacacgccggtattcgtgctgcatctgtacgatcgcgcgctgcttaaccgcgcggcgctgaaagccgttggctataccaaagagacgccggacccggcgggcggcgagatcgttcgcgataacaacggcaacccgaccgggatgctgatcgccaaacctaatgccatgatcttgtatgcgacgctggccaaaggaccgaagctgccgcttgagctgcaggtcaactccacgcgccagtttatgcgcgaactgaaccgtttaggattaaccagcgccatcgatgccggcggtggtttccagaactacccggaagattacgaaattatcgagcaactgcacgccaaagagcagatgaccgttcgtatcgcctacaacctctttacccagcggccgaagcaggagctggacgatttcgagcgctggaccgatatgctgaagccggggcagggcaccgatttctatcgtgccaacggcgcaggtgaaatgctggtcttctcggcggcggattttgaagatttcctgcagccgcggccggatctgccgcaaggcatggaagatgagctggagcgggtggtgcgtcatctggtggaacaccgctggcctttccgtctgcatgccacctacgatgagtcgattagccgaatgctggatgtgttcgagaaggtgaaccgcgatattccgtttaacggcctgcactggttcttcgatcacgccgagaccatcaccgaacgtaatattgaacgcgtgaaggcgctaggcggcggtatcgcggtgcagcaccggatggctttccagggcgagtatttcgtcgatcgctacggcaaagaggcggtgaaacatacgccgccggtggcgaaaatgctggaactggacgtgccggtagggttggggaccgatgcgacccgcgtcgccagttataacccgtggaccgcgctgtactggctggtttccgggcgtaccgtcggcggcatggcgatgtacgacgataacaaccgtctgccgcgcgacgtcgcccttgagctatggaccgccggtagcgcgtggttctccagcgagcagggtaaaaaaggacgcattgagaaagggcaactggctgacctggtggtgctgtcaaaagactacttcagcgttgccgaagaagaaattaagggcatagagtcagtgctgacggtagtagatggcaaggtagtgtacgcggccggtcatttctcgccgctggcgccgccgccaattccggtattgccggagtggtcgccggtggtaaaagtgccagggcattatcgctcggcgccgcctgcggccgcgaagattggcgcggtggtgcagatgcaccagtgctgcggcagctgcggcgtgcacggacatcagcatgatattgcgcgcaagtcgtcgattccggtggcggatgagcaggctttctggggcgtattaggctgttcttgcttcgcgttctga

SEQ ID NO: 87188 - DNA, 546 bp, Enterobacter aerogenes
atggcgcaacagaaatcagtgacgctggtcatcagtcatcatctcgatccacaaaacggccagcggtatgaagcatggttgggcaaaatcatgccggttgcggcggagtttcccggccatcttggcgccaacgtgatccgtccggcggccgggcaaaatctctggagcgtgataattcgcttcgacaccattgaacatctctacgcctggacgcagtcggaaacccgtcgtgaattagtcgcggaaatcgcgccgtttctcaatgatggcgatcgtaccgaaatccgcaccgaaccggcgttctggtttaccccgcctgcggccaatattcgccagccgctgcgctggaaacagttcctgataaccctgctggtcatcttcccaagtaccaacctggtaccatggctgaccggcatggcgctaccggagttacggggaagcttgttactgcatctgattaacgatgccctggtggtcgcgttggtggtctggttgtggatgcctatcgtgacccgtctgtttgccggttggttgaaaaaaaattag

SEQ ID NO: 87189 - DNA, 642 bp, Enterobacter aerogenes
atgtctattcgtgaactgattgatccgtctaattccacccttatttttattgaccaccagccgcaaatggcttttggtgtggccaatatcgatcgccagacgctgaaaaataacaccgtcgcgttggccaaagcgggcaagatttttaacgttccggttatttatacctctgtcgaaaccaaaagcttcagcggctatatctggccagaactgctggcggttcatcctgaagtgaaaccgattgaacgtacttctatgaactcctgggaagacaccggttttgttaatgcggtgaaagccgctggacgtaaaaaactgattatttccgcgctgtggactgaagtgtgcctgaccttcccggcgctgatggcgctggaagaaggttatgaagtgtacgtggtaaccgatacctccggcggtacctccgttgacgctcacgagcgcgccatcgaccgtatggtgcaggccggcgcggtaccggtgacctggcagcaggtcctgctggagtaccagcgcgactggtcacgtaaagagacttatgacgcggtgatggatctggttcgcgaacatagcggcgcctacggtatgggcgtggattatgcttataccatggtgcacggcgcgccggaacgtaaagcctaa

SEQ ID NO: 87190 - DNA, 903 bp, Enterobacter aerogenes
atgcgtttaaaccttgatgtacttttgattcttgatgctctggataggcatggctcgttcgcgctggcggcggagtcgctatttaaaacccccgccgcgctgagctatatgatccaaaaactggaaaacgatctaaacatcagtctgctggatcgttccggacaccgggcgaaatttaccgataccggtaaaatgatgctggaaaaggggcgcctgttgctcaatgccgccaacgatctggaaaaacaggcgcagctgctgagttccggctgggagcgggatctggcgattgcgctggacgactcttttcctttccaggccctattgccgctgattgaaaagttttacgcgcaatatccgcaaacccggctcaactttacccaccataccctggcgggctcatgggaagagctgactcacaacggcgcggatattattcttggggcgattaacgaaccgccgacttcagcggaatggtcgtggaaaatgctcggcgcgatggacaacgtgttcgttgtcgcgcccggccacccgctggcggcaacgacccagccgctgaccaacaaacaactcagcctgcatcgcgcggtggttattagcgatagcgcccgctactgtcatccactgaacagcaacctgctcgatgagcaggagcaaatccgggtagatgatttcgccaccaaagtcgcgctcctgcgcgccggtttgggatgcggattcctgccccgccacatcgccctcccgtggctggagagcggtgagttgctggagaaaccggtgatttcgagccgtgagaaagatataacctatatggcctggcgtagcggcaataacggtctggctcagcgctggtggcgagaggctattctcgaagatagctgtctgagccagctctaccgttaa

SEQ ID NO: 87191 - DNA, 1818 bp, Enterobacter aerogenes
atgttgaaggcctggcacctgccggttgctccttttattaaagagcagcaggaacgactcgttatcacattgtggctaagcggcgaaacaatgccgcagcgaattacgctgcgcgcggaagaagacaatgaagagctgtcgttgcccatgcagcgcctgcgccaatccccacacgccgatgtcgtcgcctggcgtggagagataaacctgatgaacggccagccgcgccgccgctatagctttaagctgctgtgggcggaccgtcagttgtggtttacgccgcagggattccagcgtttcccgcccgcgaggctggagcagtttgcggtcgatgtgccggatagcggcccgcagtgggtcgccgatcaggtgttttatcaaattttccccgatcgtttcgcccgtagcgaggcgcgagaagccgggcaggacgaggtttattaccaccatgcggccggtcaggatattgtgctaaaagcgtgggatgagccgttaaccggcgaggcgggcggttcgaccttttatggcggcgacctcgacggtattagcgagaagcttccttatctgaagcagcttggcgtgactgcgctgtatctcaatccggtattcgtcgcgcccagcgtacataaatacgataccgctgattaccgccgtgtcgatccgcagttcggtggcgatgccgcgctgctgcgcctgcgccacaatacgcagcgtgaagggatgcgcctgatcctcgacggcgtgtttaaccataccggtgattcgcacccgtggttcgatcgccaccagcaggcgagcaacggcgcctgccatcagccggattcaccgtggcgtgagtggtttaatttttccccggacggggtggcgcataactggctgggttacgccagtctgccaaaacttgactaccgttcatcgagcctggttaacgaaatctatgcgggcgaagatagcgtggtgcgccactggttaaaagcgccgtggagtatggacggctggcggctggacgtggtgcatatgctgggcgaggatggcggcgcgcgtaataacctgcgtcatattgccggcattacccaggcggcgaagcgggagcagccggaggcttttgtattcggcgaacattttggcgatgcgcgtcagtggctgcaggctgatgccgaagacgcggcgatgaactatcgcggttttaccttcccgctgtggggcttcctcgccaataccgatatttcctacgatccgcagcacatcgatgcgcaaacctgtatggcgtggatggacaactatcgcgccgggctgtcgcatcagcagcaattgcggatgtttaaccaactggacagccacgataccgcgcgttttaaatccttgctgggtaaggatgtggcgcgactgccgctggcggtggtctggctgttctgctggccgggcgttccgtgtatttactatggtgacgaagtcggcgtcgatggcaacaacgatcccttctgccgtaaaccctttccatgggatccggcgttgcaggatgaaaacttgttggcgttatataagcgtatgaccaccttgcgtaaggggcatcaggcgctgcgctatggcggctgccaggtcatctatgcggaagataacgtggtggtctttgttcgcgtttacaaacagcagcgggtgctggtggcgataaaccgcggtcatgcctgcgaggtggtaatcgacgcatcgcctttgctggaggggaaaacgtggcagcgaaaagaaggcgcgggcgagatgcacgatgatgtgctgagtttgcccgcgatttccgcaagcgtctggtgtagccgttaa

SEQ ID NO: 87192 - DNA, 1374 bp, Enterobacter aerogenes
atggaaagtagtaacaagcttaagcgcgggctaagtacccggcacattcgctttatggcccttggttccgctattggtaccggcctgttctatggttcggcagacgccattaaaatggcggggccgagcgtattgttggcatacattatcggcggcgtggcggcgtatatcatcatgcgcgcgctgggcgaaatgtcggtgcataacccttccgccagctctttctcgcgttatgcgcaggagaacctcggcgggctggccggctatatcaccggatggacctattgttttgaaatcctgatcgtcgcgattgccgacgtgaccgccttcggtatctatatgggcgtctggttcccggcggtgccgcactggatatgggtactgagcgtggtgctgattatctgcgccgtcaatctgatgagcgtgaaggtgttcggcgaactggagttctggttctcattctttaaagtcgccacgattatcatcatgatccttgccggtttcggcatcatcatctggggtattggcaacggcggtcagccaaccggtattcataacttatggagtaacggcggcttcttcagtaacggctggctgggaatggtgatgtcgctgcagatggtgatgttcgcttacggcgggattgagattatcggtatcaccgccggtgaagcgaaggatccggaaaaatccattccgcgggcgattaattcggtgccgatgcgtatcctggtgttctacgtggggacgctgttcgtcattatgtctatctatccctggaacctggtggggactaacggcagcccgttcgtgttgaccttccagcatatgggaattacctttgccgccggcatcctgaatttcgtggtgttaaccgcctcgctatcggcgattaacagcgacgtattcggcgttggccgtatgctgcacggaatggccgagcaggggagcgcgccgaaagtgttcgccaaaacgtcgcgtcgcggtacgccgtgggtgacggtgctggtgatgaccgtggcgctgctgtttgcggtctatctcaactacatcatgccggaaaacgtcttcctggtgattgcgtcgttggcgaccttcgccacggtgtgggtgtggattatgatcctgctgtcgcaaatcgctttccgtcgccgcctgtcgccggaagaggtgaaagcgctgaagtttaaagtaccgggcggcgtggccaccaccgtggtcggcctgctgttcctggtctttatcatcgcgcttatcggctaccattcggatacccgcatttcgctgtacgtcggctttgcgtggatcgtgctgctgctggttggctggaaaattaagacccgccgcgatcgccagttagcgcaggcgcagtaa

SEQ ID NO: 87193 - DNA, 1401 bp, Enterobacter aerogenes
atggccgctgtatcatcccgaaaggaaggcacggtatttttccgtttttacaacaccacatccacaggcagtaatgaatttatgacccatcagttaaaatctcgcgacatcatcgcgctgggctttatgaccttcgcgctgttcgttggcgcaggcaacattattttccctccgatggttggcttacaggccggcgaacacgtctggaccgcagccattggcttcctgattaccgccgtgggtttgccggtgctaacggtagtcgcgctggcgaaagtcggcggcggcgttgagcgtctgagctcgccaatcggcaaagttgcgggcattctgctggccgtggtgtgctacctggcggttgggccgctgttcgcgaccccgcgtaccgccaccgtttcatttgaagtggggattgctccgctgaccggcgacggcgcgctgccgctgcttatctatagcgttatctatttcgcgctggtgattctggtttctctctatccgggcaaactgctggataccgtcggcaatttcctggcgccgctgaaaattatcgccctggtcgtgctcgcggtggccgcggttatctggccggccggcccgattagcgacgcgatggaagcctatcgtaccgcgccgttttctaatggtttcgtcaatggttatctgaccatggacacgctgggggcgatggtcttcggtatcgttatcgtcaatgccgcgcgttcccgcggcgttagcgaagcccgattgctgacccgatacaccgtctgggctggtctgatggccggcgtgggcctgacgctgctgtacctggcgctgttccgcctgggttccgatagcgcgacgctggtcgatcagtcggcaaacggcgcggctattctgcactcctacgtgcagcataccttcggcggcgcgggcagcttcctgctggcggcattgatatttatcgcctgtctggtcaccgcggttggcctgacctgcgcctgcgctgagttcttcgcgcagtatctgccgctgtcgtatcgttcgctggtgtttattctcggcctgttctccatggcggtttctaacctggggctcagccatctgattcagatctcgattccggtgttaaccgctatttatccgccgtgtatcgcactggtggtattaagctttacccgcggttggtggcataattcctcccgcgttatcgcgccggcaatgtttatcagcctgatgtttggtatcattgacggtgttaaagcatcggcgttcgcagatatcctgccgcaatggaccgcgagcctgccgctggcagcgcaaggtctggcatggttgctgccaaccgcggtgatggctgtgctggctgcgatcatcgatcgcgcagcgggtagcccggtggtctcaaaagcccactaa

SEQ ID NO: 87194 - DNA, 1296 bp, Enterobacter aerogenes
gtgctggaacggctgtcatggaaaaggctggcgcttgagcttttcttatgttgtataccggccctgatcctcggggcgtttttcggtcatctgccgtggtttttactggcggcggtgaccggattgcttatttggcatttctggaatttgttacgtctgtcgtggtggctgtgggtcgatcgcagtatgacgccgccgccgggaagcggcagttgggaaccgctgctgtatggtctgcatcaaatgcagatgcgtaataaaaaacgtcgtcgcgaactgggaagcctcatcaagcgctttcgcagcggggcggaatccttacccgatgcggtggtgctgaccaccgaagagggcgccatcttctggtgtaatggcctggcgcaacaaatccttaatctacgctggccggacgatagcgggcagaatatcctcaacctgctgcgctacccagagtttgctaactatctgaaaaaccgcgatttcaccaagccccttaatttggtgctcaataatgcccgtcatctggaaattcgcgtgatgccttatagcgataaacagtggttgatggtggcgcgcgatgtcacgcaaatgcaccagctggaaggcgcgcggcgcaactttttcgccaacgtcagccacgagctgcgcacgccgctcaccgtactgcagggttatctcgagatgatgcaggagcaggtgttggaagggccgacgcgggaaaaagcgctgcacaccatgcgtgagcaaacgcagcggatggaagggttggtgaagcagttgctgacgctctcgcgtattgaagccgcgccggtgctggcgatgaatgataaaatcgacgtcccgatgatgctgcgggtggttgagcgcgaggcgcaaaccctcagccagggtaagcatcagttgcactttagcgtcgacgaaacgctccaggtgatgggcaacgaagagcagttgcgcagcgcgatttccaatctggtgtacaacgccgttaaccatacgccagcgggaactgagattcacgttagctggcagcgggcgccacacggcgcgctgtttagcgttgaggacaacggtcctggcatcgggcctgaacatctcccccggttgaccgagcggttctaccgcgtcgacaaggcgcgctcccggcaaaccggcggcagcggtttagggctggctattgtgaaacatgcggttagccatcacgaaagccggctggaaatcgaaagtacggtcgggaagggaacgcgctttagcttcctgctgccggaacgtttaattgccaaaaatgtcgcctga

SEQ ID NO: 87195 - DNA, 690 bp, Enterobacter aerogenes
atggcgagaagaattctggtcgttgaagatgaagctccaatccgcgaaatggtctgctttgttctggagcaaaacggctttcagcccgtcgaggcggaagattttgacagtgcggtgaatcaactcaatgaaccctggcccgatttgattctccttgactggatgttgccgggcggatcggggctacagtttattaaacagcttaagcgcgaagcgatgacccgcgatattccggtggtgatgctgacggcgcgcggcgaagaagaagatcgcgttcgcggtctggaaaccggtgcggatgattacattaccaaaccgttttcgccgaaggagctggtggcgcgaattaaggcggtgatgcggcgtatttcgccaatggcggtcgaagaggtgattgagatgcaggggctgagcctggatccctcctcgcatcgtgtcatgaccggtgaaaacccgctggatatggggccgaccgagtttaaattattacacttctttatgacccacccggaacgcgtatacagccgtgaacagctgctgaatcacgtttggggaaccaacgtttacgttgaagaccggacggtggatgtgcatattcgccgcctgcgcaaagcgctggaacatagcggccatgaccggatggtacagacggttcgcggcacgggatatcgtttctccgcccgtttctga

SEQ ID NO: 87196 - DNA, 1203 bp, Enterobacter aerogenes
atgcgcatccttcatacctccgactggcacctcggccagaacttctatagcaaaagccgcgcggacgaacacgccgcctttctcgactggctgctggcgcgcgcgcaggaacacgaggtggatgccattatcgtcgctggcgatatttttgataccggctctccgccgagctacgcccgcgaactgtataaccgttttgtcgttcaactgcagcaaaccggctgccagttggtggtgctggcgggcaaccacgattcggtggcgacgttaaacgagtcgcgcgaaatactcgccttcctgaaaaccaccgtggtcgccaacgccggccacgcgccctttatcttgccgcggcgcgacggcgcgcccggcgcggtcttctgcccggtgccgtttttgcgcccgcgcgaactggtggtcagccaggctggccactccagcggcgaaaaacagcagcagttgctcaccgccatcagcgactactatcagcagcaatatcagcaggcctgcgatctgcgcggcgaacgggcactaccgattattgccagcggccacctcaccaccgtcggcgccagcaaaagcgacgcggtccgtgaaatctatatcggcaccctcgacgccttcccggccaaccgctttccgcccgccgattacatcgcgctcggccatattcatcgcgcccagttggttggcggctgcgagcatattcgctacagcggttcgccgctgccgctgagttttgatgaaaccggaaaaaacaaaagcgttaatctggtctcattcagcgagggcaagctcagtgaagtcaccccgctaacggtgccgatcacccagccgctggcggtactgaaaggcgatttcgccagcatcaccgaacaacttcagcagtggcaggatagcgcgcagcagccgccggtatggctggatatcgaaatcaccagcgatgaatacctgcacgatatccaaagaaaaattcagcagcagaccgaatcgctgccggtggaagtgttgctggtgcgtcgcagtcgcgcccagcgtgaacgcattctggccggcgttcagcgggaaacgctgagcgaactgcaggtcgaagaggtgtttgcccgccgcctggcgctggaaactcttgatgctccacagcaacagcggctggagcaactgtttacggaaacgctgcatagcctgaacggtgaggaacgcctgtga

SEQ ID NO: 87197 - DNA, 3135 bp, Enterobacter aerogenes
gtgagaatcctgagcctacgcctgaaaaaccttaactcgctgaaaggcgaatggaaaatcgactttaccgctgaaccgttcgccagcaatgggttattcgcgattaccgggccgaccggcgccgggaaaaccaccctgttagatgctatctgtctcgcgctgtaccacgaaacgccgcgcctgagcagcgtatcgcaatcgcaaaacgatctgatgacccgcgacaccgccgagtgcctggcggaagttgaatttgaggtccggggcaccgcctatcgcgccttctggagccagaaccgcgcccgcaaccagccggatggcaatctacaggcgccgcgcgttgagctggcgcgctgcgacgacgggaaaattcttgccgacaaggtcaaagataaactggagctgacggcatcaattaccggcctcgactatgggcgctttacccgttcaatgctgctttcgcaggggcaattcgccgctttcctcaatgccaaaccgaaagagcgcgccgagctgctggaagagctgaccgggactgaaatttacgggcaaatttccgcgcaggtctttgaaaaacataaactcgcccgcattgagctggaaaagctgcaggcgcaggcctccggcgtcgtactgttaaatgatgagcagcagcaggcgttacagcaaagtttgcaagtacttactgctgaagaacagcagcagcttgccgaacagacccgccagcaaaatggcctacagtggctgcgccgccgtcaggagctaaacgcggaagccacccaggcgcaggctgctttacagcaggcgctgctggcgcaggaagccgccgcgccgcagctggcggcgctacaaaccgcgcagcctgcagagcaactgcgtccattatggtcgcggctgcaggaacacagtagcgcgctggcgcaaactcgccgtcaggttgaggaagtaaatactcgcttacaggacagcctgcgccgtcgcgccgggatccgcctggctgcccaacaacgtctggctcaactagaatccagccagcaatcgttaaatgagtggcttaaagcgcacgagcgattccagcagtggagcacggcgctggcaggctggaaagccaccttccagcagcttaaccgcgacgctcagcaagagttgacgctacagcagcgcctgcaggatgccagccgtaagctcggcgaattgccggccactgcgctgactctggatggagaacaggtcagccgcgagctgacacagcatgccgccgcccgcccgctgcgccagcagctctcaaccctccatcgccagctgcagccgctgttcctgcgtctgcggcagctacagagcgcggaaaacgcctcacagcaggaaaaagagaagcttgaagccgcgctacaacagcgtcgtcaggcgtggaaggaaaaaaatcaacagctcagcgatgtaaaagccatctgcgaactggaagcgcgtatcgccgggctggaagccgagcgcgcccgcctgcagccgggcgcgccttgtccactgtgcggttccgaacatcatccggcggtcgcggaataccaggcgctggtgcccggcatcaaccaaactcgccgcgacgcgctggagcgtgacgtgcgacagctggcggaagaaggcgcgcagctgcgcggccagcttgaagcgttgcttaaacaacaacaaaaagacgctgacgagaaaacatcgcttctgcagcaggagcaagcgctcacctctcaatggcaagccaccctcgcggaattagcgattacgctgacgccgcaggatgatattgccggctggctggatagccaacagcagcatgaacagcagctgtatcagcatcaacaacggctggcctggcaggcgcaacagcaggagagccagctgcagctgcagcagttacagcaggatctcgaacagcgccgtcgcgcgctgcaggcggagctggacgtttataccctggcgctgccgcctgccgcggaggctaacgactggctggcccagcgtgaagccgaaacccgcggctggcaggcgaaacaaaatgaagccgccgcgctgcaggaacagcgccagcagctaacgccgctgctggaaaccctgcctgagtcaacggaagccgcggatcccgcgccgctggagggctggcggcaggtgcatgatgattgcctggcgctacagagccagtggcaaacgctgggccagcaagaaagccagcagcaggcacaggtgaaggaaagcgaaaagcagtttaccgccgcgctggccgccagcccgtttgccgaccaagcggcctttcttgccgctttgcttgacgaggcaacccgccagcggctggaacatctcaagcagacgctggaaaaagaagttcaacagaaccaaacgctggccctgcgggcgcagacgtcgcttgaacgccatcagcaacagccgcccgccgatattgatattaaccagccgctggagcagctagagaataggctggagcaactggcacgccagttgcgggaaaacagcgcccgtcagggtgagatccgccagcagttgaagcaaaacagcgataaccaacagcgccagcaatcattacgtcagcagatggaacaagccgcgcagcaggtcgaagactgggcctggctgaatgcgctcatcggttcaaaagaaggcgataagttccgtaaattcgcccaggggctgacgctggataatctggtgtggctggctaaccagcagctcaaccgcctgcatggccgctatttgttgcaacgtaaagccagcgaggcgctggagctggaagtggtggacacctggcaggccgacgcggtgcgcgatacccgcacgctttccggcggcgaaagcttccttgtgagcctcgcgctggcgctggcgctatctgacctggtgagccataaaacgcggattgattcgctattccttgatgaaggattcggcaccctcgatagcgaaacgctggataccgcgctggatgcgctcgacgcgcttaacgccagcggcaaagtgattggcgtgattagccacgtcgaggcgatgaaagagcgcatcccggtgcagattaaagtgaagaagataaacggtctgggatacagccggttggataaagcgtttgcggtggagtga

SEQ ID NO: 87198 - DNA, 906 bp, Enterobacter aerogenes
gtgcgtattggtattgatttaggtggaacaaaaacagaagtcatcgccctgagtgagcagggccagcagttatttcgccaccgcttgccaaccccgcgggaggattatcgccagaccatcgagacgattgcctcgctggtggagatggccgagcaggcgaccgggcagcgcggcaccgtcggtatgggcatccccggctcgatttcgccgtatagcggggtggtgaaaaacgccaactcgacctggctgaacggccagcccttcgataaagatctcagcctgcgcctcaatcgtgaggtccggcttgccaacgacgccaactgcctggcggtttcggaggcggtcgatggcgcggccgcgggtgcgcaaaccgtgtttgcggtaattatcggtaccggctgcggcgcgggggtggcgttgaacgggcgcgcgcatatcggcggcaatggcaccgccggcgaatgggggcacaacccgctgccgtggatggatgaagatgagctgcgctatcgtcagcaagtgccttgttactgcggcaagcaggggtgtattgaaacctttatttccggcaccggcttcgccaccgactatcagcggctgagcggaaacccgttaaccggcagcgagattatgcgcctggtgggtgaaggtgacgaaaaggccgaactggcgctgagccgctacgagcagcggctggcgaaatcgctggcgcatgtggtgaatatcctcgacccggatgtcattgtgttaggcggcgggatgagcaatgtcgaacgcctgtatcaaacggtaccggggctggtgaagcagtgggtgttcggtggagaatgcgagacgccgattcgccaggcgatgcacggcgattccagcggcgtacgcggcgcggcatggctgtggccgctgtga

SEQ ID NO: 87199 - DNA, 912 bp, Enterobacter aerogenes
atgctgtggttcaaaaatttaatggtttaccgtctgagccgcgatatcgaattgcgcgccgaagagatggaaaaacagctggccgagctgacatttaccccttgtggcagccaggatatggcgaaaaccggttgggtatcgccgatgggatcgcacagcgacgcgctgacgcatacggcaaacggccagatcgttatctgcgcccgtaaagaagaaaagatcctgccgtcgccggtgatcaaacaggcgctggaagcgaagatcctcaagctcgaagccgatcagggccgcaagctgaagaaaacggaaaaagactcgctgaaagatgaagttctgcactcgctgctgccgcgcgcctttagccgcttcagccagacgatgatgtggatcgataccgtcaacggcctgattatggtggactgcgctagcgcgaagaaagcggaagatacgctggcgctgctgcgtaaaacgctgggctcgttgcctgtagtaccgctgacgctggaaaatccgatcgagctgacgctgaccgaatgggtgcgctccggtagcgtggctcagggcttccagctgcttgacgaagccgaattgaaagcgatgctggaagatggcggcgtgatccgcgcgaagaaacaggatctggtgagcgatgagatcgccgtacatatcgaagcgggtaaagtggtcaccaaactggcgctcgactggcagcagcgtatccagtttgtgatctgcgacgacgcatcgattaaacgtctgaagttctgcgacgaattacgtgaccagaatgaagatattgaccgcgaagattttgcgcagcgttttgacgccgactttatcttgatgaccggcgaactagcggcattgattcaaagcctggttgaaggactgggcggcgaagcccagcgctaa

SEQ ID NO: 87200 - DNA, 285 bp, Enterobacter aerogenes
atgcttcaaagcaatgagtatttttcagggaaagtgaaatctatcggcttcaccagcagcagtaccggccgcgccagcgttggggtgatggcagagggtgaatacgcctttggcaccgcccagccggaagagatgaccgtggtcagcggtgcgctgaacgtgctgttgccgggtgaaactgaatggaaagtttacgcggcaggcgaagtgtttaacgtgccgggtaatagcgaattccacctgcaggtggcggaaccgacttcctacctgtgccgttatctgtaa

SEQ ID NO: 87201 - DNA, 666 bp, Enterobacter aerogenes
atggcaattttgaccattggcgtggcgccggtggcggaagttttgccgctgttaaccgaacatatcagggaagagcagatcacccatattagcctgttaggtaaaatgacgcgtgaagacgttatggaagattatgccgtggaatccggcgaccaggggctgctgaccttactcaatgataaccaactggtggaagtctcccgccaaaaggtggagcgcgatctgcgctgcgttatcgagatgctggatcggcaggaatatgatgtcattcttcttctcagttccgaacagttgagcggcctggcgacgcacaacgctatccttcttgagcctgaacggattattccgccgctggtggcctcgatcgtcgatggccatcaggtgggcgtgattgtacccgttgaagaagtcttgcctctacagcggcaaaagtggctcactttagaaaatacgccttattatgcgctggcgaacccgatgggcggcagcgacagcgatctgctggatgcaggaagaggtttagtcgaacagggggcggatgtactggtgctcgactgtcttggctatcatcagcatcaccgcgacgtattacaaaaggcgctggatgtcccggtattattgtcaaatgtgctggtttcgcgactggcggcagaactattagtttaa

SEQ ID NO: 87202 - DNA, 192 bp, Enterobacter aerogenes
atgccaaacagacctccttatccgagacaagcccgcgttgtcgccgttgaaaaaggcgccgcgggtcagacggtcacctggtatcagctgcgtgcggattacccgacacccgattcgctgatcagcgagcatccctccgagcaggaagcgttagacgccaaacggcgttacgaagatcccgagaaaacctaa

SEQ ID NO: 87203 - DNA, 525 bp, Enterobacter aerogenes
atgacacaaccaatttttctcatcgggccgcgaggctgcggtaaaacgacgatcggccatgccctggcgcgcgcgctgcatttccagttttccgataccgatcatcgtttacaggcccatgagaaacgcacggtagcggaaatcgtgcagaaagagggctgggagcgctttcgtgaactggagacgctgtcgctgaaggccgttacgctgccggatacggtgattgcgaccggcggaggaattattctcgctgaacgcaatcgtctgtttatgcgtgaaaacggcattgtgatttatctgcaggcttctgttaacgccttgattgagcggctggaagcttatccgcaggcggaacaacgcccaacgctgaccggtaagcctgtccgtgaggaagtcggcgaagtgctggcgcaacgggaagccctgtaccgcgaaaccgcccatcataccgtagacgccaccgcgacgccggatgcggtggttgaacagattatgaccatgctgtgcgatgtgacggtaagttag

SEQ ID NO: 87204 - DNA, 708 bp, Enterobacter aerogenes
atgcaatctgaagaacaacgccttattgatggcctgttttcccgtttaaaagaggccgagacgcacagcgcatcgcgcgacgccagcgccgaggagcggattgcccagcacgtaacccaacagccggcggccccatactatatggcgcaaactatcctgattcaggaagcggctatcaaacagcttaacgaccgcattcaggcgctggaggcgcaggttagccagctgcaggcggcaaaaccgagcagcggcggtttcctgtcgggcctgttcggtggcggccagtcccgcggcgccgatccgattccaagagccgagcaatatggccgcccgcagacgaataaccctcaaccgcagtatgcgccacagcaaaactatgccccgcaggcggcaggccgcagcggcggcggctttatggcgggcgcactacaaaccgcggccggggtggcaggcggcgtggtgctgggcaatatgctgaccaatatgttcagtggttcacatccgcaggagattgtgaacatcatcgatgaacagcagccgcagcagcaacaagatgtcagcccggcgctggataataacgccgccgaggatccgttccgccagcaggacgaccctttcctggcggacaataataccttcgactccgatttcgacgccggcttcggcaatgacgatgatttcggtagcgatgatgacagctgggtttaa

SEQ ID NO: 87205 - DNA, 459 bp, Enterobacter aerogenes
atggcgatttgggtagatgcggacgcgtgtccgaatgtcattaaagaaattttgttccgcgccgccgaacgcacgcagacgccgctgacgctggtcgccaaccagtcgctgcgggttccgccgtcgcgctacgtccgcgcgctacgggtggcgcagggttttgatgttgccgataacgagattgtccgtctctgtgaaccgggcgatttggtgatcaccgctgacatcccgctggcggcggaagtgctggcgaaaggaggcgcggcgttgaatccgcgcggcgagcgctacagtgaggagactattcgcgagcgccttacgatgcgtgattttatggagacgatgcgggccagcggcgtacagaccggcggcccggatagtttatcgcagcgcgatcggcagttattcgccgccgagctggagaagtggctgcttgcggttaaacgccagcaggattaa

SEQ ID NO: 87206 - DNA, 810 bp, Enterobacter aerogenes
atggataagaaaattggctttatcggctgcggcaacatgggtaaagccattctcggcggcctgatcgccagcggacaagtgcaaccggcgcaaatttgggtctataccccatcgccggacaaagttgccgccctgcatgaccagtacggtattaatgcggcggaaagcgcgcaggaagtcgctcaggtcgccgatatcgtcttcggcgcggtgaagccggggatcatgaccaaggtgttaagcgatatcgcttccagtctgaacaaagattcgctggtggtctcgatagccgcaggcgtcacgctggatcagctggcgcgcgcgttgggccacgatcgcaaaattattcgcgccatgccgaacaccccgtcgctggtgaacgccgggatgacctccgtgacgccaaacgcgctggtcagcacggaagagatcgccgaagtattaaccattttccgctgcttcggccaggcggaaaccatcgccgaaccaatgattcatccggtggttggcgtcagcggttccgcgccggcttacgtctttatgtttatcgaagccatggccgatgccgccgttctcggcggtatgccgcgcgcgcaggcctacaaattcgccgcgcaggcggtcatggggtcagcgaagatggtactggaaagcggcgaacatccgggcgcgctgaaagatatggtctgctcgccaggcggcaccaccattgaagcggttcgcgtactggaagaaaaaggtttccgttccgccgttatcgaagcgatggcgaagtgtatggaaaaatcagagcaactgagccgttcctga

SEQ ID NO: 87207 - DNA, 312 bp, Enterobacter aerogenes
atgaaaataacatttctggtaaccctactttttggtttggtctttgttgccgcggtgagtgccgcagataaaacgttaacgcctcagcagcagaaaatgagcgcatgtaataccgaagcggcgtcaaagtcgctgaagggtgatgaacgtaaaacctttatgagcaattgcctgaagaaagatgcgccagcggccggcaagacgctgacgcctcaacagcagaagatgagcgcttgtagcaaagaagcgtcgtcgaaatcgctgaagggtgacgatcgtaataagtttatgagtacctgtttgaagaaataa

SEQ ID NO: 87208 - DNA, 1416 bp, Enterobacter aerogenes
gtgaaattatcagccctctttattgccctgttaccgctgctggctcccccggttattcatgcacaaaccacttcttcgccggtgctggaaaatcgcgcggcgcagggcgatatcacgaccccaggcggggcgcgccgtttaacgggcgatcagaccgaagcgctgcgcgcttcgttaatcaataagccggcgaaaaatattattttgctcattggcgatggcatgggagattcagaaattaccgccgcacgaaattatgccgaaggcgccggcggtttctttaaaggtattgatgccctgccgctgacgggccaatacacccattattctctggataaaaaaaccggcaagccggattacgtgacggattccgccgcttcggcaaccgcgtggaccaccggcgtgaaaagctataacggcgcgctgggcgttgatatccacgaaaaagatcatcagaccatccttgagctggcgaaagccgcgggtcttgccaccggcaatgtctcgacggctgaactgcaggatgcgacgccggcggcgcaggtggcgcatgtgacctcgcgtaaatgctatggccccagcgtgaccagcgaaaaatgcgccagcaacgcgctggaaaaaggcggcaagggctctatcaccgaacaactgctgaatgcccgtccggatgtctctttaggcggcggggcgaagacctttgctgaaacggcgaccgcaggggagtggcaggggaaaaccctgcatgagcaggcggtcgctcgcggctatcagattgtgaccgacgccgcttcactcgccgctattagcgaagcaaatcagggtaaaccgctgctcggtctgttctccgacggcaatatgccggtgcggtgggaaggcccgaaagcctcttatcacggcaatatcgacaaaccgccggtaacctgtaccccaaacccgaaacgcgatgcttccgtaccgacgctggcgcagatgaccgaaaaagcgattgatctcctgagccgcaacgaaaagggattcttcctccaggttgagggggcgtctatcgataaacaggaccacgcggcaaacccttgcggccagattggcgaaaccgtcgacctcgatgaagcggtacagaaagcgctggaatttgccaagaaagagggcaataccctggtgatcgttaccgccgatcacgcccactccagccagattatcccggcagacacgaaagcgccgggtctgacccaggcgctgacgaccaaagatggcgcggtaatggtgatgagctatggcaactctgaagaagagtcgatggaacacactggcacccaactgcgtattgccgcctatggcccgcatgcgggcaacgtggtgggtcttaccgaccagaccgatctgttttacaccatgaaagacgcgctgggcctgaaataa

SEQ ID NO: 87209 - DNA, 261 bp, Enterobacter aerogenes
atgaaaaatctcattgctgagctgttggtcaatctggcgcaaaaagaagaagaggcaaaagagctgacggtacaggttgaggcgctggaaattgtcgtcaccgcattgctgcgccatatggctgaggatgcgcagcaacgtttgattcaggatatcgaaaccgccatggagcaggtcaagcccgggccgctggtggacgaccgtgacacccagcttctgcagcaatatataaaaaagctgctccggcatcctcgtaactaa

SEQ ID NO: 87210 - DNA, 1200 bp, Enterobacter aerogenes
atggaatcctggaaggttaatctcatttctgtctggttcggctgttttttcaccggactcgccatcagtcaaattctgcccttcttaccgctgtatgtctctcagttgggcgttacctcacatcaagcgctgtcgatgtggtcgggcttgacctttagcgtcaccttcctggtgtcggcgattgtctcgccgatgtgggggagcctggcagaccgcaaagggcgcaaactgatgctgctgcgcgcctcccttggcatggcgatagcgattttgctacaggcttttgcgaccaacgtttggcagctttttattttgcgtgcggtaatggggctaacctcaggctatatacccaacgccatggcgctggtggcctcgcaggtgccgcgtgaacgcagcggttgggcgctaagtacgctgtcgacggcgcagataagcggcgtgatcggcggcccgctgcttggcggttttcttgccgaccacgtcggcctgcgggcggtatttttcattaccgcgattttactgacggtcagcttcctcgtgaccttgtttctgattaaagagggcgcccggccgcaaatgagcaaagctgaacgcctgagcggtaaagcggtctttgcttcattgacccatccggggctggtgattagcctgtttttcaccaccctggttatccagttgtgtaacggctctatcgggccgattctggcgttatttatcaagtcgatggcgccggatagtaacaacatcgcgtttcttgcggggatgattgccgccgtaccggggatttcggcgttgatttccgcgcctcggctggggaaactcggcgatcgcatcgggacgtcgcgtattctgctggcgacgttatgttgcgcggtggtgatgttctttgcgatgtcgttcgtgacttcgccgctgcagctcggggtattgcgcttcctgctgggctttgccgacggcgcgatgttaccggcggtccagacgctgctcttgaaatactgcagcgataacgtcaccgggcgtattttcggttataaccagtcatttatgtatctgggtaatgtcgccgggccgctcattggcgcttcggtctcggcaatggcgggtttccgctgggtgtttattgccactgcgttgattgtcctgattaatatctggcaactggcgattatgttacgccgaagccgccgcgcggccgtttaa

SEQ ID NO: 87211 - DNA, 1098 bp, Enterobacter aerogenes
atggctaaaatgagggttgggatcgtttttggcggtaagtcggcagaacatgaagtgtcgctgcagtcagccaaaaatatcgtcgaagcaattgataaaacgcgctttgatgttgtgctgctgggaatcgataaacaggggctttggcatatcaacgatgccagcaactatctgctgaacccgcaggatcccgcccatatcgcgctgcgcccgtccgacgtgacgctggcgcaaattcccggtcgcgatgcccatcagttgatcaacgccgatagcggccagccgctggcggccatcgacgttatcttcccgattgttcacggcacccttggcgaagatggttcgctgcaggggatgctgcggatggcgaatttgccgttcgtcggatccgatgtgctgggctccgccgcctgcatggataaagacgttactaaacgcctgctacgcgatgccggtctgtcgattgcgccgttcatcaccctgactcgcgccaaccgccagcagttcagctttgccgatgtcaaagcgaagctggggttaccgctgttcgtgaagcccgcgaaccagggttcttccgtcggcgtcagcaaagtgaagagcgaagaagagtacctgcaggccgtcgcgttagcctttgaattcgaccataaagtggtagttgaacaagggattaagggccgtgaaatcgagtgcgcggtgctgggcaatgattatcctcaggccagcacctgcggggagatcgtactcaatagcgaattctatgcctacgataccaagtacattgatgacaaaggcgcgcaggtggtggttccggcagccatcgccccggagatcaacgacaaaatccgcgatatcgccgtccgtgcttaccaaacgctcggctgcagcggaatggcccgcgtggacgtcttcctgacggaagataacgaggtagtgatcaacgaaatcaacacgctgcctggctttaccaacatcagcatgtatccgaagctgtggcaggcaagcggcctggattacaccagcctgataagccgcctgatcgagcttgcgctggagcgccacgccgccgaccgcgcgctgaaaacctcaatgaactaa

SEQ ID NO: 87212 - DNA, 177 bp, Enterobacter aerogenes
atgtgcctggaaacagcacagaacaaccgtttttccaggtcgaaacgatcgcaaaccgataataataactaccacgtcttgccggggatattacgcctcttctgccggacggcggcgaataacaaatcccgccagccagaagctcacaacccacgtcgccagaccgacggcatatga

SEQ ID NO: 87213 - DNA, 204 bp, Enterobacter aerogenes
atgaagctgaccgacaaaatccgccgtgactggcactactacgcgttcgcgctggggttaatttttattttgaatggcgtggtggggctgctggggtttgacgcgcaggggtggcaatcatatgccgtcggtctggcgacgtgggttgtgagcttctggctggcgggatttgttattcgccgccgtccggcagaagaggcgtaa

SEQ ID NO: 87214 - DNA, 306 bp, Enterobacter aerogenes
atggctgaatttacgttttcaaagacgctgatggggagcaacaaaaagaaggtatcgatcaccagcggtaacattgcctacgcgctttttgttctgctgtgcatctgggccggcgcgcaaatgttgagcatgctggtacacgcgcctggcgtattcgaacatctcattcagattcaggataccaatcgcccgcgtattgaaattgggctcggcgtcggtaccctgttcggtttaattccgttcctgtttggtagcctgctggtcggcgcgctggggcttatcctgcgctggtaccataaccgttaa

SEQ ID NO: 87215 - DNA, 1104 bp, Enterobacter aerogenes
atggcgcaggtttctcgcggtgtttcactctcttttacgctgctggccgggttggtgctgagcgcctgtaccagccagcaggcgcctaagttgaaagaaggcgagaagccggtggatgttgccgccgtggtgcggcaaaaaatgcccgccagcgtcaaagaccgcgaggcctgggcgcaggcgattgccaaaacctttgacagccagaagctggcgccgacggaagaaaacgtctgttcggtgctggcggtcgcgcagcaggaatcaaactatcaggccgatccggcggtgccgggcctgaataaaatcgcctggcaggaaattgaccgccgggcggaaaaaatgcatatcccggtatttctggtgcataccgcgctgaaaatcacctcaccaaacggtaaaagttacagcgatcgcctggataacgtcaaaacggaaaaacagctgagcgcgatttttgatgacttcattggcatggtgccgatgggccagaagctgttcggctctctcaacccggtgcataccggcgggccaatgcaggtaagcatcgcctttgcccagcagcacaccgatggttatccgtggaaaatggacggcaccgtgcgccaggaggttttcagtctacgtggcgggttgtggttcggcacctatcatctgctcaactacccggctaactacagcgtgccgctgtaccgctttgctgatttcaatgccggttggtatgcgagccgtaatgccgccttccagaatgcggtggttaaagccaccggcgttaagctggcgctggatggcgatcttattcgctatgacagcgatgaacccggaacgactgagctggcggtgcgccgtttagccgggcagctggggatgagcgatggcgatatccatcgtcaactgaagaagggggatagcctggcgtttgaagagagcgatttgtataagaaaatattcaaaatcgccgagaaaaaggccgggaaaacacttccgcgcgagatgttgccagggatccaactggaaagcccgaaaatcacccgcaatctcaccaccgcgtggtttgctaagcgggtcgacgatcgccgcgccagctgtatggcgcgtcgttaa

SEQ ID NO: 87216 - DNA, 1221 bp, Enterobacter aerogenes
atgtttaaagcttttttccccaaaccggggccgttttttatttctgcctttatctggtcgctgctggcggtgatcttttggcaggcgggcggcggcgactggctgctgcggataaccggcgcatcgcaggatgtcgccatcagcgcggcgcggttctggtcgctcaactatctggtgttttacgcgtattacctgttctgcgtcggcgccttcgcgctgttctggtttatctatagcccgcatcgctggcaatactggtcgattctcggcacctcgttgattatttttgtcacctggtttttggtggaagttggggtggcgatcaacgcctggtatgcgccgttctatgatttgattcagagcgcgctggccacgccgcacaaggtcagcatcagtcagttctaccacgagattggcatttttctcggcatcgcgctgattgcggtggtgattggcgtgctgaataacttcttcgtcagccactatgtgttccgctggcgtaccgcgatgaacgaacactatatggaacactggcagcatctgcgccatattgaaggtgcagctcagcgtgtgcaggaagacaccatgcgcttcgcggcgacgcttgaagacatgggcgtaagctttattaatgcggtcatgacgctgattgccttcctgccggtgctggtttcgctgtcggcgcatgtgccggacctgccgatcgttggtcatttaccgtatggactggtgatcgccgctattgtgtggtcgctgatgggaaccgggctgctggcggtggtcgggatcaagctgccgggcctgcaatttaaaaaccagcgggtagaagccgcctatcgtaaagagctggtgtatggcgaggatgacgccaaccgcgccacgccgccgaccgtgcgcgagctgttcaacgcggtgcgccacaactacttccgtctctatttccactatatgtatttcaatatcgcccgtattctttacctgcaggtggataacgttttcggcttgttcctgctgtttccgtcgattgtcgccggtacgattacgctcggcctgatgacccagatcaccaacgtgttcggccaggtacgcggctcgttccagtatctgataagttcgtggaccacgctggtggaactgatgtccatctataaacgtctgcgcagctttgagcgcgaactggataacaaagggctgcaggaagtctcttcaaccgttaattaa

SEQ ID NO: 87217 - DNA, 534 bp, Enterobacter aerogenes
atggcatctcaacgggttctgatggtagtggatatgcaaaacggcgtattcgagacgccgcgtgtcgatcgcgaacgctgcgtggcgcaaatcaatcgcctgattcacgccgccgatagcgttattttcattcagcacgctgaagcgggtgggctggaagagggaagcgaggggtttgcgctgctgcctgaactggcgcaacccgccggggcgcgctacgtcaccaaaacggcctgcgatgcgttttataaaaccgatcttgaacaagtgctgcgcgagagcggaactcacgcttttgttatctgcggctgcgcgaccgattattgcgtcgataccaccatcaaaaacggcgccagccgcggctacgccatcaccatcgccgaagatgcccataccaccgccaaccgcgccgccgccgaggccaaaacgctgatcgctcactataacgaggtgtggcggactttcacccttcccgataatccattacgcgtgaaacccgtagaaacaattcttgccgaatggcagacgaactaa

SEQ ID NO: 87218 - DNA, 1170 bp, Enterobacter aerogenes
atgcctccgttgaaacgtagtttgctcatttttgctgcgctgtgcgcggcgtcgtggacctcagcccaggcggttcagccgagcgttgatccggtatttacttctgatgtggtcgaccgcttcgccgaacatatttattacggcagcggcgccaccggcatggcgatggtggttatcgacggcaatcagcgcgtattccgcagcttcggcgaaacgcgccccggtaacaatcagcatccacaattggattccgttatccgtatcgcctctctgagtaagctgatgaccagtgaaatgctggtgaaactcctcgatcagggcgtggttaagcttgacgatccgttgagcaaatacgcgccgcctggcgcacgggtgccaacctaccagggcgtaccgattacgctggtcaacctcgcgacccacaccagcgccctgccgcgcgagcagcccggcggcgcggcgcatcgcccggttttcgtctggccgacccgccagcagcgctggaactggctgtcgacggctacgcttaaaaccacgccgggttcgcaggcggcctattccaacctggccttcgacctgctggccgatgcgctatcgaccgccgccggtaagccctacccgcagctgtttgaagaacaaatcacccgtccgctcggcatgaaggacaccaccttcaccccatcgccggaccagtgtcagcgcctgatggtggcggagaaaggcgccagcccgtgtaataacaccctcgcggccatcggcagcggtggcgtgtattcgacgccgggcgatatgatgcgctggatgcagcagttcctctcttcagatttctatacccgcggccagcaggccgatcgcatgcagacgctgatttatcaacgtacccagctcaccagagtgatcggcatggatgtaccgggtaaagccgatgcgctgggtctgggctgggtgtacatgaagccgaaaaacggccatccgggcattattcagaaaaccggcggcggcggcggatttattacctatatggcgatgaacccccaggcaaacgtcggggtcttcgtggtggtgacccgttccgcgttaacccgtttcagcgccatgagcgacggcgtcaacgatctcgtcagcgccttaagcggcgtgcagccgaatatggaaaccgccagccagtaa

SEQ ID NO: 87219 - DNA, 975 bp, Enterobacter aerogenes
atgacagatttaatcactcgcccacgccgcctgcgtcaatccgcctcgctgcgcgccatgtttgaagagacaacactgagtttgaacgacctggtgttgccgatctttgttgaagaagaaattgacgattacaaagccatcgaagcgatgcctggcgtcatgcgtattccggaaaaacatctggcgcgcgaaattgagcgcatcgccaacgccggtatccgttcagtgatgacttttggcatctcccatcataccgacgcgaccggtagcgatacctggaatgaaaacggtctggtggcgcggatgacccgtatcgccaaacaggcggtgccggaaatggtcgtcatgtccgatacctgcttctgcgaatacacctcgcacggccactgcggcgtgctgtgcgagcacggcgtcgataacgatgcgaccctggaaaacctcggtaagcaggcggtggtcgccgcggccgccggcgctgatttcatcgcgccatccgccgcgatggacggtcaggtacaggcgatccgccgttcgctggatgccgcgggctttaccaataccgcgattatgtcttactcgaccaaattcgcgtcatcgttctacggcccgttccgtgaagccgccggtaccgcgctgaaaggcgatcgtaagacctaccagatgagcccgatgaaccgtcgcgaagcaattcgcgagtcgctgctcgatgaagcccagggcgcggactgcctgatggtgaaaccggccggcgcctatctggatatcctgcgtgatatccgcgagcgcaccgacctgccgctcggcgcttatcaggtcagcggcgagtacgcgatgatcaaatttgccgcgcaggctggcgctatcgacgaagagaaagtggtgctggaaagccttggcgcaattaaacgcgcgggcgcggacctgatcttcagctatttcgccctcgatctggccgagaaaaaaatcctgcgttaa

SEQ ID NO: 87220 - DNA, 492 bp, Enterobacter aerogenes
gtggttgcttatcgacgctattacatcaaggggggaacctggttctttaccgttaatttgaaggaccgtagaagcatgcttctgactgaaagaattgcattatttcgctactccgtttccgttgtaaaacaacgttgcccttttatcattaatgcctgggtggtattgcctgaacatctccactgtatctggacacttcccaataatgatgacgatttttcttcacgctggcgcgatatcaaaggctgctttagcagaacactaaaacgacaacatatctggcaacctcgcttctgggagcatgccatacgtgatgaagaagattatcgccgtcatgtagactacatccatatcaatccactcaagcatggttgggttacgcaggttatagattggccattttcaacctttcatcgagatgtccaacgcgggctatatcctgcaaactgggctggcgaaagctttgaacttagctgcggcgaacgccgatag

SEQ ID NO: 87221 - DNA, 1701 bp, Enterobacter aerogenes
atgtttagtctcgacaacgttctcgatgacctgtggcctcaggcgaggcccgccccctggcagaaaaaggtgttgaaaaagcttctgcatgaagaagagttccagcaatttgccgcccgccatcgtcacctgaaaggactggatacggtcgaacaggtcctcgaacatctcaatatccgttgcgctattccggcgcatgacctcgaacaaatccccgaacatggcccgctggtgattatcgccaaccatccgaccggcacgctcgatggtctcgctctgctctatgcggtctcccgcgtgcgtcgcgatgtcaaagtcgtcactaaccgcatgctgacccatcttgaaccgctgagctcgctgtttattccggtggataatatcaacggccgtaccgccaaagcagcgctgcagcagatggaccaacagcttcagcagggcggcgtgctgatcttcttcccggcgggggaagtctcgcgtctgacccgccgcggcatccgtgataaaaaatggcatcccggcttcatcaagctggcggcgaaataccgcgcgcctctgctgccggcgtggatccgcgcccacaacagcccgctgttctacgccagcgccctgttctccgagagtctgccgctgctgctgttaatgcagcagatgtttcgccgccgcgatagcagcttgccgttacgcattggccagcaaatcgcgtggtcatcgtggcatcagccgccgctttccgcccgcgaactggcggaccgctgctaccgccacgtcgagcgcctcggtaaaggacaccccggcctgtttaaaagcgaaagcgcgatcgcccgcccggaagaccgcgcgctgctcaaacgcgagctggcaaaaaccgaatgtctgggcaaaaccgcggacggtaagctgatttatctgtggcagcgcaacggccaggaagaggcgccgctgctacgcgaactgggccgtctgcgggagatcgctttccgggcggtcggcgaaggcagcggcaaacgccgcgatatcgatagctacgatgatgactatctgcacctgattttatgggatgaagaggatctggagatcgtcggcgcctatcgttttatgcctaccgccatgcaactggagaaacgaggactggagggcatctacagctacagcctgttccactacgacgcacggatggacgatattctgcagcacgggattgaactggggcgcagcttcattcagccgcgctactgggggcgccgcgggctggattatctctggtcaggcatcggcgcctggctggcgcgaaacccgcactatcgctatctttttggcccggtctcaatttcaggcggactgccgcccgatgcccgcgatttgctggtcgccttctaccgcttatggtttccggcgacgcatccgctggccaaatcccgtcgcccctacccagcttcgctacccgaggtgctggcgcagtttggcggcgaggattacaccgaagacctgacgcggctgaagtccctgctcggcaacctcggctgcggcatcccgccgctgtataaacagtactcggaagtgtgcgagccgggaggcgtgcagtttatcgatttcggcagcgacccggactttaatcactgcgtcgatgggctggtgctggtggatttaacctacctgaaagccaaccgctaccagcgctacatcggcgcgcatctctag

SEQ ID NO: 87222 - DNA, 852 bp, Enterobacter aerogenes
atgagtgaacgtctgagcattaccccgttggggccgtatattggcgcgcaggtggccggagccgatttgacccgtccgttaagcgataatcagtttgagcagctataccacgcggtgctgcgtcatcaggtggtgttcctgcgcgagcaaaatatcaccccgcaacagcagcgcgatctggcgttacgttttggcgatttgcatatccatccggtctatccgcatgcgccgggcgtggatgaaattatcgtgctggatacccataacgataatccgccggacaacgataactggcataccgacgtgacctttatcgatacgccgccggcgggggcgattctggcggcgaaggcgttaccttctaccggcggcgataccctgtggaccagcggtattgccgcctgggaagcgttatccgaaccgttccgccagctgttgagcgggttacgcgcggagcacgatttccgcaaatcgttccaggagtacaaatacaacaagacgcaagcggagcatcagcgctggcgcgaggcggtggcgaagaacccgccgctgttgcacccggtggtacgtacccatccggtaaccggtaagcaggcgctgttcgtcaatgaagggtttaccacccgtattgtggatgtcagcgagaaagagagcgaggcgctgctgaatttcctgtttgctcacgtcacaaaaccggaattccaggtgcgctggcgctggcagccgaacgatgtggcgatttgggataaccgggtgacgcagcattacgccaacgccgactatctgccgcagcggcgcatcatgcaccgcgcgacaattcttggcgataagccgttctaccgggcgggataa

SEQ ID NO: 87223 - DNA, 828 bp, Enterobacter aerogenes
atgagcgtggtcctcaatgataaaccgcgccagcgcgcgctgaagtggcgctggccgctctcacggcagctgacccttagcgtggcgacgctggcggtgttgctggctatctggtgggcggtgaccgcgctgcagctgattagcccgctgtttttaccctcgccgtggcaggtattacagaagctactgaccattgccgggccgcaaggctttatggacgcgaccctgtggcagcatctggcggcgagcctgacgcgtatcgccatcgcgctggtactggcggcgatcgttggcgtgccggtggggatcgccatgggattgagtccaacggtacgcgggatcctcgacccgctgatcgaactgtatcgtccggtaccgccgctggcgtggctgccgctggtgatcatctggttcggcattggcgaaacgccgaaaatcttactgatctatctggctattttcgccccggtagtgatgtcgacgctggcgggggttaaaagcgcgcagcaggtccgcgttcgcgccgcacagtctttaggggccagtcgcgctcaggtgctgtggctggtgatcctgccgggcgcgctgccggaaattcttaccggcctgcgcattggccttggcgtcggttggtcgacgctggtggcggcggagctgattgccgccactcgcggcttaggttttatggtgcaatccgccggtgaattcctggcgaccgatgtggtgttagccgggatcgcggtgattgcgataatcgcatttgttctggaactgggactgcgcgcgttgcagcgccgcctgacgccctggcatggagaagtacaatga

SEQ ID NO: 87224 - DNA, 768 bp, Enterobacter aerogenes
atgctgcaaatctcgcatctttccgctgattatggcggtaaaccagcgctggcggatatcaacctgacgctggacagcggcgaactgctggtggtgctgggcccctccggctgcggcaaaaccacgctgctgaacctgattgccggattcgtgccctaccagcacggcagcatcacccttgaaggccgccgcatcgacgggccgggcgcagatcgcggcgtggtgtttcaaaatgaaggtctgctgccgtggcgcaacgtgctggataacgtcgcgctgggattacagctggcgggagttgaaaagacccgacgccgggaaatcgccgcgcaaatgttgaaaaaagtcggcctgcagggggcggaaaagcgctttatctggcagctttccggcggccagcgccagcgtgtcggtattgcgcgcgcgctggcggcggatccgcagcttctgctgctggatgagcccttcggcgcgctggatgcctttactcgcgagcagatgcaaaccctgctgctgcgcctgtggcatgaaaccggcaagcaggtgctgttgattacccacgatatcgaagaagcggtatttatggccagcgagctggtgatgctgtcgccggggccggggcgggtgcaggaacgcctgccgctggagtttggccgccgttttgtcgccggtgaatcctgccgcagcattaaatcggatccgcaatttatcgcccagcgcgaatatgtgcttagcagggtgttcgaacaacgggaggctttctcatga

SEQ ID NO: 87225 - DNA, 963 bp, Enterobacter aerogenes
atggcattcacatcgcgaattactcttctggcggcgctggctttcgctgccttccaggcgcaggcggttaacgtcaccgtcgcctatcaaacctccgctgaaccggcgaaagtcgcccaggcggataacaccttcgccaaagccagcggcgccaccgttgactggcgtaaattcgacagcggctccagcatcgtacgcgcgctggcctcaggcgatgtgcaaatcggcaacctcggctccagcccgctggcggtggccgccactcagcaagtaccgattgaagtgttcctgctggcctcaaagcttggtaattccgaagcgctggtagtgaagaaagatatcactaagccggaagatctgattggcaagcgcattgcggtaccgtttatttcgaccacccactacagcctgctttccgcgctgaaacattggggaatcaaaccgggccaggtgcagattatcaacctgcagccgccggcgattattgccgcctggcagcgcggcgatatcgatggcgcttacgtgtgggcgccagccgttaacgaactggaaaaagagggcaaggtgctgaccgactccgcgcaggtggggcaatggggcgcgccgacgctggatgtctgggtcgtacgtaaagactttgccgagcagcatccggatatcgtgaaagctttcgctaaaagcgccatcgacgcgcagcagccctatatcgccaacccggaggcgtggctgaagcagccggaaaatctcagcaagctgtcgcgactgagcggcgtgccggaggcggatgtgccggtgttagtcaaaggcaatacctatcttaccgccgcccagcaggcgcaggagcttaacggcccggtgaaccaggcgattatcgataccgcgaaattcctcaaagagcagggcaaagtgccggccgcaggaaccgattatagccagttcgttaccgaccgtttcgtgaaataa

SEQ ID NO: 87226 - DNA, 933 bp, Enterobacter aerogenes
atgccgcagaataatccgctaaccgcaatccttgaaacgcaaccgttcgtgctgctggatggcgcgatggcgacggagctggaagcgcgcggctgcaatctggccgatagtttatggtcggcgaaggtactgctggagaatccgcagctgatccgcgatgtgcatctcgactatttccgcgctggcgcacaggtggcgatcaccgccagctatcaggcaacgccggcaggctttgccgcccgcgggctggatgaggcgcagtcgaaggcgctgataggtaaaagcgtcgagctggcgcgtaaagcccgcgaggcgtatctggcggaaaacccgcaggcgggaacgttgctggtggccgggtcggtcgggccgtatggcgcgtatctggcggatggctccgagtatcgcggcgattatcagcgcagcgcggaggcgtttcaggcgttccaccgcccgcgcgtcgaagcgctgctggatgccggggcggacctgctggcctgtgaaacgctaccgtcgtttgccgaaatcacggccctggcggcgctgctgcgtgactacccgcgcgcccgcgcctggttctcattgaccctgcgcgacgccgaacatctcagtgacggcacgccgctgcgcgagggtgttgcggtattggccgataatccccaggtgctggcgctggggattaactgtatcgcgctggaaaataccaccgccgcgctgcagcatctgcacagcctgacgtcgctgccgctggtggtctatcctaactccggcgagcactatgatgcgctgaccaagacctggcatcatcacggtgaagcctgcgcgacgcttgcggcctatttgccgcagtggctggcggctggcgccaggctgattggcggctgttgtcgcaccacgccgcaggatatcgccgcgctggcggcgggccgctaa

SEQ ID NO: 87227 - DNA, 1410 bp, Enterobacter aerogenes
atgcaaacaacatcacaacaacaaggtgggcaacttaagcgcaccatgaaaacgcgccacctgattatgctctcgctgggcggcgtcattggcacagggttattcttcaataccggctatattatctcgaccaccggcgcggcgggcacgctactggcgtatctgatcggcgcgctggtggtctggctggtgatgcagtgtcttggcgaactgtcggtggcgatgccggaaaccggcgcctttcacgtgtatgccgcgcgttatctcggcccggcgaccggctataccgtggcgtggctctactggctgacctggaccgtggcgctcggctcgagctttaccgccgccggattctgtatgcagtactggttcccgcaggtgccggtgtgggtctggtgcgtgattttctgcgcggtgattttcgccctgaatgttatctctacccgcttctttgccgaaggcgaattttggttctcgctggtcaaagtgatcaccatccttgcttttattattctcggcggcgcggccatcttcggctttattccgctgaccgacggttcaccggcgccggggctgcataacatcaccgccgaaggctggttccctcatggcggcctgccgatcctgatgactatggtggcggtgaacttcgctttctcgggcaccgaacttatcggcatcgccgccggcgagacgcaaaacccgcatcaggtgattccggtcgcaatccgcaccactattgcccggctgattattttctttattggcaccgttttcgtgctcgcggcgctgatcccgatgcagcaggcgggggtggaaaaaagcccgttcgtactggtgtttgaaaaggtcggcattccttatgcggcggatatttttaactttgtgatcctgaccgcgattttgtcggcggccaactccggcctgtatgcctccggacggatgctgtggtcgctatcaaatgagaagacgttgccagcctgctttgccaaagtgaataaacgcggcgtgccgctaaccgcgctgtcggtaagcatgctgggcggcgtgctggcgctgttttccagcgtagtcgcgccggatacggtgtttgtcgcgctgtcggcgatttccggttttgcggtggtcgcggtatggctgagcatctgcgcgtcgcattttgtcttccgccgccgccatctgcaacagggcaaagcgttaagcgagctgcactatcgcgcgccgtggtatccgctggtgccggtgctggggtttgtcctctgcctggtggcctgcgtggggctggcctttgacccaagccagagtattgcgctgtggtgcgggatcccgttcgtcgcgctgtgttatggtgcttactatctgactcgtacacggaaattaactcaggagccgcaacatgccgcagaataa

SEQ ID NO: 87228 - DNA, 177 bp, Enterobacter aerogenes
atgaaagtagcgctgtggcaacggattaccggctggctggcttttttatctaacggagaagccgggcagcaagatggtcaacggatgatggaggcgatcttgccggtcgccagcctgtatggcgtggatctcggcaacgtggaaacccggtggtttcgccatgacaaaacatactga

SEQ ID NO: 87229 - DNA, 861 bp, Enterobacter aerogenes
ttgtgggagcgtgataaacacaaaacaaaacagggattcaggggaatgatgatgcataaaacttataccaaaatcgcttttgcgctgggcgcgctgctgctgaccgcccaggttcaggccgaccagttagccgatatcaaagccgccggggtggtgaaggtcgccaccttcgacgctaacccgccgtttggttccgtggatgccaaaacccatcaactggtgggttacgacgtcgatttcgcgcaggcgctggcgaaatctcttggcgtcaagcttgagctggtggccactaacccggctaaccgtattcctctgctgcagtccggtaaggccgacctgatcgtcgccgatatcaccattaccccggagcgtgcgcaggtcattgatttctcaacgccctactttgtgaccggccagcagttcctggttccggctaagtcgccggataaactggatgactacagcaaagcgcgcatcggcgcggtaaaaggcaccaccggcgaacaggcgctgcaccagcgcttcccgcagtcgcgggtgctctcctatgacgatattccattggcgctgaccgccctgcgaaacggcaacgtgcaggcgataacccaggacagcaccattctcgccgggctgctggcgggcgcgccggataaagccaactttaaaattctgccggatttgctgagcaaagaagagattggcgtcggtgtgaaaaaaggcgagccggcgctgctgaaagcggtgaacgacgagctggttaagctggaaaaatccggccaggcggcgaaaagctacgacacctggtttggccctggcaccgcctctccgcagccgcgcgcctttaccatagaagcgaaataa

SEQ ID NO: 87230 - DNA, 819 bp, Enterobacter aerogenes
atgttttccgccttattttcacgctccgcggcttcggccgcggatttctcgcatctgcagcaggccagtattacctttcgcgacgtggttaaacgctacggcgatcatcaggtactaaacggcgttaatttaacggtcaatcccggcgaagtggtggcgatcctcgggccatcaggatcgggtaaatcaacgctgatccgcctgatcaaccagcttgaatccttaagcggcggcgagatcctcatcgatggcaaaccgacccgccgcctgaccggcagcgcgctgcgccaattgcgcagccgggtcggcttcgtttttcaacagttcaatctctacgctcacctgacggcgcaggagaatattaccctcgcgctggagcgcgtgcacggctggcaacacgatgccgcccaaaagcgggcgctggaattactcacccaggtcggtctcacggataaagcgcggcagatgcccgctcagctctccggcggccaacagcagcgcgtcgccatcgcccgcgcccttgcctcctcgccgcaaatcatcctgtttgatgaaccaacctcggcgctggatccggagatgatcggcgaagtgctgcaggtgatgaaagccctggcccacagcggtatcaccatggtggtggtcactcacgagatgcagtttgcccgcgaaatcgccgatcgggtggtgtttatcgacggtggcgaaatcctcgaaaccgcgccgccggcggaatttttcgcccgcccgcagcatgcgcgtacccgccgttttctgcagaaggtgctcgacccgctacatcaggagagcgttgagtga

SEQ ID NO: 87231 - DNA, 753 bp, Enterobacter aerogenes
gtgatggcgattctcgactggcatggcgtactcagtgggcagccgctgcagtggattatctccggttttctcactaccgtctgggtcagcgtggccgggatgctgctggccaccgcgctggcggtgctgctgctggcgctgcgtctcggcggcggacaccccggccgctggctggtggcggcgtgggtatcgctgtttcgcaatacgccgctgctggttcaactgctgttctggtacttcgccgcctggaacctgctgccgctggcggcgcgcgattttatcaacgactcccatagctggtcgattctaccgggcgacgtctggtggctgacgccggaatttctctgctcaatgtgggggctcggcgtatttacctcggcatttctggtggaagagattgccgccggactgcgcgccgtcagccacggccagcgcgaagcggcgctgtcgcagggatttagcccgtggggggaattacgttttattctgctgccgcaggggctggccaacgcctggcagccgattgtcggccagtacctgaacctgatgaaactctcttcgctggccagcggtattggcttcgccgagctcacctaccaggtacggcaaatcgagagctataacgcccatgcgctggaggcctttgctgtcggcaccgcactatatcttgcgctggggatcgttatggggctggcgctgacgcgcttcggtccaggatatcgtcagccacggagcgcacaacatgaacgctaa

SEQ ID NO: 87232 - DNA, 705 bp, Enterobacter aerogenes
atgaacgctaacctcgcggtgatcgccgacaaccttgattatctgctgtggggacggctggcggaaggccaacccggcggcgtggcgctcaccttactgatggccatcggcgcgaccgcgctggcgctaccgggcggtattctgctagcctgcgccgcctggcgctacggcggagcggtccgtcgtctgctattcctgtgggcggaaattattcgcggtatcccgctgatcttcgttattttctggctgtggtatctgctgccgatgctgaccggcggcgatctgccgggcgcagtaacggtcacgctggcgctggcgtggttcacagccgcctcggtgatgcactcggtgctggcggggctgcgcgccctgcccggcggccagcatgaagcggcgctgacgcagggcttcactcctggccagacgctacgcttaatcctgctaccgcaggcgctgcgcaacgtccagccgtcgctggtcggcatttttatcggcctgctgaaggacacctcgctggcgtttatcgtcaacgtgcctgaactcactaccgtcgccgggcaggtcaataaccgggtgcaaatctacccgctggcgatattcgtctttaccggcgcggtttactatttactgtgctgcgccctcagccagctggcgagccgccgttttaccaggcgtagcgctgacaggcgcttcgcagtcgattga

SEQ ID NO: 87233 - DNA, 909 bp, Enterobacter aerogenes
gtgaaatatcttcccaaattaaaccagctgcaggcgctacggcaggtggcgcgcagcggcagcatccgctcggcggcgcgtgaactggggcaatcgcagccggcgctgagccggacattacgtgagctggagcaaatcctcggtacgcaactttttctgcgcagtaaagaaggcgtcgccctgaccgaagcgggaatcgctttcttacagcgcgcggagtgggtgctggaggagctgcggcgcgcggcggatgaggtggaacagattaaccatgtcacccacggtcggctgacggtcggcttttcgtcgttgattgccctgacggtatttccgcaagtggccgaagggtttaagcaggcgctgccgcaggtgcagatgacggtgaaagaggggcagctttcgtcactgctgccgggcgtccgcagcggagagatagacctggcgatcggatcggtcgacccgatgcatccgccggaaggggtgatgctggaaccgctgtttaccgcgccgttctgtgtcatcgcgcgcaaggggcatccgctggcgcacgagagcgatctgctggcgctgcgtaaagcccgctggctgctgccggtgtcgccgatgggctactaccagcagttacaaaacgagctgattcacttttatcgccaggtgtcgattaccccgctgcgcaccgactcggtcattgtcggtttgcagatggtactggaatccgattatttgaccatcgtcgcgcgcgccatgaaccagccgctgcagcttggcgaaaagctggtcacgctgccggtatccacgctcccggcggcgcagtattgcgcggtgtggtcgcaaaaatcggcgctcaccgccaatgcccggctgtttctcaatcgactgcgaagcgcctgtcagcgctacgcctggtaa

SEQ ID NO: 87234 - DNA, 1194 bp, Enterobacter aerogenes
atgaaaagtcagtctcagatgatcttcttactgtttatcggctacgtggtcgtttatatcgacaaaaccgtcaccggcttcgcgctgctgcctatcgaaaaggagttcgggctcaacgccgaacaactgggctacattaccggcatcttttttctcgcctattcgctgtttcaggtgccggcgggctggcttaacgatcgcattggctacaaaacgatgctcgtgctgtcgctggcggcgctggggatattcgcgctgtgctttggcctgctgggagcgagcttcggcctgctgctgctgttccgctttctgtcaggcgtcggccattcaggctatccctgctcctgcgccaaggcggtggtaagcaacttcactctggaacaacgtaccttcgcccaatcgatattgctgtcgtcagcgggactggcgatgaccattgggccgattatcgccgttaacgcactggcgctgctcggctggcatctgtcgttcaccgtactggggatcgtggcctgcgccatcgccctgctgatcgccctgcgcgtgccgcgccggcaaccgacggcggtggtcgcgaaacagagcgccgccggcgccgccctgtggcgtaaccccacggtaatcctgctctttctggctatcttttgcgtcaatattcccagctatggcctgatggcctggctaccgaagttttttgttcagagtatggggatgtcgctgtctgcatccggctacgtggtggccgcgggcggtctggggatctggatctcatcgctgggtaccggctggctggtgggtaaatattttctcaatcgcgaaccgctggtcatcgcgattagcgcgctaatcagcgccgtggcgatcttcgctatcttccatgcccggacgccgctgaccgccagcctgctgctgtttatcggcgaaattttcctgatgtcgaccttcgtcaccgcctttaccctgccgatgaagcgcctgccggaaaatatgatgggctcggctatcggtctgattaataccggcggtaccctcggcggctttgtctcgccgatcgtcattggctatctggtggagaaaacccacggttacgccagcgctttcctgtttctttcactggcgatggtttgctccgcgctggcggtgctgccgctcatgaaacgtaaaaccgtcgtcagtcagcccgttattgattga

SEQ ID NO: 87235 - DNA, 1182 bp, Enterobacter aerogenes
atgcatcacgccactgaacaattaatttccgccgcggccgaggaagcgctgcgctggcgtcgccatatccacgcccatccggatctgtcgtttaacgagaagccgaccgccgattacatcgcccgcgagctggcgctattttccggtctcgagataagccgcccgctggaaaatagcgtgattgccgtactgcgcggcgcgcatcctgggcccatgtgggcgctgcgggccgatatcgatgccctaccgctccaggaagagagcggagaagcattctgctcaacgaagcccggcgtaatgcacgcctgcggtcacgacgcgcataccgcgatgctgatgggggcggcgaaagtcttgtgccagcttcacgaacagctgcacggcagcattaaattcatcttccagcccgcggaagaggtgccgccgggcggggcgcgtgagctggttgagcttggcgtggttgacgatgtcgaacatattttcggcctgcatgttttccccaccagcccggttggcgtgattaccctgaaagagggagtgtacgtcgcttccagcgataactttgatatcaccattcgcggcaaaggcggccacggctcgatgcctcagcactgtatcgatccggtgaccatcggcgcggaagtggtcggcgcgctgcagcagatcgtcgcccgccatatcgacccggccaacgcgccagtgctgactatcgccacttttcaggccggcgatagctataacgtgatccccgacagcgcgcgcctggccgggacgctgcgtacccatagccagcaggtgcgcgaggcggtgccgccgctgatggcgcggattatcgacggcatcaccgccgcccacggcgccagctacgaaatcaaatggcagcagggctatgcggtgggaaataaccacgacgccaccaatcatatcgcccgtgaagctatagcccgccatttcccggcaggcacgctacagctgcaggataaggcgctattcggcagcgaggatttctcctcctatcaggagaaaatccccggaaccttcctgtttatcggctgcggcaatgcgcaaaaaggggcgacgtggaacgtgcacaacccgcattttcgcatcgacgaagatgcgctggcggtcggcattaagacccatatcgcgctggtgagtgagttgctgaacgaggaataa

SEQ ID NO: 87236 - DNA, 696 bp, Enterobacter aerogenes
atgtccaggcgacgtggcgtaacattaattaagctgacgctggcgagcctgtggctgctggccgcgccgctggcgcaggcgatttctgtcggtaatctgaccttttcgctggcctctgacgctgagtttgcggcgaaaagggtgattaacaacaataaaagcgcgcggctatatcgggtgtcggtggtgggtatcgaccggcccggcggccatgaggttcgtgcccgcccggcggacggcgaactgctgttcgccccgcgccagctgacgctgcaggcgggtgaaagcgaatattttaagttctattatcacgggccgaaggataaccgcgaacgctactatcgggtctcgtttcgtgaaattcccacccgcaacctggtgatgcgcgccccggcgggcgggcagatcagcatggagccggtggtggtgatggataccattctggtggtacgcccgcggcaggttcagtttaaatgggcgttcgataaagcggcggggagcgtcagtaataccggcaatacctggtttaagctgctgataaaaccgggatgcgacaccacggaagaggaaggtgacgcctggtatctgcgccccggcgatgtcgttcgccagccgtcgctgcgtaagcccggcaaccactacattatctataacgagaaatttattaaaatcagcaatgattgcccggtgaaataa

SEQ ID NO: 87237 - DNA, 1644 bp, Enterobacter aerogenes
atgaaagctaagtggctagctctgatggtagcgatgctcgcggaactgtcgatatcgcaaacttatgccgcgatctcgaaaactacctggagcgatgcgccagcgcgcgaattcgtcttcgttgaaaacaactctgatgataacttcttcgtcacccctggcggcgcgttggatccgcgtatgaccggtgcaaaccgctggacgggtttaaaatacaacggatcaggcacgatttatcagcagagcctgggttatatcgataatggctataacaccgggctcaatgcaaactggaagttcgacatgtggctggaaaattccccggtatcccatccgctgctggggctacgctgtattaactggtatggcggctgcgatatggcgaccagcctgattcagccgcagactaccgacgctagcggtttttatggcgcgacggtaaccagcggcggcgctaagtggatgcacggcatgatgtctgatgctttctatcagtatctacaacagatgccggttggcggtagctttacgatgaccattaatgcctgtcagacatccgtggcttacgatgcaagcctcggccagcgctgtaaagatcaggcatcaggtaactggtacgtccgtaacgttactcacaccaaagcggcgaatctcaggctcatcaacacccactctctggcagaagtatttattaacagcgatggcgtaccgacgctgggcgaaggaaatgccgattgccagacgcagactattggtagccgtgcgggtttaagctgcaaaatggtcaactataatttgcaaaccaatggcttgagcaatacgtcgatacatatcttcccggcaatcgctaactcatcgctggcgtcggccgtcggggcgtacgatatgcagttcagtctcaacggcagctcgtggaaaccggtgagcaatacggcttattactacacgttcaacgaaatgaagagttcggatgcgatctacgtctttttctcgagcaacttctttaagcagatggtggcgttgggtataagcgacattaacactaaagatttgtttaacttccgttttcagaatacgacttcaccagagtcaggttggtatgagttttctacttcgaatacgttaattatcaaaccgcgtgatttcagcatcagcattatctccgatgagtacacttcggcgccgtcacgtgagggttatgtcggcagcggcgaaccggcgctggatttcggctacatcgtcaccaccagcggtaaaaccgccgccgatgaggtgttgattaaagtgaccggcccgtcacaggcgattagcgggcgctcgtattgcctgttcagctcggcggacggtaccgcgcaggtgccgtttccggcgtcgctctctttcattacccaaagcggggcgacgaaaagttacgatgccggctgcgacgatagctggcacgacatgaccgatgcgctatggctgaccacgccgtggactgatatttccggcgatgtggggcagatggataaaacaacggtgcgcttctcgattgctatggacgatcctatctcgctgcgcaccatcaccgacaacggctggtttggcgaggtcagcgcttcaggagagattcatgtccaggcgacgtggcgtaacattaattaa

SEQ ID NO: 87238 - DNA, 2526 bp, Enterobacter aerogenes
atgcctttacgacggatcacccctggactgaacgcgctgcttgcctccggcatggttcttttgctggcgccttatagcgacagcatggccgccgagcgcgtgcagcaaatcggcggcgtgattatcccgcaggctttcagccaggctttgcaggacggcatgagcattcctctgtttattcatcttgaaggcagccgcgataatcagaacgatcagcgtatcggcgccgcgtatatctggcttgatggcgatgtgctgcgggttcggcaaatcaccctcgaagagggcgatgacaacgctcgcgtcagcgacgagacacgtcaacagctcagccgtttatccaatgaggctttcaacgacgcgctgaagatccccttaaccgatgccgcgcagctgcaacttagtctgcgccagttgctgctacaactggtggtgaaacgtgaggcgctgggaaccgtgctgcggtcgcgcagcgaggatattggccagtcgagcgttaaaactttcagtaataaccttacctacaacctcggggtctacaacaaccagatgcgtagcggtggcagtaatacctccagctatctgtcactcaatagcgttagcgcgctgcgcgagcatcacgtggtgctcgacggctcgctgtacggcatcggcaccagccaccaggacaacgaactgtataaagcgatgtacgagcgcgacttcgccgggcaccgttttgccggcggaatgctggatacctggaacttacaatcgctggggccgatgaccgcgatttcggccggtaaaatctacggcgcgtcgtggggcaaccaggccagttcgacggtatttgataacagccagtcggcgacgccggtggtggcattcttaccggcggcaggcgaggtccacctgatgcgtgacgggcgcctgttaagcgtgcagaacttcgtcatggggaatcatgaagttgatacccgaggcctgccgtacggtatttacgacgttgacgtcgaagttatcgtcaacggaagagtggtcagcaaacgcacccaacgcgtcaacaagctgtttactcgcggacgcggcgcgggcgcgccgctggcctggcaaatctggggcggcagtttccatatggaccgctggtcggaaagcggtaaaaagacgcagccggcgaaagagagctggctggcgggggcgtcggcttccggatcgctgagtacgctcagttgggcggccaccggctacggttacgataacaatgccgtcggcgaaacgcgcatcacgctgccgctgaccgaggcggtgaatatcaacctgcaaaacatgctggccagcgacagctcctggagcagcattggcagcgtcagcgccaccttacccggcggctttagctcgctgtggattaaccaggaaaagaccgttatcggcgataagctgcgccgcagcgatgccgacaaccgggcgatcggcggcacgctgaacctgaacgccctgtggtcaaaactaggcacttttagcatcagctacaacgatgaccgccgctacaacagtcattactacacggcggattattaccagacgatttatagcggctcttttggctcgctaggcctgcgcgcgggcttacagcgctataacaacggcgatagcaacgccaacaccgggaaatatatcgccctcgatttatctctgccgctgggcaactggttcagcgccgggatgacccatcagaacggctataccatggccaacatttcggcgcgtaagcagtttaatgaaggggcgattcgaaccgtcggcgccaatatttcgcgggcgatttccggcgataccggcgacgacaaaaccttaagcggcggcgcttatacgcagttcgaaacgcgctacaccaacggcacgctgaacgtcaacagcggcgccgacggctacgtgaataccaacctgaccgccagcggcagcgtcggctggcaggggaaaaatatcgccgccagcgggagaaccgatggcaatgccggggtgatcttcaataccggtctggaagacgacggcaagctcagcgctaaggttaatgggcgcatcgtgcagctcagcggtaaacgcaactacctgccgctttcgccgtacagccgctatgaagtcgaactgcagaacagtaaaaactcgctcgacagctacgacattgtcagcggtcgtaagagtcacctgacgctttatcccggtaacgtggcggtgatcgagccggaagtgaagcaaatggtcaccgtctccgggcgcatccgcgccgaagacggcacgctgctggcgaacgcgcgcattaataaccatatcgggcgcacccgcaccgatgagaacggtgaatttgtcatggatgtcgataaaaaatatcccaccattgattttagctacggcggaaataaaacctgtgaagtggcgctggagctcagccaggcgcgcggtgcggtgtgggtaggggacgtagtatgcagcggtctctcttcatgggcggcggtgcagcagacaggagaaggtaatgaaagctaa

SEQ ID NO: 87239 - DNA, 669 bp, Enterobacter aerogenes
atgaaaaaacatcttctggccattggcctgctgctgggattggcgaattccgcgctggcgctggatgtcggcgatatctcttcctttatgaacagcggcagcagcacgctgagtaaagagattaaaaataccaccgacagcggccgcttaatcaacattcatctggaacgtctctcttcaccgctggatggcggcaaagtgatcccgatggataaacaggatgaagtcctgttgacccccgccagcttgttattgcccgcaaaggccagtgaagtggtgcgctttttctacaaaggcccggcggatgataaagagcgctactaccgcattgtctggttcgatcaggccttaagcgatgcccagcgcaatggctcccagcgcagcgcggtggccaccgcttcagcccgcatcggcaccattctggtggtggcgccgcgtcaggctaattttcgctaccagtttgccggcgacacgctgaccaataccggtaacgccaccctgcgcatcatcgcctacggcccgtgtctgaaaatcgccgatggcaaagagtgcaaagaaaactactacctgatgccggggaaatcgcgtcgcttcacgcgcgtcaatattgctgacaaaaaaggacgggtcgcgctctggcagggcgagcagtttgttcccgtgaaatag

SEQ ID NO: 87240 - DNA, 588 bp, Enterobacter aerogenes
atgaaaaaaaaggttattgctattgctctggtaacggcgtttgctggaatgggtgttgctcaggctgctgatgtcactgctcaggccgttgctacctggtctgcaaccgcgaaaaaagacacttccagcaaactggttgttaccccgcttggcagcctggctttccagtatgccgaagggattaaaggctttaactcacaaaaaggtctgtttgatgttgcggttgaaggcgataccacggcgactgccttcaaactgacttcacgtcttattactaacactctgactcagctggatacctccggctcaacgctgagcgtgggcgtggattataacggcgccgcggtagaaaagagtgctgacaccatcatgatcgacaccgctaacggcgtactgggcggcaacctcagcgcgctgtctaacggctacaacaccgcaggccgcaccaccgcgcaggacggctttaacttctccatcatcagcggtaccaccgacggcaccaccgcggtaaccgattacagcacgctgccggaagggatctggagcggtgacgtgagcgtgcagttcgacgcgacctggaccagctga

SEQ ID NO: 87241 - DNA, 543 bp, Enterobacter aerogenes
atggacgatcaatgctcccttgataagtgtatttggccagcacatgatacttattttttaaaaggcttgtcggaactcatcttagatatcgaagaacttatttatttgtcactggataaaatatgtaaggactttttgtttatcaatctgagtaccaatgcattaaattactttattcgctatgacaacgactggttagccaaggccaagggcaaacaaatcattctgattgccgcgagaaagtcagaagcgttagccaattattggtattacaacggtgatattcgcggcgtggtgtatgtcgacctcgcgcgcgatataagaaaagatctggcctatgtaattaatggtcggtttctgcgtaaagatattaagaaagaaaaaattactgaccgggaaatgacggtgatcagaatgacggcccaaggaatgcatccgaaatctatcgccagaattgaaaattgcagtgtgaaaactatttatacccatcggcgaaatgctgaggccaagctgtattcaaaaatttataaattagttatgtaa

SEQ ID NO: 87242 - DNA, 843 bp, Enterobacter aerogenes
atgaacagctctcttgccgcggtggcggaaaccgaattttcgctaattacgcccatcgccccaacccggcagcggaaagtcttaagcgtgcgcaacctgagtaaatcttataatgcgcagcaaaccgttctcgataacatcagctttgacctccatgccggcgagctggtgggcgtgattggccgctcgggagccgggaaatccacgctgctgcatgtcctgaacggcactcatagcgccaccggcggtgaaatactcagctttccggaagtcggtatgccccatgatgtttcacgcctgaaaggacgcgcgctcaatgcctggcgcagcgaatgcgggatgattttccaggacttctgcctcgtgccgcgccttgatgtgctgactaacgtactgctcggccgcctgagtcaaacctcaaccctgaagtcgctgtttaaggttttccccgacgccgaccgggcgcgcgcgatttcccttctcgagtggatgaatatgttgccgcatgccctacagcgggcggaaaacctctccggcggccagatgcagcgcgtagcaatttgccgtgcgctgatgcaaaaccccgggatcctgctggcggatgaacccgtcgcctcgctcgatcccaaaaacacccagcgcatcatgaatgtactgcgggaaatcagcggccaggggattagcgtgatggtcaacctgcattcggtcgaactggtcaaagagtactgcacccgggtcattggcgtcgccaaaggccgcatcatattcgacgatcatccggcacagctgactcaggatgtcctgcatcggttgtacggcgatgaaattagccaattgcattaa

SEQ ID NO: 87243 - DNA, 942 bp, Enterobacter aerogenes
atgaacaaacacattaatggcgcagttcgtttatccgcagcaatcgcagctctgttactgacgtggcaagcgagcgccgctgaacagccgaaggaattaaatctggggatcctcggcggtcaaaacgccacgcagcaaattggcgataaccagtgcgtgaaacagttccttgataaagagctgaaggtcgataccaaattacgtaactcatccgattattctggcgtcattcagggactgctgggcgggaaagtcgatgtcgtattaagtatgtcgccttcttcttatgcctcggtctatatcaataacccgaaagccgtcgatattgtcggtatcgccgttgacgataaagatcaatcccgcggctaccactcggtggtcatcgtcaaagctgacagcccgtataaaacgctggacgatttaaaaggcaaagcttttggcttcgccgacccggattccacttccggttatttaattccaaaccacgcctttaaacagaaattcggcggcgacgcggataacaaatacaataatttcttctccagcgtgaccttctccggcggccacgaacaggacattctcggcgtgctgaacggccagtttgccggcgcggtcacctggacctcaatggtcggcgactacaacagcggctacagcgtgggcgctttcaatcgcctgattcgcatggatcatccggatctgatgaagcaaatccgtattatctggcaatcgccgctgatcccgaacggcccgatcctcgttagcaatgcgctgccggcggacttcaaagccaaagtcgtcaccgcgcttaaaaaactggataccgacgatcatgcctgttttgtgaaagcgatgggcggtactcagcacatcggcccgggcagcgtggccgatttccaacagatcatcgatatgaaacgcgagctggttagcgcgcgttaa

SEQ ID NO: 87244 - DNA, 873 bp, Enterobacter aerogenes
atgaataatacccataccgaatttgaacgttattaccagcaggtcaggacacggcaaaagcgcgataccttcggctggtcgttggtgctgctggcgctctactttgccgccgggcacgccgccgagtttaatctgcccactatctggcgctcgttgccaaactttctcgactatatgttcgagacgctgccgacgctgcatccgggcgttctgttagccgattcacataccaaaggctcgctggcgtactggggctatcgcctgccgattcagctaccgctgatttgggagacgctgcagctggcgctggcctccacgctggtggcggtcgcggtagcgacaatactggctttcctcgccgccaataatgcctggtcacccgcgccgctacgcttcgccgttcgcgtgctggtggcctttttacgcaccatgcctgagctggcctgggcggtcattttcgtcatggcgttcggtatcggcgcgatccccggttttctggcgctgatgctgcatacggtcggcagcctgaccaaattgttctatgaagcggtggaaagcgcgcaggataaaccggtgcgcgggctggcggcctgcggagcatcggcgctgcagaaggtgcgctttgccctgtggccgcaggtgaaaccaatttttctctcttacggcttcatgcgccttgagatcaacttccgctcatccaccattcttggcctggtaggggccggcgggatcggccaggagctgatgaccaacattaagctcgatcgttacgatcaggtcagcatgacgctgctgctgatcattattgtggtgtcgctgctggatatgctttccggccgcctgcgccagtgggttgtggaggggaaaaaatga

SEQ ID NO: 87245 - DNA, 885 bp, Enterobacter aerogenes
atgagtcaatggcaacatcaaccggatatcgccgccagccgccgccagcatcaggcgctgtataagacccaagggcgatatctgcgctacgtcggcctgctggcgctggcgagcgtactttattacgtctggttctttatgcagttcggtatcagtagcgaacaactggctaccggactacagcagatggggcgctatctgctgcggatgtttgtctggcacgacttctggaactggccgtttgcctattacttcacgcaaatcgccattacgcttgccatcgtcttcgccgggacgattaccgcgacggtcatcgcgctgttgctgtcattcctggcggcgcgcaatattatgcgcggcgtgattcccggcattatcgccgtgttgatgcgccgcttgtttgacatgctgcgcggtatcgatatggctatctggggtctgattttcgtgcgcgccgtagggctcgggccgctggcgggggtactggcgattattatgcaggataccggcctgctgggccgcctgtatgctgaaggccacgaggcggtagaccgttcgccgggccgcggcctcaccgccgtcggcgctaatggtctgcagaaacaccgcttcggcattttcacccagtcgttcccgactttcctggcgctgagtttatatcagattgaatccaacacccgttccgccgcggtgttaggttttgtcggcgcgggggggattggcctcatttacgcggaaaatatgcgtttgtggaactgggatgtggtgatgtttattaccctgttgctggtcgcggtggtcatggtgatggacaccctctccgcctggctgcgccgccgttacatcggcggcagcgtagtgccgttgtatcaaagtccgcaataa

SEQ ID NO: 87246 - DNA, 666 bp, Enterobacter aerogenes
atgtctaatgctgtgacgattttcgatctggataacaccctgattaaaggggacagtagtacgctgtggagccagtttatggtgcgcgaaggctgggtgagcgatccggaatatctggcgcgcgaggcgcagctgatggcggattacgaccgcggggaaatgaatatcgccgattatgttgcgctgattcaggcgccgctgatcggcatcccgcaggcgcaggtggatacgctggtggcgcgattcgtgcgcgaaaaggtgttgccgcgggtctacccgcaggcatgggacgttattcgtactttacaggcgcgaggggagaaaatgttggtgatctccgcctcggtaacgctgctggtgcaggcgatagccgccgagctggggattgaacaggcgttgggtattgatgttgaaatggcggatggcggctacagcggtgtgattgccggtaccccgagctatcagcagggtaaagtgacgcgccttgcgcagtggcgcgaggcgcatcctgactatactggcgaagtcactttttataccgattcgataaacgacctgcccctgtgcctgcatgcggatcgcgtgcggttggtcaacccgtgtccgcagctgcaggcagccaacgcccggtacggctggccagtgctggcgtggcggatcgaataa

SEQ ID NO: 87247 - DNA, 798 bp, Enterobacter aerogenes
atgatatttgggctttttgtttgtggactgttatccggggtaaccacctggctgtttggcttcggcggcggctttgttaccgtgccgctgctttacctgttgctgagccatcagggcacagtaggcggtcaggcgatgcaaatagcggtagcgacgtcggcgctggtgatgctgtgcacgtcgctgttggcaagcggccgccacctgcgcgtcggaacggttcactggcgctccctgctgccgatacttggcggcatcgccatcggcggtattgccggcgcggcgctggcgctgagggttaacggcgagtggatccgctggctgttcattttgtacctggcggtgaccatggtggattgctacgttcgccccggctttatggcgccgtcgacggcttgcgcaccgtcgagtgcagggcgcgagactatccttggcggcgggattggcctgattgccgccttccttggcgttggcggcagcgtgatgaccgtgccgctgatgcgccggcgtggcgcgacgatggcgcaggccgcggcaatggccaacctgctgacgctgccgctggcggcgaccgccagcctgacgtggctgctgatggcgccgatggcggcgctgccctccggtttcatcggtaatatctggtggctggcggccgggctgctggtggccgggagctggttgggattgcggggcgcatcgcgctggctggcaaaactccccgatcgctggcacgtgcggatctacccgctactattgctactggtgctgctggcgatgtgctttggcggggtgggctga

SEQ ID NO: 87248 - DNA, 798 bp, Enterobacter aerogenes
atgcgcaatatcgcgattaatgatgtcgatcatctgccgcgccgggtattaggcctgggtagcgattatccgcctgacacccttttaccgcgccatcatcaccggcgagcgcagtttctctatgccgtgaatggcttgatgaaagtcgaaaccgatgacggtcagtggctggtgccgccgttcagcggcgtatggatacccgctaacaaaccgcatcgcgtctggatgccgggcgtgagcacccatagtctgtatatcgaaccgcaggacgcgccgcgcgccggggtacgctgcgaagtattgcaggtttcgccgctgctacatcaactgctattggccgcctgccagttgccgctgttgtatgaagagagcggacatgatgcggcgcttatcgccctattactgtttgaactgcaggccgccccgccgctgccgatgtttacgccgctaccgcaacatccgcggctggctgaactatgcagcgcgtttctccgccagccggagattcacagtacgccggagctgtgggcccaaaagatgagtcaaagcctgcgtaccttcaaccgccgctttttgcaggagaccggaatggcgtttcgcgactggcgtcataaagcctgcctgatgtacgctctcaccgccctgcgagaaggacgaagcattaccgacgtggcgttaagccttggctatgagcatccggcggcatttaccgccatgttccgcaaagcgatgggctatgcgccagcctcttttatccgccatcttaaaggaggcacgcctgtctctcacgtcagataa

SEQ ID NO: 87249 - DNA, 567 bp, Enterobacter aerogenes
atgaagcccaaactcacccacgctttattacttgttcctttattgattttggcaggatgttcatcttccccaaaaaaaccgcccaaggcggtggcgcagcatcattatgagccaatcgacagcggctccgacgatctgataccggtgctggccgccctgcacgatcagatgcacacctgggacggcaccccttatgaatggggcggcaccgaccagagcggcgtcgactgttccggctttgtctggcgtacgctgaaggaccgcttcaatttgccaatggaccgcgtgaccaccggcgatcttctgcatatgggggtgcgggttagcaagcagcagttgcgacctggcgatttagtcttcttccgcattcacggcggcatgcacgtcggtttctacgatactgaccacaacttcctgcacgcctccgccagccagggcgtcatgcgttcgtcgctggataatccgtactggaaccgcgtattttatcaggcgcggcgcttgccgaaggaatataacgcgcagatcaccatgaataacgacaatctgcatctggcgaaaaaccgctaa

SEQ ID NO: 87250 - DNA, 1053 bp, Enterobacter aerogenes
atgaaaaagcgttcactggcattaatgatgatgggttttgttgcttcttcggcttcacaggcagcggaagtatacaataaagacggcaataaactggacgtgtacggcaaagtgaaggccatgcactacttcagcgattatgacagcaaggatggcgaccagacctacgttcgcttcggtatcaaaggcgaaacgcagatcaacgatcaactgaccggttatggccgctgggaatccgaattctccggcaataaaaccgaaagcgattcttcgcagaaaacccgtctggcgtttgccggcgtgaagttaaaagagtttggatcatttgactatggtcgtaacctcggcgcgctgtacgacgtagaagcctggaccgatatgttccccgagttcggtggcgactcttccgcgcagaccgataacttcatgaccaaacgcgccagcggtctggcgacctaccgcaacactgatttcttcggcctggtggatggtctgaatatgaccctgcaatatcagggcaaaaacgaaggccgtgaagcgaaaaaacagaatggcgacggcttcggcacctctttaagctatgatttcggcggcagtgatttcgctgtcagcgcggcttataccagttctgaccgtaccaacgatcagaacctgctggcgcgcggccagggctccaaagcggaagcctgggctaccggcctgaagtacgatgccaacaatatctacctggcgacaatgtactctgagacccgcaaaatgaccccgatcagcggtggttttgccaataaagcacagaactttgaagcggttgcccaatatcagttcgatttcggcctgcgtccgtctctgggttatgtactgtcgaaaggcaaagatattgaaggtgtcggcagcgaagatttggtcaattatattgacgtcggcctgacctactacttcaacaaaaacatgaacgcctttgtggattacaaaattaaccagctgaagagcgataataagctcggtattaacgatgatgacatcgtcgcgctggggatgacctatcagttctga

SEQ ID NO: 87251 - DNA, 1104 bp, Enterobacter aerogenes
atgagtgatagccagacgctggtggtaaaactgggcaccagtgttttaacgggcggatcccgacgcctgaaccgcgcccatatcgttgagttagtgcgccagtgcgcgcagctgcatgccatggggcaccgcattgtgattgtgacttccggggccatcgccgccggacgtgaacacctcggctaccctgaactgcccgccaccattgcctcaaaacagctgttggcggcagtcggccaaagccgtcttatccaactgtgggaacagcttttctctatttacggcattcatgtcggccagatgctgctgacccgtgccgatatggaagatcgcgagcggttcctcaacgcccgcgataccctgcgcgcgctgctggataacaatattgtgccggtcattaatgagaatgacgccgtcgccaccgctgaaatcaaagtcggcgacaacgataatctttccgccctggcggccattctcgccggcgccgataaactgctgctgttaaccgatcagccgggactctttaccgccgacccacgcagcaatccgcaggccgagcttattaaagatgtctacggcatcgatgacgcgctgcgcgccatcgcaggcgatagcgtttccggcctcggcaccggcggcatgggcaccaaactgcaggccgcggacgtcgcctgtcgcgcgggcatcgataccattatcgccgccggcaaccgcccggacgttatcggccacgcgatggaaggcctgccggtgggcacctgtttccacgctcaggaatcaccgctggagaaccgcaaacgctggatcttcggcgcgccgccggccggtgaaatcaccgtcgatgccggggcgacccaggctattctggaaagaggaagctcattgctgccaaaaggcatcaaaaccgtcagcgggaatttctcccgcggcgaagttatccgaatccgcagtagcgaaggccgcgatatcgctcacggcgtaagccgctataacagcgacgccctgcgcctgatcgccgggcagcactcgcagcaaatcgatgccatcctcggctatgaatacggcccggtggccgtccatcgcgacgatatgattacccgttaa

SEQ ID NO: 87252 - DNA, 1254 bp, Enterobacter aerogenes
atgctggaacaaatgggcattgcggccaaagcggcctcttaccaactcgcgctgctttccagccgcgagaaaaatcaggttctcaacaagattgctgattatctggaagcgcagaccgaagagatcctgcgcgctaacgccgaggacctcagcgacgcccgcgccaatggcctgagcgacgcgatgctcgatcgcctggcgttgacgccagcgcgcctgcgcggcatcgccgatgacgtgcgtcaggtgtgtagcctggcggatccggtcggccaggtgattgacggtggtctgctggatagcggcctgcgtatcgaacgtcgccgcgtaccgctgggagtgatcggcgtgatttatgaagcgcggccgaacgtgaccgtcgatgtcgcctctctgtgcctgaagaccggcaacgcggctattctgcgcggcggtaaagaaacctggcgtaccaacgccgcgacggtgaaagtgattcaacaggcgctgcaggagtgcggcctgccggctgccgcggtgcaggcaatcgagagcccggatcgcgcgctggtcggcgaaatgctgaagatggataaatacatcgatatgctgatcccgcgcggcggcgcaggcctgcataagctgtgccgcgagcaatccacgatcccggtgatcaccggcggtatcggcgtatgtcatattttcgtcgacgattcggcagagttcgcaccggcgttgaagatcatcgttaacgccaagacccagcgcccgagcacctgcaataccgccgagacgctgctggtacaccgcaatatcgccgataccttcctgcctgcgctgagcaaacagatggcggagagcggcgtgacgctgcacgccgacccggccgccctgccccttctgcagaacggtccggcgaaggtggagccggtgaaagcggagcagtacgacgacgagtatttatcgctggatctgaacgtgaaagttgttgccgatctcgatgaggcgattgcccatattcgcgcgcacggcacccagcattccgatgccattctgacgcgtaccctgcgccatgcaaatcgctttattaatgaagtggattcgtcggcggtatacgttaacgcttctacccgcttcaccgacggcggccagttcggcctcggcgcggaagtggcggtcagcacccagaagctgcacgcccgcgggccgatgggtcttgaagcgctgaccacctataagtggattggcttcggcgacgataccattcgtgcttaa

SEQ ID NO: 87253 - DNA, 627 bp, Enterobacter aerogenes
atggctggacgtattgactatcagattgaaaaatttcagttcatcgagcgcaacgaatccccacgtattacccgccagtgggcggaagttattgctgaatgtcagcaggaaaaggcgaacagtgaaacgcgtttgcgtactgcattgctgaatgtcgactacgccaccagcttcgaactgccgtttcgtttattgcttattcgcgccccgcagctggtggatcgcttacgccatgcgctggcgctgaatcaaaagaacgtggtgattaatggtaagaagcgcggctgcgtttacagcctgaaagccgatctcagcgccgttccggatgagtttcgttatcgctttgtgagccggattattcgcagcgggccggatgcggtttccgccgcgccctatcagcagctggcaaaagagataaaggcgccgcgcgagcggttacgtttggcgctggaaagtggcctgcaggtcaatgcgctggatgggctgttctggtttggtatccagcgtatcgccgcggatatttcggcgctgcgttctgcgggaatggcgattacgactgcggaagtggaggtggcggatagcctgaccagaacgacgcgaatgatagcggcgtatcaggtggggtga

SEQ ID NO: 87254 - DNA, 321 bp, Enterobacter aerogenes
atgaccattgcgttaatcatgcttggtcaacctataaaaaatacccggacaaaaccaggcggagcgactaaagggacgagcattttgagccatgagttacggaaggttttacacaatgacttaaaagtcaggctcccgacgttaaccaaccaatccatccgtaatcttagatggagctatgtcaccaatctgggagcattcgttggacgctggatacccatcctcgggattatttacctgacaggggatgtaatttatgtatcaataaaagcaaccactaaatacatctccattgccagaggtgacgataaattatggtag

SEQ ID NO: 87255 - DNA, 351 bp, Enterobacter aerogenes
atggtagatcaagacaatatcgcggcagccgttctggcatggtatgaaacacaatggaacaagccgacacttaccggcaaaaagcagcaggtgaatgcggatttatcactcaatacgggcgattatccctgggccagagaaagtggcgatgacatcatgaaatcctatttccgccagtttaatgtgaagcaagatacatttgatttttttaattattggcctcccgaacagggtttcctccctaatttcctattaccgaaatccaaacgcatttctccgcacaaaccggagccgttaacactcgcgatgctcattgcgtcagcacaggctgggagatggctgtatcgttag

SEQ ID NO: 87256 - DNA, 1161 bp, Enterobacter aerogenes
atggaaaaatacttcatgatgaaaacatcccttacaggcgtactgctgctgggcgcctcattttcgacttttgccgcgccgcaaacggcggaacagctgcgcgaactggtcaatcagaccatcaccccgttaatgaaagaacaggcgataccgggcatggcggtggcggtgatctatcacggcaaaccctactatttcagctggggccaggccgatgttgccgggcagcgtccggtgacgcgacagacgttgtttgagctgggctctgttagtaagactttcaccggcgtgctgggcggcgatgcggtggcgcgcggtgaaattaagctcagcgatccggcgcagaagtactggccgcagctcaccggccagcagtggcaggggatcacgctgctgcatctcgccacttataccgcaggcggtctgccgctgcaggttccggacgaggtgacggatgaagcggcattactgcgttactatcagaattggcaaccgcagtgggcgccgggtagtaaacggctgtacgccaatgccagcattggcctgttcggcgcgctggcggtgaaaccttccggcatgagctttgaacaggcgatgagccagcgggtattgcagccgttaaaactgagccacacctggattaacgtaccgcccgcccagagcaaggactacgcctggggttatcgtgacggtaaagcggtacatgtttcgccggggcagctggacgctgaggcttacggcgtgaagtcgagcattgaggatatggcgcactgggtgctggcgaatatgaacagcgaggcggtgcaggataaaaatctgcggcaggggatccagctggcgcagtcgcgctactggcgggctggggagatgtatcaggggctcggctgggagatgctgaactggccggtgccggccgaggtgctgattaacggcagcgataataaggtagcgcttgccgcgacgccggtaacggcggtcaatccgcccgcgccgccggtgaaagcctcctgggtacataaaaccggctccaccggcggtttcggcagctacgtggcttttatcccgcaacaggatctcggcatcgtgatgctggcgaataaaagctaccccaacccggagcgggtgaaggcggcgtatcatattcttgaggcgctgcagtaa

SEQ ID NO: 87257 - DNA, 879 bp, Enterobacter aerogenes
atgacacgcagctatcttcctctcaattcactacgggcctttgaagcggccgcccggcatctcagttttacccgcgcggcgattgagctcaacgtcacccactccgccatcagccagcatgtgaagacgctggaggaacatcttaactgtcagctgttcgttcgcgtgtcgcgcggcctcaagctcaccaccgaaggagaaggcctgttaccggtactcaatgagtcgtttgaaaggattgccgggatgctagaccgtttcaccggtcaccaggcgcaggagaagctcaagatcggcgtagtcggcactttcgccacgggtgtgctgttcccgctgctgccagccttctggcgcgagtgtccgcatatcgatttgcagatatccacccataataatcgcgtcgaccccgccgccgaggggctggattatgtgattcgctttggcggcggcgcctggcatgataccgccgcgcagtatctgtgcgccgccccactctccgctctgtgcgccccgtcgttagctgcccggctaaatacaccgaaggatattttgcagttcacgctgctgcgttcttatcgccgagacgaatggtcggcgtggatgcaggcagcgggagaattgccgccttcgccaacccatcgggttattgtcttcgactcatccgtgaccatgctggaagcggcgcaggcaggcttaggcgtggctattgccccggtaaaaatgttcagccatctgctggaagaaaaacgcattgtgcagccgtttaagattcatatcgatctcggcaactactggctgacacgtttgcaatcgcgtccggaaacgccggcaatgttgcatttttcccgctggctggcggaggccttaaaagggggttaa

SEQ ID NO: 87258 - DNA, 528 bp, Enterobacter aerogenes
atgaataagaaattactgcctgttgtagcactgatcctgtccgcgtccgccaccagtgcttacgcagttaacggcaaggtcaacttcaccggtgaaatcatccagtcaacctgtactgtgacttctaccgaccagaacaaagacgttttcatcggtaaatacccgactaccgcgttcaacgctgttggcgatgttaccgcttctaaagcgttcaccatcaacctggaaaaatgtgaagccggtgattactccctgcgcttcgacggtgcgaccgttgctggtaacccgaacctgctgtccgttgataacgcgaaaggcgtaggtatcgaaatcctgaccaacgacgaaaaaatcgtcccgatcaaccagagcgcagacgacaactccccgtgggttaacgttgcagcgtctgacgacaacagcggcactgcggtattcaatctgaaagctcgctacaaatctttcctgaaaaccgtggaagctggctctgctaacgcaaacgccacctttaccatcgagtacaaataa

SEQ ID NO: 87259 - DNA, 684 bp, Enterobacter aerogenes
atgaaaaagttattaaccgctttattgttatttgtctcgctggatacttttgcgggtattcaggtcgatcagactcgggttatttataacggcggggaaaaatctgcggcgttatccattcacaatgataccgatgaaacatggatggttcagacctggcttgataccggtgacgccaccgcaacgccaaccaatttaccgatgcaggctattccgccgattttaaaactggcgggcaataaagacgctattttgcgctttgtttattccggcagcggattaccgaccgaccgcgaaaccgtgtactggattaacgtgcaggaaattccgccttcggcgaaacaagaaaacgtactgcagattgcgatccgtacccgcgtgaagctgttctaccgccctaccacgctgaaaaccaccttgcaaaaggaagcgcaggccctgacctggcgtaagcaaggtaacgatctggtcgtgactaacaaaggtccgctgcacgtgactttcggcgtactgacgctgaagagcggcgcgaagacctggaaagtgaatgctgacatggttaaacccatggactctctgaacatcaaattgccagccggcgcggcggcagcggatcagatgtcattcacttttatcaatgattttggcggacatacggaaattaaagatatccgcattcagtaa

SEQ ID NO: 87260 - DNA, 2604 bp, Enterobacter aerogenes
atggctagccataataaaataaggacgatccctggatgtctggcgcagcacgttcgctttgctgtttacgcctcgacaatgtcattactggcgacaccatttgtcaatgccgaagagcaattcaatacctctttcatccgcggggcgaataacgcctcgctggtgcaaaacctctctaccggcgacgatattttaccgggtaaatatgccttcgatatttacctgaataaaaatcgcgtcgatcaccgggaaatcgaatttaaaaaagatacgcttaacaccccgggttatttctgtttagatgccgacagttaccgttcatacggcgttctggtaccggacaccgccggcagcagcgcctgctacgatctggtaaaaaatattccaggcagtagcgtgagctggaacgccgcgctgcaggagctgaacatttccgtaccgcaaaccgaactcgaagcgcgaccacagggcgagatttcgccgctggtctatgacgacggcatcaacgccggtttcgttaactacgctttcagcggcagccactcccgtttctccagcggcagcagcaaacaggacagcgactactacttcctgaccctcaataacggccttaacgtcggcgcgtggcgttttcgcaacaactcttccctgtcaaaacagaccgggcaaaaagagcagtggaacccgatttccacctgggcggaaaccgacatcgcctcgtggcgcagccgtattcagattggccagagcaacaccaataataacgtgttcgatagcttccagttccgcggcgcgcagatttccagcgtcccggaaatgctgccggacagccgtcgcggctacgcgccggtcgtacgcggcgtcgccaataccaacgcccgcgtcgaagtgcgccagaacggctataccgtctacagcaccgtggtgccgccgggaccgttcgcgctgaccgatatttcgccaagcaccctcagcggcgacttagccgtgacggttatagaggcggatggctcacgccatagcttcaccctgccttactcctccgtgccgaatatgctgcgcgacgggatctgggagtatcaggtgaccgcgggtaaataccacgacggcaccaataattatcagccgcaatttatccagggcaccgtggcccacggcgccggctccgactatacgccatacggcgggattatcatggccgagcactatcgctccggcgtggtcgggctgggtaaaaacatgggcgaatacggggcggcctccgttgacgcctcatggtctgataccgatctggcttccggcgagaacaaacgcggcgccagcgtacgcttcctctattccaaatcgctcaacaccctcggtaccgacgtgcagatcgccggctaccgttattcgacgtcgggcttctatgacttctccgacgcggtagctgaacgtaacaactggcagaacggtttctaccacacccagtattacgatcagagcgacgataaaaccggcgcgccggattgggcgacgcaaaaccagcgccgtcgttactacgactcgcagcagtacaacaacaaacgccagcgcgtcgagatgacggtcaaccagcacatcgccggcgcttcgctgtacgcgacctttatccgtcagaactactggaacacctccgcatacgaccgcaccatccagaccggtttcaacaccacctggaatcgcgtcagcgtcggcgtgttttaccagaacagccgcagtaactacggctatagcgacaacagcgttaacctcaacgtctcggtgccaatcaacatctttggcccggaccacgaaagcacggttaactttaacgcctctaacagcaagcagagcggtagcggctacagcgccgggatgagcggcacactgcttgatgacaaccgtatgaattacttcgtacagagcggccacacccagcacggcggcgataccagcctggtcaacctgggttatctgggcagcatgggtaacgtcgatctgggctacagctacaacaacaactatcagcagacttcgctgaacgtctccggcggcgtggtcgcgcactccggcggcgtcaccctgtcgcagccgctgcagaacacctttgtggtggtgaaagcgaaaggggcgcagggtgtgcgtctggaaaaccagccaggggtcgcgattgaccgcttcggctacgcggtgctcacttctgcgatgccgtatcgccacaaccgcgtcgcgctgcgtacttcggatatcggcaacggcctggaaattccgctggcggcgaaagatatcgtgccgaccgagcgcgccatcggccgcgtgacctttgaaacgcatctcggccagagcctgcttatccacgccaaactggcggacggcagcgtgccggtgattggcgccaatatcttcggccagaacggcgaacatgtcggcgtggtcggtacccgcggcgaagcctacgtttccggcgttcagagcggcgaccgcctgcagatgaaatggggcgacgatgccgacgcctcctgcagcctgacggtgccagagttacctgctattcaagccgatcaacccggtggttatcaggtcgtctccctgacctgtaaataa

SEQ ID NO: 87261 - DNA, 1041 bp, Enterobacter aerogenes
atgtcgaagtttaacctcttaccccgcaccgggctgacgctgctggtactctcaagcgcgctgttctccaccagcagcttcgcgctgagctgtaagaagaacggtaccgaagtatcgcaaaccatcgcgctcaccgatcagattaacgtttcgaccgctaaccttaagccgggtaccctgctgtggcgttcgccgacgtttacctccacctttacctgtaccgatacggatcacatgcccaatggtgaagatgcgtatctgtactgggatccggaaacccggatgcagaatatccacaactcgctggaagtcggcgttacctatctcagcaccgatattaaaccggtaaaaggtcagaaaacggatatcgggccaggtacgctctgccgccgcaaccgtcccggcggtgcatgccagtctccggcgaccccgcagaccgtcacggtgacctactcggtttatattaaagccaccggtaatccgccgccgtcaaacggcgtgattaacgacaccaaccgctacgctatcttccaggttgacggtgttggcggcctcaacagccgcccgaatagtaacttccgcgcgtgggtcaccgggcttggtaatattcgctttatcgcctgcaacccgaaaatcaccgtctcggcgaacaatggttcaacggtcaacttcggcagcatcccggcgcgcaatgccgtcgtcggcgccattgagaaacaagttccgttcagcgtccgcgccgacctgaccggcgccggccaggattgccagggtcagaccttaatggccagcttcagtacccagcagccgactcaggacaccaacaccattctgccatctaacgatagcggttttggcatcctgctctcgcgcgccgatgcgccgacgacctggctttccatgaataccccgacgcagttgggcatgattaacggcagcgtggtagaaagcaacttcctggccagcctgaaatggctaagcgttaagcccaaaatcggcacctttaatgcgacggccaatatcgacgttacctttaaatag

SEQ ID NO: 87262 - DNA, 705 bp, Enterobacter aerogenes
atgccgctgaccaacaccgaaccgaccgggttacgctatgtatttcagccgatgttcaaccgcgaaggcaaaatgatcgcggtagaatgtttgacccggtttgctcatcacgagcctgctagtccgcaagatatagaacggtttttcagtgaggcatcggaatcactgcgcgcccgcatcctgctcgaacaaattgagctggtcaggcagcatcagcagtggttccgccagaacgacgtcatggtcacgctcaacgtcgacgagtcgacgttgcatatgctgcatgatgattttattgccgagtgtgtgaaaaccatcggctgcctgcattttgaggttaatgaattttccaacacgctggtgaaacgcaccccgaccatcgatgccctgacggacaaatactccttctggctggatgattttggcgccggttacgccgggttcgccgccctgacggcgcaaccctttcgttttatcaagaccgacaagaacctgttatggagcctgctggaaaagaaaaacggccagcaactgatggactcgctgctgcactattttcaggcgaatcagtatcaggtgatcgtcgaaggtattgaaaccgaagcccatcttcagtggctggaaaacatgccgtggtttgccctgcaggggcttctctggcgggaacaaaccattgaagccctggtggccagcgtcgagaaataa

SEQ ID NO: 87263 - DNA, 978 bp, Enterobacter aerogenes
atgaatgcactgaccgccgtaaaacctcatgctgatgatttggcccacagctacaccggtttttccttcgctccgtccgcacaatcgccgcgtctgctggagctaacgttcaccgccgaaacgaccgcgcaatttcttcaacaggtcgcgcagtggccggtgcaggcgctggaatataaatccttcttgcgctttcaggtcggcaagatcctcgacgatctgtgcggcaaccagctgcagccgctgctgatcaagacgctgctcaatcgcgcggagggcgcgctgctgatcaacggtatcggcattgacaacgtcgctcaggccgatgagatggtcaaactggcgaccgccgtggcgcatttgatcggacgctccaactttgatgccatgagcggccagtattacgcccgcttcgtggtgaaaaacgtcgataactcagacagctatctgcgtcagccgcaccgcgtgatggagctgcacaatgacggtacctatgtcgaagaaattaccgactacgtgctgatgatgaagatcgatgaacagaacatgcagggcggcaattcactgctgctgcatctggatgactgggaacatctcgacgaattcttccgcgatccgctggcccgccgtcctatgcgctgggcagcgccgccgagcaaaaacgtcagcaaagatgtctatcatccggttttcgacgtcgaccagcagggccgcccggtaatgcgctatatcgaccagtttgtgcagccgaaagatttcgaagaaggcacctggctgagccgcctctccgatgcgctggaaaccagtaaaaacattctttccgtaccggtgccggtggggaaattcctgttgataaacaacctgttctggctgcacggtcgcgaccgctttacaccgcatccggatttacgtcgcgaactgatgcgccagcgcggctactttgcgtattccacgaatcattaccagactcatcaataa

SEQ ID NO: 87264 - DNA, 1269 bp, Enterobacter aerogenes
atgtatgatttcgtgattatcggcggcggcattatcggcatgtcgaccgccatgcagttaattgagatttacccggatgcccgcattgccctgctggaaaaagagtccggtccggcctgccatcagaccggtcacaacagcggagtgatccacgccggcgtttactatactcccggcagcctcaaggcgcagttttgcctcgccggcaaccgcgccactaaagccttttgcgagcagaatgcgattcgctacgacgtctgcggcaagatgctggttgccacctcgccgctggagatggagcggatgcgcgcgctgtgggatcgcaccgccgctaacggcctgcaacgcgaatggctgagcgcgagcgagctgcgcgaacgcgagccgaacatcagcggactgggcgggatcttcgttccttcgagcggcattgtcagctatcgtgaagtagcggcggcaatggcgaagatcttcgaatccaaaggcggaacgatcgtttacgatgccgaagttagcgccctgaaagagcacgccagcggcgtggtcgtccacacccgccagggcggcgaatatgaggcatcgacgctgatcacctgctccgggctgatggccgaccggctggtgaaaatgatcggcgtcgatcccggctttatcatctgcccgttccgcggcgaatatttccaactggcgccgcagcacaaccagatcgttaatcatctgatctatccgatccccgatccggcaatgccgttcctcggcgtccacctgacccgcatgatcgacggtagcgtcaccgtcggccctaacgcggtgctggcgctgaagcgcgaaggctatcgcaagcgcgatatctcgctgaccgatacccttgagatcctgacctcgcccggcattcgccgggtactgcaaaacaacctgcgctccgggcttggcgaaatgaagaattcgctgtgcagaagcggctatctgcggctggtgcagaaatactgcccgagcctgacattaagcgatttgcgcccgtggcctgccggcgtgcgggcacaggcggtatcgccgcagggcaagctgatcgacgatttcctttttgttactaccgcgcgttccatccacacctgtaacgcgccgtcgccggcggccacgtcggctatcccgatcggcgcgcacatcgtcagcaaggtgcaaaccctgctggcaagccagagcaatcccggacgcacgctgcgtgcggcacgtagcgtggagacactacacgccgcttttactcgttaa

SEQ ID NO: 87265 - DNA, 1449 bp, Enterobacter aerogenes
atgcaacttaaagatgcaactctgtttcgccagcaggcgctaattgatggccagtggcgcgatgcgcaaaacggcgacgtgattgcggtgaccaaccccgccaacggccagcagctgggtagcgtgccgaaaatgggcgccgacgaaacccgcgaagcgattgaagccgccaaccgcgccctgccagcctggcgtgccctgaccgccaaagagcgcgccacgcttctgcgccgctggttcgatctgatgatggagaaccaggacgatctcgcccgtctgatgaccctcgaacaggggaaaccgctggcggaagccaaaggcgaaatcagctacgccgcctcctttattgagtggttcgccgaagaaggtaagcgcatttacggcgataccattcccggccatcaggccgacaagcgcctgatcgtcatcaagcagcccatcggcgttaccgccgccatcaccccgtggaacttcccggctgcgatgatcacccgtaaagcgggcccggcgctggccgccggctgcactatggttctgaaaccggcgagccagacgccgttttccgcgctggcgctggccgaactggcgaatcgcgccggtattcccgccggggtatttaacgtggttaccggctctgccggggccgtcggcaacgaactgaccagcaacccgctggtacgcaagctctccttcaccggctcaaccgaaattggccgccagctgatggaacagtgtgcgaaagacatcaaaaaagtgtcgttagaactcggcggcaacgcgccgtttatcgtctttgacgacgccgaccttgataaagccgtcgaaggggcgctggcgtcgaagttccgcaacgccgggcagacctgcgtctgcgccaaccgtctgtatgtacaggacggcgtctatgaccgttttgcagagaaactgcagcaggcggtggaaaagctgcgtatcggcgacggcctgcaggacggggtcaccaccggcccgctgatcgatgataaagcggtagctaaggtcgaagaacatattgccgacgcccttgcgaaaggcgcgcgcatcgtcaccggcggcaaaccacacgcgctgggcggcaacttcttccagcccaccatcctggtcaacgtcccgagcagcgccaaagtggcgaaagaagagaccttcggcccgctggcgccgctgttccgctttaaagatgaagccgatgtcattgcccaggccaacgataccgaattcggcctcgccgcctatttctacgcccgcgacctgagccgcgtcttccgcgtcggcgaagcgctggagtacggcatcgttggcatcaataccggcattatctccaacgaagtcgcgccgttcggcggtattaaagcctccggtctgggccgcgaaggttcgaagtacggcatcgaagattatttagaaatcaaatatatgtgtatcggcctttaa

SEQ ID NO: 87266 - DNA, 1284 bp, Enterobacter aerogenes
atgaccagcaataaagcgttaatgcagcgccgtagcgacgcggtgccgcgcggcgtcggacaaattcaccctatctttgccgaccgtgcggagaactgccgggtatgggacgttgaaggccgtgaatatctcgatttcgccggcggtatcgcggtgctgaacaccggccacctgcaccctgaggtgatcgccgcggtggaaggccagctgaagaagctgacccacacctgcttccaggtactggcctacgagccctacctgcagctttgcgaaatgatgaaccagaaagtgcccggcgatttcgccaagaaaaccctgctggtgaccaccggttcggaagcggtggaaaacgcggtcaaaatcgcccgcgcggcgaccgggcgtagcggcactatcgcctttaccggcgcctatcatggccgtacccattacaccctgtcgttaaccggtaaagtgaacccttactccgcgggcatggggttaatgccgggccacgtttatcgcgcgctctacccgtgcgcgctgcacggtatcagcgatgatgacgcgatcgccagcatccatcgcatcttcaaaaatgacgccgcgccggaagatatcgccgctatcgtcatcgaacccgtccagggcgaaggcggtttctacgccgcctccccggcctttatgcagcgcctgcgcgcgctgtgtgacgagcacggcatcatgctgatcgccgatgaagtccagagcggcgcgggccgtaccggcacgctattcgcgatggagcagatgggcgtggcgccggatatcaccacctttgccaaatccatcgccggcggtttcccgctggcgggcgtcaccggacgggcggaagtcatggacgccatcgcgccgggcggattgggcggcacctatgccggcaacccgattgcctgcgccgccgcgctggcggtactcaaggttttcgaacaggaaaacctgttggaaaaagccaatcagctcggcgacaagctgcgtaaaggcctgctcaatatcgccgaaacacatcgcgaaatcggcgacgtccgcggcctgggggcgatgatcgccattgaactctttgaagagggcgatcacagcaaacccaacgccaaactgacggcggatatcgtcgcccgcgcgcgggataaaggcctgatcctgctctcctgcgggccgtactacaacgtgctgcgtattctggtgccgctgactatcgaagatgcgcagatcgcgcagggactgaagattatcgccgactgttttaacgaagctaaacaaggctaa

SEQ ID NO: 87267 - DNA, 1404 bp, Enterobacter aerogenes
atgatggggcaactgtcgcaatcacatgatttagggggcgggctgaaatcacgccacgtcaccatgttatctattgccggcgttatcggcgcaagtttatttgtcggttccagcgtcgccattgccgaagcgggcccggcggtgctgctctcctacctgttcgccgggttattggtggtgatgattatgcgtatgctggccgaaatggccgtcgccaccccggatacgggctccttttcgacctacgccgacaaagcgatcggccgctgggcgggttataccatcggctggctatactggtggttctgggtcctggtgattcccctggaagccaatatcgccgccatcattctcaactcgtggatccccggcgtaccggtatggctattctcgctggtcatcacccttgccctcaccggcagtaatctgctgagcgtcaaaaactacggcgaattcgagttctggctggctatctgcaaagttatcgccattctggcctttatcgtgctgggcgcggtggccatcaccggcttctatccgtatgccgaagtgagcgggatttcgcgcctgtgggatcacggcggctttatgcctaacggcttcggcgcggtgctcagcgcgatgcttattaccatgttctcatttatgggcgcggagatcgtcaccattgccgccgccgaatcggataccccggataaacatatcgttcgcgccacaaattccgtaatctggcgcatctctatcttctatctgtgctccattttcgtggtcgtctcgttgattccgtggaacatgccggggctgaagaacgtcggttcataccgttcggtactggagttactgcatatcccctacgccaaactgattatggacggcgtgatcctgctgtcggtgaccagctgcctgaactcggcgctgtataccgcttcgcgaatgctctattccctgagccgccgcggcgatgcgccagccataatgggcaaaaccaaccgcagtaaaacgccgtatgtggcggtgctgctctccaccggcgcggccttcttaaccgtagtggtgaactactatgccccggcgaaggtatttaaattcctcatcgatagctccggcgccatcgccctgctggtctatctggtcattgccgtatctcagttgcggatgcgcaaaatcctgctggcgaaaggcggtgaaattcgccttaagatgtggctctatccgtggctcacctggctggttatcgcctttatcaccttcgtactggtggtgatgctgttccgtccggcgcagcagctggaggtcatttccaccggcgcgctggcgatcgctatcatctgtacggtgccgattatgtcgcgctggaaaaagctgctattgtggcaaaaactgccgctacaaaatacgcgttaa

SEQ ID NO: 87268 - DNA, 693 bp, Enterobacter aerogenes
atgaccgccattccccaagcgacggccattgatggataccgctggttgaagaacgacatcatccgcggcgtttatcagcctgatgaaaaactgcgtatgagcctgctgacgtcgcgctatgagcttggcgtcgggccgctgcgggaagcgctctcgcagctggtggccgagcggctggtgacggtggtcaatcaaaaaggctatcgcgtcgcctcgatgtccgaggcggaactcctcgatattttcgatgcccgcgccaatatggaagccatgctggtgcgcctcgccattgagcgcggcggcgatgagtgggaagccgagctgctggcccgcgcgcatctgcttaataagctggaatccagcgaagcaagtgagcgcttactcgatgaatgggatcagcgccatcaggcgtttcataccgccattgtcgccggctgtggttcgcagtatttactgcagatgcgcgaacggctgttcgatctggcggcgcgctaccgcttcatctggctgcgcaccacggtgctgtcggtagaaatgctggaagataaacatgtccagcaccagacgctgctggaagccattctggcgcgagatgccgagctagccagcgcgctcatgcgcgagcacttacttacccccatcccgattatccaacaggcgatggccggcaaactgctgtcgcagcaatcctga

SEQ ID NO: 87269 - DNA, 369 bp, Enterobacter aerogenes
atgaaatttctattatctatcagtttattaagcttctttctttctccggctttcgccggcacagcggtaaaattgtcctgctctttacgcaaaaatgtgaccatctcgcgtttccattaccagctatcgaccatgaagtggggcgaccatttccaggtggcttccggcatgcgtcaggcgcagaccaaaaatcatattccctatcgggtaaccagctttcgcaacggcgacgatctggtctttttcccggacagtcaggagtactttttcttctactcgggaatggcgacgccggaccgttgcgtggtggaggaacactacgagtatccggtcacacaactgccgtattataaaaagcccgctgcctga

SEQ ID NO: 87270 - DNA, 894 bp, Enterobacter aerogenes
atgattgatttacgccagttgaagtactttgtggtggtagcggaagaggagcatgttggccgtgccgccgaacgcttacatatttcacagtcgccgctcagccgccagatagcccagctggaggagcgccttggactgatgctgtttgaacgtaaccagcagcgtattcgcctgacggcggacgggcagacgtttctggccgaaacgcgctcgttgctgacccacgccaaccgtctcgaatcattaggtaaacggctggggcgcggcgaagatggcgggttgtgtatcggttatatcgaaaacgccatgcactcgggcgtgctttctaccgcgctgcgcaccctgcgaacgtcgcgcccggacgtgcatattgcgctgtatagccagccgcccgccacgcagattgagggcctgcgccagcgcagcctggacttctcgctggtggacatgccgccttcggcgggcgaacaggatctggagtatacccaggtgcttgatgaccggatgctgctggctttgccgcagaatcatccgctggccgcggcggaaaacttgcagccagcgcagctggccgatcagcagtggatcgcggttatccataacgacgatgcccattcgcgcgatgatttcgtcgccgcctgcgtgcgtgcgggctttaatccggatattcgtctggaagccggagagccattaacggccctggggctggtggcggcgggactgggcgtggcgctgatccagcacagcctgcggcataacgcccctgagggggtcgtgctgcgggaacttccatggatgagctattcgacccagctgtgggcggtatggcacaaagccaaccagcgcccgctggtgatgcactttcgcgaggtgctacgcggcgagaataattag

SEQ ID NO: 87271 - DNA, 1011 bp, Enterobacter aerogenes
atgagcatcaaacatattctgccaggcaaaattggtttaggcggcgcgccgctgggtaacatgttccgtaacatcccggaagacgaggcgcacgccaccgtcgccgccgcctgggatctgggcgttcgttacttcgataccgcaccgctgtacgggtccggtctttctgaaatccggatgggcgaagcgctctcgcaataccctcgcgaccagttcgttctgagcagcaaagtcggccgcatcatgcttgatgaaatggaagacccggcgacgcgtgattttggtgagaaaggcggtcttttcgaatacggcctgaagaacaaaatcctcaacgactactcggccgacgccaccctgcgttctattgaagacagtttaaaacggctgaaaaccgaccatctcgacatcgtatggatccacgatccggcgcaagatttctacggcgacagctggctggagcagttcaacatcgcccgtaccggcgccttccgcgcgctgacccgcctgcgtgaagaaggcgtaataaaggcatgggggctgggcgtgaaccgcgtcgaaccttgcgaattgaccttagcgctcgacgagccgaagcctgatgcgttcctgctggctggccgctactcgctgctggaccacaaacgcgccctgcagcgcctgatgccggaagcgctggaacagaatgtcgatattgtcgtcggcggcccttacagctcgggcgttctcgccggcggtgaacacttcgaataccagaaagcctctgcggcgatccaccagcaggtggcgcagatcaaggccattgccgcccgtcatcaggtggatgtgaaagccgctgcgctgcagtttgccctggctcatccggcggtggccgccgtaatcccaggctccagccgtccgggccgtatggcggaagatctggccgcgctgaaagcgaccatcccagccgctttctgggatgagatgcgcagccagaatctggtggctgataacgcgccgctgccgattcgttaa

SEQ ID NO: 87272 - DNA, 798 bp, Enterobacter aerogenes
atgaaactggatctaacccataaagtcgccgtggtgagcggctccacttccggcatcggactgggcatcgctaaaggccttgccagggcgggcgcgaccgtggtcatcgtcggccgtcaacggcgcggtgttgataccgccatagcggcgattaatgccgaataccccgatgcgcagctgcgcggggtggtcgccgacctcagcactgaagaaggcgtcagcgcgctactcgccgccgagccgcatgctgatgtggtggttaacaacctcggcatctttaacgataaagatttctttagcgtgccggatagcgagtggctgcacttttataacgtcaacgtgctttccggcgtgcgcctgtcgcgccactacgcgcaggggatgatcgataacggctggggacgcattattttcgtctcctcggaatccggcgtcgcgattcctgccgacatgatcaattacggcgtgaccaaaagcgccaacctcgcggtctcccacggactggcgaaacggctcgccggtaccggcgtcaccgttaacgccattctacctggccccaccttcactgaaggtttgcaggagatgctggcggaggccgctacgcaatctggccgcagcccgcgtgagcaggctgatgaatttgtgaagaccgcgcgcccaagctcgattatccagcgggcggcggacgtcgacgaagtggcgaacctggcggtatatctcgcctcgccgctctcgtcggccaccactggcgcggcgctgcgcgtcgatggcggcgtcgtcgacaccctggcaatgtaa

SEQ ID NO: 87273 - DNA, 417 bp, Enterobacter aerogenes
atggctactaccactgtatctatcgaaatcccggcttctgtcggccaggtttggcaactgatgggcggctttgactcgctgcccgactggctgccgttcatcccgaaaagcgtggtgagcgaagggggacgcgtgcgtacgctgaccacatccgatggtggcacggtcattgaacgtctggaagcgtttgataaccgccagcgcagctatagctactcgatcatccaggcgccgttcccggtcgtggattacctctccactatcgcggtagtggcaactgccgatagcaatatcacccgcgttgagtggtccggcagcttcacgccggttaacgtcagcgacgcggatgccgaagcgctgtttagcggtatttatcgcgacggcctgcaggcgttgaaaaataactttagcgcctga

SEQ ID NO: 87274 - DNA, 213 bp, Enterobacter aerogenes
atgaaaaccgtatcgactattttttccgcagccgcactttcactttttgcctttaccgcttccgcgcatagcgtgactgcaaccggtaatacgcttgactccgctgaagcggtgattgccaaaaaagcgaaagagctgaatgcgactgattataaaatcaccagcgcccatatggggaataaggtgacgatgagcgcggaactgtacaagtaa

SEQ ID NO: 87275 - DNA, 1404 bp, Enterobacter aerogenes
atggcagataacaatataaaaatttatcattcccgttatagcaagttgataaaactactggacttcctcaccgtcaacgttttgatttttatctatttaaaatatttttatactgaacccacaaccgcttccgcgctcgttggaattatctattcattagtatttataagaattaatgagtattttcatttgtattcagggcaatttaaagggcactatttcacaaaatcagcagcgcttattttaagcgtatgccttagcagtattgtttcattcttatttttcgtcatcgccgagtggttaattaatgcgcaatcagtcgttaattttattccgctggccgccagtctggcgaaatgctcaatatttatatttctcattgtcttcgtggtgcgggcaatcactgcccattatctgtttaactcggtgttacgggtcgcgattctcggtattacgcccgcgggcctggccatcgagcaggctttacaaaaagagtactcacaacgcggtatcatcatcagctattttgaagaccgcaacaaccagcgagatagccggctgatgagtatcgaaagaaaaggcaactcgcgcgatctgctggctctggcgaagacaggcgacgttgatgaaatttatatcgcgcttcccatggttgcacagcagcgcattaagcaatttctcaatgaattctctgacacaaccgtcgatgtattcctggtaccggacctgttctcttacagctcacatatttcccagctgcgcatgttcggcaatctgcaaactatcagtatcttcacttcgccttttgatggcgaaggggcaatcatcaagcgtattgaagatatcattctcggttctttctttaccttaattagcctgccggcgatgctgtttgtggcgattggtatcaagctcacctctccggggccgattttatttaaacagaatcgttatggcctcaacggtaaacaaatagaagtctggaaattcagaaccatgcgggtcatggaaaatagcgccgtggtcactcaggcgactcgcaacgatccacgcatcaccaaattcggcgcgtttttgcgtaaaacctcactggatgaactgccgcagtttttcaacgtgctacaggggcggatgtcgatcgtcggtccccgcccgcacgcggtggcgcataacgagcagtatcgcgtgttggtggagaactacatgattcgccataaggttaaaccaggtatcaccggactggcgcagattaacggcttccgcggtgagaccgacacactggacaaaatggagaagcgaattcagtacgacctggcctacatccagtcgtggtcgctgttcctcgatctcaaaatcgtctttttgactttcttccggggctttgttggcaaaaatgcgttctag

SEQ ID NO: 87276 - DNA, 1287 bp, Enterobacter aerogenes
atgcgttctaggttcgccgttctggccggtttgctgtctgtgccttatgcacacgcagacctgcaggcaaaaccgcataccggggttgccggcatcgatttcgagagccagttgggttatgacatcggttacgatgacaacgtgacctggcagcgttacgaccaaaataaaatcggctccagctaccagaatattaagcctgtcgtcaaagctatcggcgaacgttatgaagaccgctacctgttgatgtattccggcgattaccgcaactatggcaacgatagcgcagataatcgcaacaaccatttttttatgtttaacggcaagtggcgatttggcagcatgcacgggctgtcgctggatctcgatgagacgctgggtcatgaagagcgcggccgcgacaccaccgaaggctttttgcctgagcagtttaaagagtttggcatcaacaagccgatcggcacccgcttctttaacagcgagctgcgttacagctacggcgcgccggaagggcgcggtaaagttgaagtcgcgctactgcataaacaattgcgctttcgcgacctcgacagcatcaaagacgccagcgatgactttaactattacatgcacgatcaggagtggcatgaaaacagcctggtggccgaagtgtttgaccagaaagccaaaacgctgcgctaccgctatagctttatcaccaaccagcgccgctacgagctgaatccgttaaaagacagcaatgagtattatctactggtcggcatgaagaatcgcctgtcgggtaaaacggagattaacggtaacgtcgcctggctctacaaagactttatccataacccggactcacagggttttaacggcctgaactgggatatcaacgccgactggaaaccgctggaacaaatgaaagttaacctacacagctcccagcgcatcaaggaccccaccgactccggcggctatatcctggtgtcgaatttcggcgtcggctatgaacatcactggctggtggatcgtttctcaactctggtcgattattcatatatcactgaagactataagcatcagagtaataagcgcaaagataagtctaatctgctgtcgctgacctttaactatgatttccgaccatcggttaactttaagctgaagctgcaatggaacaccatgcactcaaataaagatacggacactttttatattggcccggactactcgcatgcggttgaccgcaccctgggctacgacgattcggccattattattatgacgcaggtacaactatga

SEQ ID NO: 87277 - DNA, 528 bp, Enterobacter aerogenes
atgcttccgctgctggcgctactgctggcgggctgttcaacgccgccgcagaccattaaaacgccgccggacgccgtctaccttttggaccagggcgatgaagtcaatattgcggtctccggggagcaggatctgacgatgcgggtaaaaatcgataatagcggcagcattgattacccctatatcggatcgctgctgttaaaaggcaaaacgcctgaacaggtgagtaatgaaatcgccgataaactgcgcggtaactacctacaggcgccgatggtcacggtgagcatcgccgaataccgcaaagtttatctgctcggcgaagtgaaaaaaccggatggttatgcctgggagccgggtttaacggcggaaaaagccatcgccctggccggcggtttcaccgaccgcgccgatcgtcatgatattcaaattcgacaggcccgcggcggaaggctgctggaaaatgtcgccgccgactccgccgtgcaggcaggagataccatcattattggcatgagtttcttctga

SEQ ID NO: 87278 - DNA, 2082 bp, Enterobacter aerogenes
atggcaatttcactggtcgaaaacgcgaaaaagaaagaaggctttatcgacttcacgccttatttcaacaaaattaagcacaagcttatctggtgcctggcggtggtaattgtcgccgccgtggcgtcatttattctgacgcgctttatgtcttccagctacacggcgaccgctaccgtactgttcaaagcgcagtcgcaggacgtctctcctctgccgcgactggaaaactacgattccacgcgcagcgattactacgagaccaagtacgcgttaatggggtcacgagtagtgctcgatgccgcggtgcgtaaattaaaactggagcaggatagcgaatttaacggcggcgataatctcgacgaaaccgcgcgtattaataatgctattcaggcgctgcaaaaaagcctgaccatttccggcgtgcgcaccacccaactggttgccgtatcgatggaagcgaaatcaccgcagaaagccgccgatatcgccaacggcgtcgcccaggccttcatcgattacagcctgcagcagaagcaaaacaccttgcttcaggcgcagggctggaacgaaaaaatgatggacgacctgaaaaccaaaatggatcagcagaaggcggacatcgataacttcctcaagcagaacggattactaaccttccgcagcatggatggttatgagaccgagcggctggggattgtgattaaccatctggccgacgccacccagcgccgcctgaaagcgcagacggtatgggacaaggtccgccgccagcagggtaaaccggtagagcagattatctcactgccggaaatctccggccatccgcaggtgcaggatttacgcattgcgctcatccagacccggcgcaatctttccgaagcggccaaacactacggcccgcagcatccgaaatatctgcaggcccaggcgcagctgcaggcggtgaatgcccagctcggccaggtattgggcgagctgtttaacggcctgcgccagcagtatcaaatcgccctcgacgatgagcagcactaccaaaagatgctcaacgatcagaaggccgatttccaggcgctcggcgccaagcgcgaccagtacaacaccatgactaccgcgctgaataaaaccgaagagctttataaatcactgtaccagcgcgctaacgaacagaaattatcggagaccttctcggtaccggatgaagtcatttacgacgccgccgtaccgccggatcgtccatctaaaccccagcgcggcctgttgatcgtgatgattaccctgatggcgctgtatatcatgtacctgatagtcagtaccgcactggataaaacggtgaatagcctcagcgagctcaaagcgaaaacctccctcgaggccagcggcgaatttccgctactggcgcatctggaaaacgcgcagcagattttccataacgtgctctacgccgatatgatccacagcctgcggctggcgttgctcaatcagcgcgataaacccgccaccatcctggtgacttcggtgcaatcccgttccggcagttcgtatattgccgaactgctggcctgctcagccagcaaatcgcgtaaaacgctgctgattgacctcgactacctggcgactcaggggttatcagcgaaatttccgcaacataaacagggcttcagtcaattgctgaacggcgagtgcatgccggagcagtccgtcgtcaaactggatgatcaactggactttataccccgcggcaagctcaacgactcttcgctgctgttgctcacctctgaacgcctgccggcgctgctggcaacgttgcatcaaacttacgatacgctaatcatcgacgccccggcgctgaaccaggctcaggatagcctgctgttggcggcacaaagcgatatgactctgctggtggtgaaggccggcgagcaggctccgcggatccgcaaagcggaacaacgtctgcagagcgcgggtagtagccgggtggcgagcgtgcttaaccaggtgcgcgaagaacacctggaaacgcaggaaggtaaacgcctgcttgagcgccagatgcacgaactcattgctccgaaatag

SEQ ID NO: 87279 - DNA, 1218 bp, Enterobacter aerogenes
atgaatctgattaagagtatttcatccatcgccagttcatcggtgctttcgcagctgatcggcgccttttcggtctggcttatctctcatcgctatgggatggcggaggtcggccattacgcgatgatctacagcaatgtactgatcggcgcgcaggtctgtacctttgcctcacagttgctaatcccccgtcaggaggatcacgagcttgggcaaaacgtagtgttctgcctactgcagagtctgctgatggccctcccctgggcggtcatcaccgggcttatcttcgaactaaacattgcgtttctctatttgctgacctttggctatgcgctggtgctggtggcggaaaacctttccctgcgcggcggtaactatcctttcctgaccttccagcgcattgcggtgtcgctggtggtcgctattgcgctgctggtgatgcccaacccaacgctgttttatctggcgtggatggtcggcatcctgctgctgctggtcgcctgcctgattcgcctgtttaacttcaaaagcttaacgttgcgccacttttcgattgcgacgaatgtacgttttttacgcgagcactggcagcatatcagccgcgtcggcagcgccgaggtactggcgatggccagtaataacctgccgacgatgctgattaacatctggttctcgccgctggtcgccggctacttttcggtggtcagccgtttctgcctgtcgccggtgatgattatcggtaacgccgtgcgcaactccatcttttctaaatggtcgatggattttcgtaaccgcacctttaactatccggaatataaaaaagttcgcctgctgctgctgggcgccgccgcggtttgcatccttgggatctggattttctatccactggtgatgcgccttggctttagcgaggagtggctgaattcgatccccacctcgcgctacatgctgccttatctgttcgccgcgctggcggtcagcccgctgacggtgatcgaactgatcttcggctcccggcgctactttttgcgtattcagattgagcagttgctgattatcgtcatcgccttcatcgccttgccgtactttggcgtcagttatgaaatcgccctgctggccttctcgttcctgaccttcgcgcgttacttgttcattttgctcaaaatgaatcagcgggcgaaaacgctttcgctgcaggagcagaaaatatgcagctaa

SEQ ID NO: 87280 - DNA, 1383 bp, Enterobacter aerogenes
atgcagctaaacaccggccgctatctcgaagcctatgccctgatgacgctggtgttctgcggtacggtccagtatttcaccggtatcgcggccgtgctgtggctgccattttttctggtgctggtgatggcggtgctgctcctgatgcagagccgcccgcagccgctggcgctcaccgggcgggaaaagctaatactggcactgtatctgacctttatcgtactcgggctggtctcaacggtactgcagtcaggggtcgtcaccgccatcgtcggctttaaaaacgagctggcgctctcgctgctgatgttctgcatgctgttgggcatgtttagtgaatcacagctgtaccgtctgacgcggcttttctactggatctactatgtgcagatcccggtcgctatctatcaggtgattttcgtggtgcctaaacgggtggcatttcgcggcgaagatgagaaatgggactcggtggtcggcactttcggcggcgacccgatgggcggcggcaacaccgcggcgatggggatgttctgtctgctgatcatgctcatgaaagtgtcagagtttaagcacggcatctgctcatttaaatcgctggtgatccacatcgcgctgggtttcttcctctgcgtggtgggggaagtaaaattcgtcattctgctgtcaccattcctgctggccctgctgtggatcctgcccggctacgtgagcggcgtgagtaaagttagcctgcgatcgctgctgatcatcgccgccggcatggcgctattaatttttgtcgccattaccgtgttggcctccaactattcctcggccttcggcggcgacccgaccaaaagcgcgctgtcggtgtttatcgattcactgggctatatttttgatactaactacattatgcccagcggcgaactggggcgttttaccaccctcttcttctggctgcagcataacgaactatttggtcctggcggcatgctgtttggttacggtcttaacgccaccaacagcggcagtaccgtctcgccgggctatatcggcgcctggtatcacctgatcctcgattccaccgccttaagcatgctgctgtgggaagtggggattatcggcatcattctgttcattggcaccatcgcctcaatcctggtcgccatgcggccgaaagagaccttttcgcgccacgatctcaagcttgaggatctgcaactccttagcgcggcgccggcgttctacgtttttgttatcggctgtctgctcagcctgccctacagccagatcctgatgatcattcccatgctacagtttttattatggctatcccttggggcgctgattgtcatccaccgcgctgtccgtcttaactccggtacccactatgaataa

SEQ ID NO: 87281 - DNA, 1026 bp, Enterobacter aerogenes
atgaataaaacgccatccattaccgtcagcatcaagaccctgaacgaagcgcagggcatcgagaaaacgatcgatagcgtgcgcaaacagctgcaaccgtacccgcatcaaatcatcgtcgccgacagcttatcaacggataacacccgcgaactggctatcgcgaaaggcgcgatggtggtgtgtctggataacgccgccgaccgctgctgcggtatcggccaccagctgggctggctgtatagcgaaggcgattatctgctgctgctggatggcgatatggagctggagccgggctttctggataccgcggtcgaattcctggaaacgcatccggagtacgcgggagtcgccggcagcgtcgagatggatgatgcctctaactatgagttcaaatcgcgcaagcagcgcctgcatctgatctatccacagggcgacaccgatcatctgggcggcggcggcctgtatcgtcgtgaagcgatcgcgaaaatcggctatctgaccaacctcaacctgcacggctacgaagaagcggagctgggcattcgtttacaagcagcaggttacaaactgcatcgcctggcggcaccctactttagccacgcttcttacaccatgccaacctttaaaatgctggcctaccgttggaagaacggctttctgtgggcgccgggcgagttgctccgaaactgctggggtaaagcccatttcccggcggcgctgcggattgtacgtaatgagctgctcttcaccctctatcttctggtcttactgatctgcctgctgaccttcaatggcaaggttatcgccattgccctgctgccgctgctggcgtttatcgctctgaaggccattaaaaataaatcgctgcgcgatggcgtgcagagcgcgattaacttatcgctattttcagcggggctgctgcgcggggtgattaattcagtgcgcgatccgatgaaacgcccggcggtgaccgtctcgaatccacagcatattgatactgaaaatgaaaattctcttcgttaa

SEQ ID NO: 87282 - DNA, 1215 bp, Enterobacter aerogenes
atgaaaattctcttcgttaacaaattcttctttatcaaaggcggcgcggaaaccgtttattttcaggagcgcgacgcgatgctgcaagccggctaccaggtggtcgacttcagcatgctgcacgcggaaaataaaccatcgccgtgggaggaatttttcgtccataacgtcgattaccacgacagccacggcctgatgagcaaaatcaaagccggggtggactttatttataatgccgaggcctgcgcgaagctcaacacgcttttgttgcgcgagcggccggatattgttcattttcataatatctatcatcagcttacgcctgccgttatcggcgtggcgaaacgctttggctgcaaaacggtactcaccgcccacgattacaaaatcgtctgtccttcgtacaccatgctgcgcgatggtcatgtctgcgaagagtgtctgaccgggtcagtgatcaacgcttttcgtcaccgctgccagcagggcgatactttcaaaagtctgctgctatcgttggaagcctactggcagaagttcgccaaaaattacgccatgctcgactgtatcatcgctccaagcgagtttatgcgccagaccctgctgcgtaagctgcccgacgcccgcattgaagtgatcgtcaacggtattgatgccaatagcaccatgcccggcgacaccgcaggcgactattttctttatattggccgtctgagccgggaaaaaggcgtaccgacgctggcgcaggcgcagcaaaaaatgcgggaggcgatgccgcttaagattgtcggcgacggcccattgggcgcagacctgcgcgcgcgtttcagcggcccgcagttccttggctatatgaaacacggcgaggagctgaataaccttattcgcggggcccgcgcggtagtcgtcccctctgaatattatgaaaactgctccatgtcggtgctcgaagccatggcttttggccgcccggtgatcggcggcaatattggcggtatcccggaacagatccgtgacggcgtcgacggctatctggttgaacccggcaatagcgacgcgctggcgcaactgatggacaaactggctgcagaccctgagctggcccgcaatatgggaattaacgcccgccagcggctggaagaaaaatacgatctcgcccgccacatgcaggtgctgcaggcgctttatgaacaacttgtcggggagaaaaaatga

SEQ ID NO: 87283 - DNA, 1101 bp, Enterobacter aerogenes
atgaccatcaacgtcacggtattaggcacgcgcgggatccccgatgtgcagggcggcgtcgaaactcactgccagtatttatacccggaaatctatcgccagggcagcgcggaagtctgcgtgatcgcccgctcgccctatgtgaactaccgacgtagcgaatatcagggcgttaaactcaagagtctgtgggcgccgaaaagccgtaaattcgaggctattattcactcggcgctggcggcgttcagtaccttattcgacggctccaacgtggttcacgttcacgccgtcggccccggcctggtggtgccgttgctgcgtctgctgggaaaacgcgtcgtctttacccatcatggcccggattacgatcggcagaaatggggccggatggccaaagagatgctgcgccttggcgaaaaatgggcggtgaaatacgccaatgaagtgatcgtcatttccgaggtcatcaataatctgattaagcacaagcatggccgccataacgcccatgttatctacaacggcgtgcgccaggccgacctgcctcctgcggatcggcaggcggagatcctcgataaatacggtctaaaaccgggccagtatatcgttgccgtggcccgttttgtcgaagagaaaggactgcacgatctcgttgccgcctatgccgccgccgggtgttcggtaccgctggtgctcattggcgatgccgaccacgccgatgaatatagcgaacgcctgaagcaacaggcgaccgccacgccaaacgtcatcctcaccggctttatcagcggcgcgccgctgcatacgctgttctcgcaggccgggctattcgtgctgccctcttatcatgaaggattgccgatcgcgctgctggaggccatgtcgtggtcactgccggtggtggtcagcgacattccggccaaccttgaaattggcctgccgccagcggactactttcccgtcggcaacgttccggctctgacgcagaaactgcaacaatgggtcgcaggagaaaaagcggattacagccagtttatgccgaagtaccgctggccggaaatcgccgcgcaaaccgcgcaagtctatcagcgcttaacgtaa

SEQ ID NO: 87284 - DNA, 414 bp, Enterobacter aerogenes
gtgccgaaatctacagcagaactggtggtcgagcgcttctatgccgcgcttgaccaggaggttgaaacctcattaaccgcggagcagaaacggggaatcgagcaggcgttggtgcgcgccaacctggcgtcacgccatcgcatcgattttcgccacagctttcccttcctgcatcgccgctatttcgtggtatttctttttggtcgggatctgcgcaaagtttcgcgcgaaagcactctgttcggacgcatcttcgcgacgctgctgattacgcttggcgtggtgttcgccctgctgtcgatcctactggccctctatatgttgaaatcagcgttaggcattgatgtatttaaaaatttccacgtcggtatctggacgtggtttgttaatcttcatgaccacatgacaaagtga

SEQ ID NO: 87285 - DNA, 1416 bp, Enterobacter aerogenes
atggcgatattatctctgcatagcgctcctctgtttcgcgccctgctactggccagcgcgctggcgtcagcatccgttggcgcgcaaaccacggtcatcaccccgcctcctttcgacggcctgctcaccaatccgggcatcggcgtcgccagctttcatgatggctatggtgaaaaaccgacccgcgccgagtatcccgatactggttttgagtacgatcgcttctactggagcgagctggaaccacaggaaggtatctacaatttcgcgccgatcgataatgcttttagcgtcgccgccagccatcagccagccatgaacgtcggcctgcgggtaatggcgctcgacgagccgcaaacgggatcgaaaattcccgactggctgatcgccaaagggatcaaaggacagtgggtcgccgacggtaaaaccttcgtgccggatctcagcgatccaacttttatcgcctatgcgcagaaactgctgaatgccctcggtcagcgctatgacggcaacccggaactggcctttatcgatatcggcatggtcggctcctggggcgaatggcacaactccaactttagcgagattccgccgttaatggagaagtacacgccggagcagctcaatcgctatgttgatatgcatttcgatagcttcccgaaaacgccgaaagtcatgctgattagcggcggcgattcgctggcctgggccagccgccgcggcgcgggctggcgggcggactgctggggcgactggcataacttctccagcgaatggagccatatgcgcgatgattatccgcagcgtctggccgccgctcaggccgcggcgccggggtttgtcgatagctggaaacgggcgcccgtcagccttgagatctgcggctatatgagcgaatggcagagcgtacagcactacacgcgtgaagaggtgcaggccaccttcgactgggcgctacagcaacacgccagcagcctgaacctgaaatcacgaccgattccgccggaataccgcgatattgtcgataaagccttactgcgaatcggctaccgtttccgggtcaacaaactcgccttcgaaacgccggttaaggctggtaagccgttagcggtcagtgttacctggcgtaatgatggcgtcgccccggcctacctgttctacccggtacaatggcgcgtggtcaacgccgccggcgccacggttacccaggtaaaaacccaggatgacgtgcgccgctggctgccgggggagatgcaaagcactgtcactctcacgctacccgcctcgctgcccgccggcgattacgcgttgcagaccgccattaccgatgcccagggcaagccgcggctgctgctggccaaccagggtaaaaccgccgacggctggtatcaactgaccaccttttcccttaagtaa

SEQ ID NO: 87286 - DNA, 522 bp, Enterobacter aerogenes
atgcctaatgccatcagccaggtccgccgcgagatcaaacataccggcagtatgaaggcgaaaatcgcgattctgctctatcgcctcgcgacgatgtatcgcagccgcaacccgttttacaagctgctcggcattccattcgttattctcaataaactgattaacgagtgtctgttttgcgtcgaactaccgtggcaaacgcggatcggctacgggttgaggctgtaccatccacactgcatcgtcctcaaccgcggtaccgtcatcggtgaaaactgtatcctgcgtcagggagccaccatcggcagcctgacggatagcgaaggccgcgaaggtgcaagcccgatgattggcaataacgtcgaattcggcgcccacgtggtggtcatcggcccggtgacgttgggtgataatgtcaaaattggcgcgggtaccgtggtgacgaaagatctggccgccgggcaggtagtggtcggccagccattccgggtgttgtcaactcatcgcgaagtgcaggaataa

SEQ ID NO: 87287 - DNA, 399 bp, Enterobacter aerogenes
atgacgttaccgagtggacacctgaaaagtaagctgattaaaaaattcacggcgctaggcccctatatccgtgaagggcagtgtgaagagaaccgcttttttttcgactgcctggcagtttgcgtcaacgttaaaccagcgccggagaagcgggaattctggggctggtggatggaaatggaagcacaggaatctcgtttcacttatagctaccagttcggcctgttcgataaagagggtgactggcaagcggtcgacatcgacgatcccgaggttcgtgaaagactcgaaaaaacgctgcgtgagttccacgagcgcgctgcggcgctgctggcaacgttcaatctgaaactcgaaccggctgacgatttcagcgaaccggttcgcctgcgcgcgtaa

SEQ ID NO: 87288 - DNA, 1245 bp, Enterobacter aerogenes
atgtcacaggctaaccttagcgaaacgttgtttaaaccccgattcaaatacccggaaacctcaacgctggtccgtcggttttcatccggccagcatcagggcatgcagaccgcgctgagcggtaatcacgtcgaccactggtatcgcttaatcaatcgcctgatgtggatctggcgcggcgtctcgccgcaggagatatgggatgtccaggcgcgcatcgtgatgagcgatgccgagcgctccgacccggagctctacgatacggtgattggctatcgcggcggcaactgggtgtatgagtggactaaacaagcgatgatgtggcagcaaaaagcgactcaggaagccgatcctttgcagagcggtcgccactggctgcacgcctccaacctctatagcatcgccgcctacccgcatatcaagggcgatgggctggccgatcaggcgcagacgctggccaatcgcgcctatgaagaggcggcgcaacgtctgccgggcgagctgcgggaactggaattcgctatccccggcggcgccccggtgacgggcttcctgcatatgccgaaaggcgaaggcccgtttccgacggtgctgatgtgcggcggtctggattcgctgcaaaccgattattacagcctgtatgagaagtattttgccccgctggggatcgccatgctgacgctggacatgccgtccatcggtttctcaaccaagtggacgttgagccaggacaccagcatgctgcatcagtacgtgctacagcatctgcagaatgtcccctgggttgaccatacccgggtggcggcatttggtttccgcttcggcgccaatattgcggttcgtctggggtatctggagtcgcagcggctgaaggcggtggcctgtctggggccggtggtgcacaacctgctggtggatccgcagctgatggcgcgggtgccggagatgttcctcgatgtgctggcatcgcgtcttggcatgcacgatgcttccgacgaagcgctgcgcgtcgaacttaaccgttattcattaaaaactcagggcttgctcggccgccgttgccctacgccgatgctctccggctactggaaagacgatccctttagccccgaagaggagtcgcggttaatcacctcctcctcggcggatggcaagctgctggagataccgtttaagccggtttaccgtaatttcgatcacgcattgcgtcagattgcccgctggatcaaccatagatttggttaa

SEQ ID NO: 87289 - DNA, 459 bp, Enterobacter aerogenes
atgagcgaaaaatacgtcgtcacctgggacatgttgcagattcacgcccgcaaactggcaagccgtctgctgccggttgaacaatggaaaggcatcattgccgttagccgtggcggtctggtaccgggagctttactggcgcgtgaactgggtattcgtcatgttgataccgtatgtatctctagctacgatcacgacaaccagcgcgaactgaaagtactgaagcgcgctgaaggcgatggcgaaggtttcatcgttattgatgacctggtcgataccggcggcaccgccgtcgctatccgcgaaatgtatcctaaagcacactttgtcaccattttcgctaagccggcgggccgtccgctggttgatgattatgtggttgatatcccgcaggatacctggattgaacagccgtgggatatgggcgtcgtcttcgtcccgccaatcgctggccgttaa

SEQ ID NO: 87290 - DNA, 1458 bp, Enterobacter aerogenes
gtgtctgaattgtctcaattatccccgcaaccgctttgggatatttttgccaaaatttgctccatcccacacccgtcctatcacgaagaacagctcgccgagcacatcatgggttgggcaaaagagaaaggtttacacgcggaacgcgaccaggttggcaacattctgattcgtaaaggcgcgaccgccggtatggaaaaccgcaagccggtagttctgcaggcgcacctcgatatggtgccgcagaaaaataacgataccgtccacgatttcaccaaagacccgattcagccgtacatcgacggcgagtgggttaaagcgcgcggcaccaccctgggcgcggataacggcatcggtatggcctccgcgctggcggtgctggccgacgatagcgttgcccacggcccgctggaagtgctgctgaccatgaccgaagaagccggcatggatggcgcgttcggtctgcaggctaactggctgcaggcggatatcctgatcaataccgattcggaagaagaaggcgaaatctacatgggttgcgccggcggtatcgatttcacctctaacctggcgctgactcgcgaagcgattcctgccggtttccagagctttaaactgaccttgaaagggctgaaaggcggacactccggcggtgacattcaccttggtctgggcaacgccaacaagctgttgtcgcgcttcctcgccggccacgccgatgagctggatctgcgtctggtcgatttcaacggcggtacattgcgcaacgccatcccgcgtgaagcatacgcgaccgtcgccgtggctgcggataaagccgatgcgctgaaagcgctggtgaatacttaccaggatatcctgaaaaacgaactggcggctaaagagaagaatctggtcgtcctgcttgaagcggtcgctgacgacaaagcggcgctgactcaggcttcccgcgacggtttcgtgcgcctgctgaacgcgacgccgaacggcgtgatccgcaactccgacgtcgccaaaggcgtggttgaaacctcgctgaacgtcggcgttgtcaccatgaccgacgacaacgtgcagatccactgcctgattcgctcgctaatcgacagcggtaaagactacgtcgtcagcatgctggattcgctgggcaaactggcgggggcgaaaaccgaagccaaaggcgcttacccaggctggcagccggatgccaactctccggttatgcacctggtgcgcgagacctatcagcgtctgttcaacaagacgccgaacatccagattatccatgctggtctggaatgcggtctgttcaaaaaaccgtatccggacatggacatggtctccatcggcccaaccattaccggcccgcactctccggatgagcaggttcatatcgagagcgtcggccagtactggacgctgctgaccgagctgctcaaagccattccggcgaagtaa

SEQ ID NO: 87291 - DNA, 462 bp, Enterobacter aerogenes
atgttaacgatcagggcgtatgtagaagaggattttccggcgctgtgcgccatttttttgcgcgcggtaaaagagaccgccagccgggattattctcccgcgcaaattgccgcctgggcgcaggttgatgaatcccgctggcggcagaaatttgcgcattcgcaagtgctggtggcggttattgataatcagccggttggatttatcactgtcgttaatgattatatcgacctctttttcgtctcgccggattatactcgtcgtggaatcggtcatgcgctcatcggggcggtctgcgccagccttccgggaaagatattgtcggttgatgcgagcataacggcacgatccagttttcttcgccagggatttcgtgtcgtcgctgagcagcgagtagaatcgcgtggagagaggttcaccaactatcgaatggaaaaacgcggttcggggaaggctgaatag

SEQ ID NO: 87292 - DNA, 1089 bp, Enterobacter aerogenes
atgctgtatgggtatacagtgttgggcaaggcgatgcgtaaaattatccatgtcgatatggactgcttcttcgcagcggtggaaatgcgtgacaacccggcgttgcgcgatatccccattgcaatcggcggcagtcgggtacaacgtggcgtgattagtaccgcgaactatcctgcgcgtaagtttggcgtgcgcagcgcgatgccgacggcgacggcgcttaaactgtgtccgcacctcacgctgctgccggggcgctttgatgcctacaaagaagcctcgaaccacatccgcgaaattttctcccgctatacctcgttaatcgagccgctgtcgctggatgaagcctaccttgacgtgagcgacagcgtacactgccacggctctgccacgctgatggcccaggagatccgccagaccatcgagcgtgaactgaatctcaccgcttcagcgggcgtggcgccggtaaaattcctcgctaaaattgcctcagatatgaacaagccgaatggccagttcgtcattgccccgcatcaggtggcggagtttgtgcgctctctgccgctggcgaaaattcccggcgtcgggaaggtgtcggcggcgaagctggaaaatatggggctgcgtacctgtggcgacgtgcaaaacagcgatctggcgatgctgcttaaacgttttggtaagtttggccgtatcctgtgggagcgcagccacggcattgacgagcgagaaatccataacgatcgtcagcgtaaatcggtcggcgtcgagcgcactctggcggaagatattcacgagtggtcagactgcgaagcgattatcgaaaatctctatcccgagctggaacgccgtctggcgaaggtaaaaccggatctactgatcgcgcgtcagggcattaaactgaagtttaacgatttccagctcactactcaggagcacgtctggccgcgattaaacaaagaggatttaatcgcgaccgcgcgcaacgcctggcttgagcgtcggggcagtcgcggcgtgcggctggtggggttacacgtgacgctgctcgacccacagctcgaacgacaactggtacttggactataa

SEQ ID NO: 87293 - DNA, 861 bp, Enterobacter aerogenes
atgaagaaaatactcacggtactctgtctgctggcgaccggcagcgttttcgccaatccgcagctgattgcccaccgcggcggtaccggcgatgcgccggaaaacaccctaccggccatcaaactggcgctggaaaaccacgcgcaggccatctgggtcacggtacagctaagccgcgatggcgtaccggtactctatcgctcaagcgatctctccgccctgaccaacgccgagggcaaggtctcaagcttaaccgccgccgagctggcaaaagtcgatgccggctggaaatggggcgatgacagccatccgtggcgcggcaagcaggccacgatcccgaccttacaaagcgtgctgcagcagtggccgcagaccttcttctacatcgatataaaatcaccggatgccgatccggcggtgatgggcgaacgcctgctggaggtgttaaaaaatacccatagcctcgaccgggtacgggtttattccaccgaagaccgctatatcgccgctctgccgcaaccgatcccccgctttgttagccgcagcgaaacccgaaccaggcttgcaaacgtttcgctcagccaccagtgccagcaagacagccagcgcgatggcgataagtggtacgggctggaactaaagcgcaaggtggaggtagtcgagaagtttacccttggtgaaggcgtttctccggcgacgctcacctgggataaagaggcgatggattgcttccgctcgcagggccaggcccacatcattttcttcggcatcaatagcgcggaagattatcgaacggcgaaagaattaggcgccgacggcgtgatggtggattctccggcgcaggcgaaaaactggcagtaa

SEQ ID NO: 87294 - DNA, 216 bp, Enterobacter aerogenes
atgtggacggtatttgtcgcgacctttgtgatttttgcgctggtgatcctcggcatgtccctgggctacctggtgaagcgtaagagtattcaaggcagctgcggcgggatctcctcgctggggctggagaaagtctgcgactgtccggagccgtgcgacgcgcgtaagaaacgtctcgcccgcgaggcgcagcgccagcagcagcgcattctctaa

SEQ ID NO: 87295 - DNA, 1224 bp, Enterobacter aerogenes
atggaaattattcttggcgtggtgatgttcacgctgatcgtgctggtcctgtcggggcttatcctggtggcgcgctcgaagctggtgaacgcgggcgacgtggttattgaaatcaataacgaagcggataaacatatccgcacgccggcgggcgacaaactgctgaacacgctctccagcaacggaatcttcgtctcttccgcctgcggcggcggcggctcctgcggccagtgccgggtgaccatcaaagaaggcggcggcgatattctgccgacagagctttcgcatatcaccaaacgcgaagccaaagaagggtgccgcctggcctgccaggtggcggtgaagcagaatatgaaaattgagctgccggaagagattttcggcgtgaaaaaatgggagtgcgaggttatctctaatgataacaaagcgaccttcattaaagagctcaaattacgggtgccggatggtgaagcggtgccgttccgcgccggcggttatattcagatcgaatgcccgtcgcataaagtggcctatgccgactttgatattcccgatgaatatcgctcagactgggacaagttcaacctgttccgctatgtctctgaggtgaaagagccgaccctgcgcgcctactcgatggctaactatccggaagaggagggcatcattatgctcaacgtgcgtatcgccacgccgccgccgaaggttccggatgcgccgccggggataatgtcgtcctatatctggtcgctgaagcctggcgataaggtgacgatttccgggccgtttggcgagttctttgccaaagagaccgacgccgagatggtgtttatcggcggcggcgcgggcatggcgccgatgcgttcgcacatctttgaccagcttaagcgcctgcacagcacgcgtaaaatcagcttctggtacggcgcgcgttcgctgcgcgaaatgttctatgacgatgagtttgaacagctggcgcgcgaaaaccccaattttaccttccacgtcgcgctctccgatccgctgccggaagataactggaccgggcatacgggctttatccataatgttctgtatgaaaactatctgcgcgaccatccggcgccggaagattgcgagttctatatgtgcgggccgccggtgatgaacgccgcggtgattaaaatgctcaaagatctgggcgtcgaagatgagaacatcatgctcgatgactttggaggctga

SEQ ID NO: 87296 - DNA, 597 bp, Enterobacter aerogenes
atggctcattacattagcctgtttgtccgcgcggtgttcgttgagaacatggcgctggccttcttcctcgggatgtgtaccttcctcgcggtgtcgaaaaaggtctccaccgcgtttggcctcggcgttgcggtcacggtggtgctgggtcttgccgtaccgatcaacaacctggtctataacctggtgctgcgcgacggcgcattgatggaaggcgtagacctcagtttccttaacttcattacctttatcggggtgattgcggcgctggtgcaaatacttgagatgatcctcgataagtacttcccggcactctataacgcgttagggatcttcctgccgcttatcgccgttaactgcgccattttcggcggcgtgtcgtttatggtgcagcgcgattacaacttcccggaatcgattgtttacggctttggttccggcatcggctggatgctggcgattgtcgcgatggcgggaatccgcgaaaaaatgaagtacgccaacgtgcccgccggtctgcgcgggttagggatcacctttatcaccaccggactgatggcgctcggctttatgtcattctccggtgtgcagctataa

SEQ ID NO: 87297 - DNA, 639 bp, Enterobacter aerogenes
atggctgaacagagcgatatgaaagaggtgaagcgcgtgctggtggggccgcttatcgccaataaccccatcgccctgcaggtgctcggcgtctgctccgcgctggcggtgaccaccaaactggaaaccgccttcgtgatgaccattgcggtgacgctggtaacggcgttctccagcatgtttatctctatgattcgccaccatattcccaatagcgtgcgcatcatcgtgcagatggcgatcatcgcctcgttggttatcgtggtggatcagctgctgcgggctttcgcctatgagacctctaagcagctgtcggtgttcgtcgggcttatcatcacgaactgtatcgtgatggggcgtgccgaagcttatgccatgaaatcgccgccgctggccagctttatggatggtatcggtaacggtctcggttacggcgcgatcctgattatcgtcggtttcctgcgcgagcttatcggcagcggtaagctgttcggtatcaccgtactggaaacggtgcagaacggcggctggtatcagccgaacggcctgttcctgctggcgccgagcgcgttcttcattatcggtttgctgatttgggccctgcgtagctggaagcctgaacagcaggaaaaggagtaa

SEQ ID NO: 87298 - DNA, 795 bp, Enterobacter aerogenes
gtggctgagaagaaaagtaacgatagcatcggcaaaacgctgctggtggtgctggtgctttgtctggtgtgctccattgtggttgctggttccgccgtgggcctcaagtcgcgtcagcaggaacaacgcgcgctggataaacagcgcaatatcctggccgtcgccggcctgatgcagcaggggatggatgctgacgcggtggcggaaaccttcgccgcgcgcattacccctcggctggtcaatctggcgaccggcgaactgctggataaagacccgggcaaatttaatcaggctcaggcgctgaaagatccgcagcagagtatcgcgctcgacgtaagccaggatccggccgggattaaacgccgcagcaacctggcggaaatttacctggtgcgtgacgcgcagcagcagattcaggaagtcgtgctgcctatctatggcaatggcctgtggtcaatgatgtacgccttcgtggcgctggacgtcgatgggcgtacggtgaaaggcattacttactacgatcagggcgaaacgccggggttgggcggcgaggtggaaaacccgaactggcgtcagcagtttgtcggtaagcaggtgctggatgacaacggcatgccgtcgttgaaggtggtaaaaggcggcgcgcgcgcaggcgatctccacgcggttgacggtttatccggcgccacgctgacgtcaaacggcgtgcagcatagctttgatttctggatgggcgaactgggctttggtccgttcctgaaaaaggttcgtgagggagagctgaataatggctga

SEQ ID NO: 87299 - DNA, 1239 bp, Enterobacter aerogenes
atgggcttaaagcacctgattgagaaacttgagccgcatttcacgcacggcggcaagttagcaaaatattacccgctgtatgaagcggcggcgacgatcttctacaccccgggtttagtcacccgcggcgcggcgcacgtacgtgacgccatcgacctcaagcggatgatgatcctcgtctggtttgcggtgttcccggcgatgttctggggcatgtatagcgtcggcttgcagacgattccggcgttgcacaagctatacggcgccgaacagttacagcaggtaatagccaacaactggcactatagcgttgcccagtggttaggggtgagcttcagcgccgatgccgggtggctcagcatgatgacgctgggggcggtatttttcctgcctatctacttgaccgtattcatcgtcggcggtttttgggaagtgctgttcgcgattgtgcgcaaacatgagatcaacgaaggctttttcgttacctcgattctcttcgcgctgattgtgccgccaacgatgccgctatggcaggcggcgctggggatctccttcggcgtggtgattgccaaagaaattttcggcggcaccgggcgcaatttcctcaacccggcgctggcggggcgcgcgtttctgttctttgcctacccggcgcagatttctggcgacctggtatggacggcggcggacggtttttccggcgcgacgccgctctcccagtgggccagcggcggcggtgaagcgctggttaacgtcgccaccggcatcccggtgagctggatggacgccttccttggcaatattcccggctcgattggcgaagtgtcgacgctgatgatcctcatcggcggcgcgttcattatctttgcccgtatcgcctcctggcgcatcgtcgccggggtgatggtcggtatgattgccaccgccacgctgtttaatttcatcggttccgataccaaccccatgttctcgatgccgtggtactggcatctggtgctcggcggtttcgccttcggcatgatgtttatggcgactgacccggtatcggcttcctttaccgataaaggtaaatggagctacggcctgctgattggcgtgatgtgcgtgctgattcgcgtcgtcaacccggcctatccggaagggatgatgctggcgattctgttcgccaacctctttgcgccgctgttcgattacctggtggtgcaggccaatatcaagcggaggaagtcgcgtggctga

SEQ ID NO: 87300 - DNA, 1347 bp, Enterobacter aerogenes
atgattaaaatcacgaaagggctggatttgcccatagctggcatgccattacagcagatctcgccccggcctgcggtgaaacgcgtcgcgctgctcggcgaggagtacgtcggcatgcgcccctcgatggccgtgagcgaaggcgatcgggtgcaaaaaggccaggtgctgttcgaagataaaaagaacgccggggtacgttttaccgcgccagccagtggggtggtcagcgccattcatcgcggcgagcgccgggtgctgcaatcggtggtgattgatgtcgacagcagcaatgaggcggtgtcgtttacccgctatgcattagaagatcttaacgatttgccacgggaagcggtgcagcaacagctgctggactccgggcagtggacggcgtttcgtacccgtcctttcagcaaaattcccgcgccgggtagcgttccggcggctattttcgtcactgctatcgataccaacccgctggcggctgaaccgcagccgattatcctggcccagcgtgaagcctttgatgccggtctgacggtgctaacgcacctgacggacggtaaagtccacgtctgtcaggccagcggcggcaagctgggcggccatcccgccgggcaggtgacattcaaccagtttagtggcccgcatccggcagggcttgccggtacgcacattcacttccttgagccggtcagcctgaccaaacaggtctggcatctcaactatcaggaggtcatcgccatcggcagactgttcctcgacggcgagctgtacagcgaacgcgtcattgcccttggcggcccgcaggtaaaacagccgcggctgctgcaaacctgtcttggcgccagcctcgatgaactgctggcgggcgagctggtggatgatgaaaaccgggtaatttccggttcagtcttgagcggcactcacgcctgcggccctcacgccttcctcgggcgctaccatttgcaggtcagcgtcgtcagagaaggccgcgaaaaagagctatttggctgggtgatgccgggcaaagagaagttctcgattacccgtaccacccttggtcatttctttaagcgcaagcgctttaatttctccactgatactaacggcggcgagcgggcgatggtaccgatcggcaactatgagcgggtgatgccgctggatattctgccgaccatattgctgcgcgatctgcttgccggcgatagcgatagcgcccaggcgctgggctgtctggagctggatgaagaagatctggcgctctgcacctacgtttgtccgggcaaatatgaatacggcccggcgctgcgcagcgtgttaacccagattgagcaggaaggataa

SEQ ID NO: 87301 - DNA, 741 bp, Enterobacter aerogenes
atgcgcaaaatcgcattctttattgcgatgcttctgttgccgtgcgtgtcatttgctgggttactcagcagtaacagcccgacaacgccggttagcaaagaatataaacagcagttaatgggctcccccgtttatattgagatcttcaaagaagagcggatgctcgatctctacgtcaaaatgggcgaaacctaccagcttctcgatagctaccggatctgtaactactccggcggcctcgggccgaagcaacgccagggcgatttcaaaagtccggaaggattttataacgtctcgcgcagtcagctaaaaccagacagccgcttttataaagcgatcaatatcggcttcccaaatgcctacgatcgcgcgcacggctatgaaggtaaatacctgatgatccacggcgcctgcgtttccgtcggctgctacgcgatgaccgataccggcattgacgagatcttccagtttgtcaccggcgcgctggtatttggccagccaagcgtgcaggtcagcatctacccgttccgcatgaccgacgccaacatggcgcgacataagttctcgtactatgcggatttctggaagcagctgaagccaggctatgactacttccagcagacccacaaaccgccggtggtttcggtgatggatggccgctatatcgtcagcaagccgctcagccacgaggttatccagccgcagctggcctcaaactatacgctccccgaggcaaaataa

SEQ ID NO: 87302 - DNA, 768 bp, Enterobacter aerogenes
atgtgcgaattgctcgggatgagcgccaatgtgccgaccgatatctgttttagcttctccgggctggttcagcgcgggggcggcaccgggccgcataaagacggctggggtattaccttttacgaagggaaagggtgtcgcacatttaaagatccgcagccgagctttcagtcgccaatagccaaactggtacaggattatcccatcaaatcctgttccgtcattgcccatatccgtcaggccaaccgcggcgaagtggcgctggagaacacccatccgttcacccgcgaactgtggggtcgccactggacctacgcccataacgggcagctcaagggttataaatcgctgaagacgggaaatttccgcccggtgggcgagaccgacagcgaaacggctttctgctggctgttgcaccgtttaaccgagcgctatccgcgcacgcctggcaatatggtcggcgtgtttaaatacatcgcgacgctggcgggcgaaatgcgcgagaagggcgtgtttaatatgctgttatcggacgggcgctatgtgatggcgtactgttcaaccaacctgtactggatcacccgtcgggcgccgtttggcgtggcgaagctgctggatcaggatgtggaaattgattttcaacgtgagaccacaccaaacgatgtggtctccgttatcgccactcagccgctgaccggcaatgaggcctggaataaaatcatgccaggcgagtgggcgttattttgcctcggggagcgtatagtttga

SEQ ID NO: 87303 - DNA, 582 bp, Enterobacter aerogenes
atgtaccaggatcttattcgtaacgaactgaacgaagccgcggaaacgctggccaactttctgcaggacgaggccaacattcacgctatccagcgcgcggcggtactgctggcggatagcttcaaagctggcggtaaagtgctttcctgcggcaacggcggttctcattgcgatgcgatgcattttgcggaagagctgaccgggcgttatcgcgagaaccgccctggttatccggcgatcgctatttctgacgtcagccatctgtcctgcgtgagtaatgattttggctatgaatatgtcttctcccgctatgttgaatctgttggccgcgcaggcgatgttctgctgggcatttccacctccggcaactccggcaacgtgatcaaagcgattgaagccgcgcgcgcgcagggtatgaaagtgatcaccctgaccggtaaagacggcggcaaaatggcgggttccgccgatgtggaaatccgcgtaccgcatttcggttacgccgatcgcattcaggagattcacattaaggtgattcatattctgattatgttgatcgaaaaagagatggttaaagcttaa

SEQ ID NO: 87304 - DNA, 2445 bp, Enterobacter aerogenes
atgatgattttgagtattgttgcaaccgtagtgttactcggcgtgctcttctatcaccgagtcagcctgcttctcagcagcgtgattttgctcgcctggaccgcggcgctcagcgtggcggggctgtggaatatctggctgctgttgccgctggcgattatcctgctgccgttcaactttgcgccgatgcgtaaatcccttttctccgccccggcattccgcgccttccgcaaagtcatgccgccgatgtcgcgtacggaaaaagaagccatcgatgccggcaccacctggtgggaaggcgatctgttccgcggcaacccggactggcacaagctgcataactatccgcagccgcgcctcaccgccgaagagcaggctttcatcgacggcccggtagaagaagcctgccgcatggcgaacgacttcgaaattacccatgaaatggcggatctgccgccggagctgtgggcgtacctgaaagagcatcgcttctttgcgatgatcattaagaaagagtacggcggcctggagttttccgcctatgcccagtctcgcgtgctgcaaaagctgtccggcgtttccgggatcctggcgatcaccgtcggcgtgcctaactccttagggccgggcgaactgctgcaacattacggtaccgaagagcagaaaaatcactacctgccgcgcctggcgcgtggtcaggagatcccatgcttcgcgttgaccagcccggaagcgggctccgacgccggcgcgatcccggataccggcgtagtctgtatgggcgactggcagggtcagcaggtgctggggatgcgcctgacctggaacaagcgctatatcaccctcgcgccaatcgccaccgtactgggcctggctttcaaactctcagacccggaccgtctgctgggcggcgaggaagaactcggtatcacctgcgcgctgatccctacctcaacgccgggcgtggaaattggccgtcgtcacttcccgctgaacgtaccgttccagaacggccccactcgtggtaaagatattttcgtaccgatcgattacatcatcggcggcccgagcatggccggccagggctggcgtatgctggttgagtgcctgtccgtgggtcgcggtattactctgccgtccaacgccaccggcggcctgaaatccgtcgctatggcgaccggcgcctacgcccacattcgccgtcagttcaaaatctcgattggtaaaatggaagggatcgaagagccgctggcgcgtatcgcaggcaacgcctacgtaatggacgccgccgcttcgctgattacctacgggattatgcttggcgagaaaccggcggtgctgtcggcgatcgttaaatatcattgtacccaccgcggccagcgttcaatcatagacgctatggatattaccggcggtaaaggcatcatgctgggcgaaggcaacttccttgcccgcgcttatcagggcgcgccgatcgccattaccgttgaaggggcgaatatcctcacccgcagcatgatgatctttggtcagggggcgattcgctgccacccgtatgtactggatgagatggccgccgcgcagaacaatgacgttaacgccttcgataagctgctgtttaaacatatcggccatgtcggtagcaacaaagtacgcagcttctggctgggcctgactcgcggccgcaccagcagcgcgccgacccgtgatactacacgccgctactatcagcacatgaatcgcctgagcgccaacctggccctgctgtcggatgtatcaatggcggtactgggcggcagcctgaagcgtcgcgaacgtatctccgcgcgtctcggcgacgtgctgagccagctttacctggcatcggcggtgctgaaacgttatgacgatgaaggccgtaatgaagcggatctgccgctggtccattggggcgtgcaggatgcgctgtatcaggcagagcaggctatcgatgacctgctgaagaacttcccgaaccgctttgtcgccggcgcgctgcgtctcgccatcttcccgaccggccgtcactacgatgcgccgtccgacaagctggatcataaagtggcgaaaattctgcaggttccgagcgcgacccgctctcgtatcggtcgcggccagtacctgacgccaagcgaacataacccggttggcctgctggaagaggcgctgctggatgtgatggcggcggacccaatccaccagcgcatctgcaaagagctgggtaaaaatctgccgttcacccgcctggatgagctggccactaatgcgctggccaaagggttaattaatcaggaggaagcctcgattctgacccgtgcggaaaccagccgtctgcgcagtattaacgttgatgatttcgcggcggatgaactggcgaccaaaccggtaaagctgccggaaaaaatccgcaagattgaagcggcataa

SEQ ID NO: 87305 - DNA, 771 bp, Enterobacter aerogenes
gtgtctggcttgaaaattacgctgttgcagcaaccgctggtatggatggatggtcccgccaacctgcgccatttcgatcgtcagctggaagaagtgagcgggcacgacatcattgtgctgcctgagatgtttactaccggatttgccatggaagcggcgaagcagtcgatgccgcagggagaggtcgttgagtggatgctggcgaaagcggagcagaccaacgcaatgattgccggtagcgcggccttgcagaccgaacgtggcccggtgaaccgctttctgctggtagagcccggcggtaaaatgcacttttacgataagcgtcacctgttccgcatggcggatgagcatcaccattatgaggcaggtactgagcgagtggtctttgaatggcgcggctggcgaattctgccgctggtatgttatgacctgcgcttcccggtatggtcgcgtaaccacaacgattacgacctggcgctgtatgtcgctaactggccagccccgcgttcgctgcactggcaatcgctgctggtcgccagagcaattgaaaaccaggcctacgtcgccggctgcaaccgcgtcggcaccgatggtaacggccaccattatcggggcgatagccgtatcatcagcccacagggagagattatcgctaccgccgaaccgcatcaggcgacgcggctcgaagccgatctgtcgttggccgcgctgcaggagtatcgcgagaaatttccggcctggcaggatgccgatcccttcacaatcggctaa

SEQ ID NO: 87306 - DNA, 591 bp, Enterobacter aerogenes
gtgaccccagctttgattagtgcttttttgacttataccctgataaccgcgctgactcccggccccaataatattcttgccctcagcagcgtcaccgcccatggcttacgccgcagtctgcgggtgctggcggggatgagcattggttttattatcactatgctgatttgcgcggctttaaccttttcgctggtggaactcgactcgcgatttacccggatattgggatggattggcgcggcgtatatcctgtggctggcctggcagatagccaaaagcaaaccgggggcaggcgcgctgagtacagagccggtgggtttctgggcgagcctgggcctgcagttcgtcaacgtaaaaattattctgtatggcatcaccgcgctctctacctttgtcctgcctgttacccgcgagccgatttggctcattagcgtgagtctgctgctggcggcgattggcgcgctgggaaatctatgctgggctctggcggggcatctgtttcagcgcctgtttttgttgtacgggcggcaactgaactgggtattggcagcgttattggtctactgcgctttgcggatcgtggtggaataa

SEQ ID NO: 87307 - DNA, 882 bp, Enterobacter aerogenes
atggatctgcggcgttttattactctcaagacggtagtggaagaaggctcgtttttacgcgcggcgcaaaaactatgctgtacgcaatccaccgtgacctttcatattcaacagcttgagcaagagcttgccgttcagctgtttgaaaaaattggtcgccgcatgtgcctgaccgaatccggtaaaaaggtgctgccgcacgtccatgaactggcgagggtgatggaaaccattcgtgaggcggctcgcgaggatggcgaaccggctggcgagctacgcgttgcctgtggggaaaccctgctggcctataaaatgccgcaggtgctacagcgctttaaacaacgggcgccgcaggtacgcttatcgctgcagtcgctcaactgttatgtcatccgcgatgcactactcaacgatagcgccgatttgggcgtgttttatcgggttggcaacgatgacgcgttaaccatgacaagctttggccagcagtcgctgacgctggtcgcctcgccgcagcatccggcggtcgattttacccgctgcgggcaacatattccgctgagctttgttatcaatgagccacagtgcgtatttcggcaaatttttgaaagcacgctgcgccagcgcgccattaccctggaaaatactattgagctctggagtatcgaaagtattaagcagtgcgtggcgagcaatcttggcgtcagctatctgccgcgtttcgccgttgaggaagagcttaagcgcggtacgctggttgaactcccgttcagcgatattccactcactattaacgcgatatgcgcccatcacgccggtaaagtgattagcccggcaatgcgggtatttatgcagtgtgttgaggaggcgtcaggggcggattaa

SEQ ID NO: 87308 - DNA, 741 bp, Enterobacter aerogenes
atgaccgctatgagcactgcaattacacgacagattgttctcgataccgaaaccaccggtatgaaccagatcggcgcccactatgaagggcataagatcatcgagatcggcgccgtagaggtgatcaaccgtcgcctcaccggtaataacttccatgtttacctgaagcccgaccggctggtggaccctgaagccttcggcgttcacggtattgccgatgaattcctcatggataagccgacatttgccgacgttgccgatgagttcatggagtatatccgtggcgcggagctggtcatccataacgcatcgttcgatatcggctttatggattatgaattcaaaaagctgaaccgcggcattgagaaaacggaaaccttttgtaaggtcaccgatagcctggcgctggcgcgtaagatgttccccggcaagcgtaacagcctcgatgcgctctgttcacgttatgaaatagacaacagcaagcgtacgctgcacggcgcgttgctcgatgcccagattctggccgacgtctatctgatgatgaccggtgggcagaccagcatggcgttttcgatggaaggagaaggccaacagcaggccggcgatattggaatacagcgcgttgtccgcgccgccagtaaattacgcgtggtttatgcctctgacagtgagctggcggaccatgaatcgcgtctcgacctggtgcaaaaaaagggcggaagctgcctgtggcgcgcctga

SEQ ID NO: 87309 - DNA, 468 bp, Enterobacter aerogenes
atgctcaaacaggtagaaattttcaccgatggttcttgcctggggaatccagggcctggcggctacggcgctattatgcgctatcgccagcgtgaaaaaacctacagcgcgggctaccgcctgacgactaacaaccgcatggaactgatggctgccatcgtcgctctcgaagcgcttaaagagcactgcgaagtggtgctaagtaccgatagccagtacgtccgccaggggataacccagtggatccataactggaaaaaacgcggctggaaaacggcggacaaaaagccggttaaaaatgtcgatctgtggaaacgccttgatgccgctctaggccagcatcagattaaatgggaatgggtcaaaggccatgccggacacccggaaaatgaacgctgcgacgaactcgcgcgcgctgcggcgtctaaccccacgctggacgacgtcggctaccagccggaaagctaa

SEQ ID NO: 87310 - DNA, 669 bp, Enterobacter aerogenes
atgccgtggggtgaatactatcgcgagtcgctggaacggcatatgaaaccgtggctggctaaattatatggctttcatctacttaagattggcaatctgagcgcggaaatcaataccgaagcctgcgcgatctcccatcaggtgaacgtttcgctggggggaagtccgatccaggtcaaagccgacccgctgtctcttcctttcgccgccaaatcggtggatgcctgtttactggcgcatactctgccatggtgcagcgatccgcaccggctgttgcgggaagctgaccgcgtgctgattgacgatggctggatgattttgaccgcctttaatccgatgagcctcgtcggattgcgcaaagtgacgccggttctgcgaaaaactatcccctataacagccggatgtttaccatgacgcgacagcttgactggctggcgctgctcaattttgaggtgctgcactacggtcgctatcaggtgctgccctggtcgaagcaggggggaaaaatgttaagtacacatctgccggctttggggtgtttgcagatgatcgtcgcgcggaaaagaaccattccgctgacgctaaatccgatgaagtccgggaaggcgaagacgcagctgcgtccggccgttggcgccaccaggcagtggcgcgacgggggaaattag

SEQ ID NO: 87311 - DNA, 756 bp, Enterobacter aerogenes
atgaatcttatcagtattcctgcatttcaggacaactacatctgggttgttagcgacgatagccgtcgttgtgtgatagtcgatcccggtgaaaccgcgccggtactcgcggccattgaagaaaacaactggcagccagaagcgattttgttaacccaccaccaccatgatcatgttggcggcgtgaaagaactgcggcaaaaatttccgcaacttgtggtttacgggccggcagaaacccaggataagggaagcacggatattgtatctgatggcgatagcattactcttttgggtcacgaattttctattttcgccacgccaggtcacacattaggacatatctgtttctacagcaaaccttatctattttgtggcgatacaatgttttccggcggctgcggcaggctgttcgaaggtacagcagatcaaatgtatcaatcatttatgaaaataaatgcccttccagctgacaccctaatttgttgcgcacatgagtacactttagcaaacatgaagttttcattgagtatcctgccagatgatatggatataaaggattactaccataaagttaaggagttacgcgcaaaaaaccaaaagacactacccgttactctgaaaaatgaacgccgtataaatatatttttacgtacggatgacaatgatttaattaaagaaatatccaaagaaacaaatttgcaacactcagcgcagagatttgcatggttaaggtcaaagaaagatgacttctga

SEQ ID NO: 87312 - DNA, 1155 bp, Enterobacter aerogenes
atgggaattccggaaaacccccggattcgcgaacagaaacagaagtacttacgtaataagagctatctccacgatgtaactttacgggctgaaccgtatatgtactggatagccgggcaagttaagaaacgtaacatgccaatggaactggtattactacccatagtggagagcgcttttgacccacacgcgacgtctggcgccaatgccgcaggcatttggcagatcattccgagcacagggcgcaattatggtttaaaacagacccgcagttacgatgcgcgtcgtgatgtcgtcgcgtccactaccgcggcgctggacatgatgcaacgtctgaacaaaatgttcgacggcgactggttactgaccgtcgcggcatataacagcggcgaaggccgggtaatgaaggccgtgaaggcgaaccgttcgcgtggtaaacccaccgatttttggtcgctctcgctgccgcgtgaaaccaaggtctacgtgccaaaaatgctggctttgagcgatattctcaaaaacagcaagcgttacggcgtgaagctgccaacggctgatgaaagccgtgcgctggcgcgcgttcgcctcgatagtccggttgagatttctcagctcgcggacatggcaggaatgccggtcagcaagctgaaaacctttaacgccggcgtaaagggttcaacgcttggcgctagcgggccaaagtacgttatggtgcctcagaagcacgcggctcaactgcgtgagtctctggcctctggcgacattgccgccgtacagccgacgcagctagctgacaatacgccgctgaccagccatagctacaaggtacgttctggcgatacgatttccgggattgcttcgcgtctcggcgtcaccaccagggatctgcagcagtggaacaacctgcgcggttcagggttgaaagttggacagaatctggttgtcggcgcaggcagcagcgcgcaacgtctggcgaacaacaatgatagcatcacctatcgtgttcgtaagggcgactcgctatcgagcatcgcaaaacgccacggcgtcaatatccgcgacgttatgcgctggaacagcgataccgataacctgaagcctggggatcagctaacgctgtttgtgaagaacaacgacagacctgaatcctga

SEQ ID NO: 87313 - DNA, 771 bp, Enterobacter aerogenes
atgacaacacgctctcatcatgacaacgtcgaaaagcagtttggctcacaggcaagcgcctatctgaccagcgccgtacacgcctccgggcgcgatctgcagcgtctggcggaacggctggcggatttcccgcaggcaacgttgctggatatgggatgcggggcagggcacgccagttttaccgccgcaggccaggtagcgcaggttaccgcgtatgatttatcgagccagatgctggaggttgtcgctcaggcggcaaaagacaaaggctttaccaacatcgtcactcagcagggatatgctgaaatgctgccgtttgccgacgccagttttgatgtggtgattagccgctactccgctcaccattggcatgatgtcggccaggcgctgcgcgaggtgaaacgcgtgctgaagccgggcggggtgatgatcatgatggacgtaatgtctccggggcatccggtacgtgatgtctggctgcagaccgtagaggccctgcgcgacacctcgcacgtgcgtaattactccagcggcgagtggctggcgctggccaacgacgcaggcctggcgatcaatcatttattgaccgatcgtctgccgctggaatttagctcctgggtcgcgcggatgcgcacgccagaagcgctggcggaggcgattcgcttatatcagcagagtgcatcggcggaggttaaagcctacttcgaattacagcaggatggatcgtttaccagcgataccatcatgtttgaagcgcataaagcagtgtag

SEQ ID NO: 87314 - DNA, 807 bp, Enterobacter aerogenes
atgcccaaattgcgaaagaatacctatgccatgcgctatgtcgccggacaacccgcggagagaatcttgcctccgggggcgtttgcgggcgtcagtccggtttatcccgccggcgcgccattaagcagcgatgagaaaattcgcgtgctggtgtggaatatctttaagcagcagcgtgcagaatggcagtcagtgctcaaaaatttcggcaaagacgcgcatctggtcctgttgcaggaggcgcaaaccaccccagaactggtcaggttcgcgacttcaaactatctggccgccgatcaggtgccggcgctggtattgccgcagcatccttccggcgtgatgacgctggcctccgctcaccccatctattgctgtcccttgcgcgagcgcgaacctattttacgtttgcctaaatcggcgttagtgaccgtttatccgctgcccgatgcacggctgttaatggtggtgaatatccatgcggttaattttagtcttggcgtcgatgtctatagtaaacagctgctgccaattggcgatcagattgcccatcacagcgggccggtaatcatggctggtgatttcaacgcctggagccgcccgcggatgaatgcgttgtaccgctttgcgcgtgagatgtcgttacgcgaggttcgtttctctgacgatcagcgccgccgcgcgtttggtcgcccgctcgattttgtgttctaccgcggcttaagcgtgcacgatgcctccgtgctggtgacccgcgcctccgatcacaacccgctactagtcgaattcagtcccggcaagcctgattaa

SEQ ID NO: 87315 - DNA, 1191 bp, Enterobacter aerogenes
atgccactggcgctacttgcattaaccatcggtgcctttgctattggcactaccgaatttgtgatcgtcggtctggtaccgaccatcgccgaacaactggctatctcgctgccgtctgcgggcctgctggtttccatctatgcgctaggcgtggcgattggcgccccggtgctgaccgcgctaaccgggcgcatgccgcgtaagcagctcctgctggcgttaatggtgttgtttaccgccggtaacctgctagcgtggcaggctccgggttatggcactttgattatggcccgcctgctgaccggcctggcgcatggcgtattcttttctatcggctcgacgattgccaccagcctggtgccaaaagagaaagccgcctcggccattgctatcatgttcggcggcctgacggtcgcgctggtaaccggggtgcctttcgggacgttcatcggtcagcattttggctggcgggaaacgttcctcgcggtatcgattctgggcgtcattgcgcttatcagcagcctgatcctggtgccgaataatattccgggccgcgccggcgccagcctgcgcgatcagatgaaagtcttgacccatccgcgcctgttgatgatctacgcgattaccgcgctgggctatggcggcgtgtttaccgcatttactttcctcgcgccgatgatgcaggagctggctggctttagcccgtctgcggtcagttggatcctgctgggttacggtatctctgtcgctatcggtaacgtgtggggcggtaagctcgccgataaacatggcgccgtcgccgcgttgaaatttatcttcgctgcgttggtggtgctgttgctggtcttccagttcacggccaatctgcactacgccgctctggcaacggtactggtgatgggcattttcgccttcggcaacgttccgggtctgcaggtctatgtggtgcaaaaggctgaacaatacacgccgggcgccgttgatgtcgcctctggtttgaacatcgctgccttcaatattggtattgccctcggttcggtcattggtggacagacggtcgagctgtacggtctggcgcagacgccgtggattggcgcgctgattgtgctggttgctttgctactggtcgtactgagcggtcgtttagataaatctccacgccgttcggcagccgtttctctcgaaggataa

SEQ ID NO: 87316 - DNA, 903 bp, Enterobacter aerogenes
atgagagccacgtcagaagagatcgctatcttcgtcgccgtagtggaaagcggcagttttagccgggcggccgagcagctcgggcaggcaaactctgccgtcagccgggcagtcaaaaagctggaatcaaagctaggcgttagtttgttaaaccggaccacgcgccagctgagcctgacagaagaaggcgagcgttatttccgccgcatgcaggtggtgttgcaggagatggcggctgctgagaacgagcttctggagacgcgcaccacccctcgcggattgcttcgcgttgatgccgccaccccggtgatgctgcattttttaatgccgctggtaaaaccgtttcgcgaacgttatccagaaatgacgctctcgctggtctcctcggaaaccttcattaatcttatagaacgtaaagtcgacgtcgcgatccgcgtgggtaccctaaccgattccagcctgcgcgcccgcccgctgttcaccagctatcgcaagatcatcgcctcgcctgattatatcgcccgctacggcacgccggtgaatgcggaagatcttgcggatcatctctgcctggggttcaccgagcctgtctcattaaatacctggcctattgccgccagcgatggccaattactggaagtcggttgcgaaattacctctaacagtggcgaaacgctaaaacagctctgtcttggcggcaatggtattgcctgtctatcggattatatggtggataaagagattgccagcggggagtttgtggagctacttgccgacaagcgcttgccggtggagatgcctttcagtgcggtgtattacagcgacagagccgtcagcacgcgcatcagggcatttattgactttctgagtgagcacgtcaaacagctcccgaaggagctgtaa

SEQ ID NO: 87317 - DNA, 618 bp, Enterobacter aerogenes
atgccgaaacatgcgatactaacggcattagcctttatcaggagcaaaccggtggcaaagtctgtacccgcaatttttctcgaccgtgacggcacgattaatatcgatcatggttacgtccacgaaatcgacagctttgagtttatcgacggcgtcattgatgccatgcgtgaactaaaggcaatgggatttgcgttagtgctggtgaccaaccagtcaggcatcgcgcgcggtaaattcacggaagcgcaattcgagaccctcaccgaatggatggattggtcgctggcagaccgcggcgtggatctcgacggtatctattattgtccgcatcacccgcaggggagcgttgaagagttccgccagacctgcgattgccgtaagccgcatccggggatgctcatttccgcacgcgatttcctgcatattgatatggccgcttcttatatggtgggtgataaactcgaagacatgcaggcggctgcagcggcgaatgtcggaacgaaagtgctggtgcgtaccggtaagccggttaccgaagaagcggaaagcgcagcggattgggtgctaaatagcctggcggacctgcctgcggctattaaaaagcagcaaaaataa

SEQ ID NO: 87318 - DNA, 1032 bp, Enterobacter aerogenes
atgattaaactttcgaatattaccaaagtgttccagcaggggaaccgcaccatacaggcgctgaacaatgtcagcctgcatgtccctgccgggcaaatttacggcgtgatcggcgcttccggcgcaggtaaaagtacgctgattcgctgcgttaacctgctggaacgcccaaccgaaggcagcgtgcaggtagataaccaggaactcaccgcgctgactgaaaaagaactgactcgcgcgcgccgtcagattggcatgatcttccagcactttaatctgctcgcttcacgtaccgttttcggcaacgtggcgctgccgcttgagctggataacacaccgccggcggaaatcaaacgccgtgttaatgaactgcttgacctggttggtcttggcgataagcatgacagctatccggcaaacctctccggcggccagaaacagcgcgtggcgattgcccgcgcgctggccagcaatccaaaggtgctgctgtgcgatgaagccaccagcgcgctggacccggcaacgacccgttcgatcctcgaactgctgaaagacattaaccgtcgtctggggctgaccattctgttgatcacccatgaaatggacgtagttaaacgtatctgcgactgtgtggcggtcattagcaatggtcaactgatcgagcaggacaccgtgagcgaagtcttctcccatcctaagacgccgctcgcccaacagttcattcaatctaccctgcatctggatattccggatgactatcaggcgcgcctgaagcccacgccgctgcctgacagcgtgccgatgctgcgtatggagtttaccggccattccgtcgatgcgccgctgctgtcggaaaccgcccgccgctttaatgtgaataacaacattattagcgctcagatggattacgccggcggagtgaagttcggcatcatgctgaccgaaatgcacggcacacaggaagatacccaggcggcgatcgcctggctgcaggaacatcatgtaaaagtagaggtactgggatatgtctga

SEQ ID NO: 87319 - DNA, 654 bp, Enterobacter aerogenes
atgtctgaaccaatgatctggctgctggttcgcggcgtgtgggaaacgctggctatgacgtttgtctccggcttctttggctttgtgctcggcctgccggtcggcgtactgctgtacgttacccgtccggggcagattgccgccagcgcccggctgtatcgtacgctatcggcgctggttaatatcttccgctcgattccatttattattctgctggtgtggatgattccatttacccgcgtgatcgtcggtacctctatcggcctgcaggcagcgattgtgccattaacggttggcgccgcgccgtttatcgcacgtatggtggaaaacgcgctgttggagatcccgaccgggcttatcgaagcttcacgcgcgatgggcgcaacgccaatgcagatcgtgcgtaaagtcctgctccctgaagcgctgccgggtctggtgaacgccgccactattacgctcatcaccctggtgggttattccgcaatgggcggtgcggtcggtgccggtggcttgggtcagattggctatcagtacggctacatcggctataacgcgacagtaatgaacaccgtactggtattgctggttattctggtttatttaattcaattctctggcgatcgtatcgtccgggctgtgactcacaaataa

SEQ ID NO: 87320 - DNA, 816 bp, Enterobacter aerogenes
atggcctttaatttcaaaacctttgcggcagttggcgcattaatcggttctctggctctggtgggttgcggtcaggatgaaaaagatcctaaccatattaaagtcggcgtgatcgtcggtgcggaacagcaggttgctgaagtcgcgcagaaagtggcaaaagagaagtatggccttgacgttgagctggtgaccttcaacgactacgtgttgccgaacgaagcgctgagcaaaggcgacatcgacgttaacgccttccagcataaaccgtatctcgaccagcagattaaagaccgcggttataagctggtttccgtcggcaacaccttcgtctatccgatcgctggctactcgaagaaaatcaaatctctggacgaactgcagccgggctcacagattgccgtaccgaacgatccgaccaacctcggccgttccctgctgctgctgcagcaagtgggtctgattaaactgaaagaaggcgtaggtctgctgccgacgtctctggatgtggttgagaacccgaaaaacctgaagattgttgagctggaagcaccgcagctgccgcgttctctggacgacgcgcagatcgctctggcagtcatcaacaccacctacgccagccagattggcctgacgccggcgaaagacggtatcttcgttgaagacaaaaactcgccgtacgtaaacctgatcgtcgcccgcgaagataataaagacgcggaaaatgttaagaaatttgttcaggcttaccaaagcgatgaagtttacgaagccgctaacaaaatctttaacggcggcgcagtgaaaggctggtaa

SEQ ID NO: 87321 - DNA, 408 bp, Enterobacter aerogenes
atgcgtgctttaccggtctgtttgttagcactcatgttaagcggttgttctatgctaagcagatcccccgttgagcctgttaaaagcaccgcaaccacgccagtccagacggaaacggctaaaccaaaagtctcacgtcccgcgccggtcagaatctataccgatgccgccgcgctggttgggaaacccttccgcgatctgggtgaagtgagcggcgaatcatgccaggcttcaaaccaggactccccaccgaacatcccgaccgcccgtaaacgcatgcaaatcaacgcggccaaaatgaaggccaacgccgtgctgctgcacagctgcgaagtgaccagcggtacgccaggctgctaccgtcaggccgtttgcctgggttcagcgcttaacgtctcggcgcaatga

SEQ ID NO: 87322 - DNA, 708 bp, Enterobacter aerogenes
atgagtgcatttcagttcgcgcaaataggcgtcatccgctcgccgtataaagagaagtttgccgttcctcgccagcctggtctggttgaacacggcggcggagaacttcatctgctcgcgccctataaccaggctgacgccgtgcgtggactggaaaacttcagccatctgtgggtgctgttcgtctttcatcagaccatggctggcggctggcgcccgaccgtgcgccctccccgccttggcggcaacgcgcgcatgggcgtcttcgcgacccgctcgacatttcgccccaaccctatcggcatgtcgctggttgaactgaaaggcgttcgctgccagaaggatcaggtaatactggaacttggcagcctcgatctcgttgacggcacgccggtggttgatatcaaaccttatcttccctttgccgaagccctgcctgatgccagcgctagctatgcgcaacaggcgccgctggcaggcatgaatgtcagctttacgccggaaatagaagcacagttactgacgctggaaaaacgctacccgcatatcaaagcgtttatccgtgaagtactggcgcaggatccgcgtccggcttatcgcaaagaggaagaagcagggaaaacctacgccgtctggttgctcgatttcaacgtgcgctggcgggtaatcccctccggttttgaagtcttttctctcgaaccgcgctaa

SEQ ID NO: 87323 - DNA, 1719 bp, Enterobacter aerogenes
atgcgtactagccaatatctgctctccactctgaaggagacacctgccgacgccgaagtcatcagccatcagctgatgctgcgcgccgggatgatccgcaagctggcctcagggttgtacacctggctgccgaccggcgtgcgcgttctgaaaaaagtcgagaacatcgtgcgtgaagagatgaacaacgccggtgctatcgaggtgttaatgccggtagttcagccttctgaactgtggcaggagagcggtcgctgggaacaatatggccctgagctgctgcgcattgccgatcgtggcgatcgcccgttcgttctcgggccgactcacgaagaggtcattactgacctgattcgcaatgagctgaactcgtacaaacagctgccgctgaacttttatcagattcagaccaagttccgcgatgaagttcgcccgcgtttcggcgtgatgcgctcccgtgagttcctgatgaaagatgcttactctttccatacctctcaggagtcgctgcaggaaacctacgacgcgatgtataccgcttatagcaaaatcttcagccgtatggggctggatttccgcgcggtacaggctgacaccggttcgatcggcggtagcgcttcccatgagttccaggtactggcgcagagcggcgaagatgacgtgatcttctctgacagctccgactacgcggcgaacattgagtttgccgaagccgtcgcgccgaaagagccgcgcgcagccgcgacgcaagaaatgacgctggtagacacgccgaacgcgaaaaccatcgccgagctggttgagcagttcaatctgccaatcgaaaaaaccgttaagaccctgctggtgaaagcggtagaagatagcagctacccgctggtcgccctgctggtacgcggcgatcacgaactcaacgaagtaaaagcggaaaaactgccgcaggtcgccagcccgctgaccttcgccagcgaagaagagatccgcgctatcgttaacgccggcccgggttctctcggtccggtaaacatgccgattccggtggttatcgaccgtaccgtcgcggccatgagcgatttcgccgccggcgccaacatcgatggcaaacactatttcggcattaactgggatcgcgatgtcgcgactccggaagttgctgatattcgtaacgtcgttgccggcgatccgagcccggatggtaaaggtactctgcttatcaagcgtggtatcgaagtcggccacatcttccagttgggcaccaagtactcccaggcgatgaatgccgcggtacagggtgaagacggccgcaaccaggtcctgaccatgggctgctacggtattggggtgacccgcgtagtggccgcagccattgagcagaactttgacgatcgcgggattatctggccggacgccatcgcgccgttccaggtcgctattctgccgatgaacatgcacaagtcctatcgcgtgcaggagctggccgagaagctgtacgccgagctgcgtgcgcatggcatcgacgtgctgatggacgaccgtaaagagcgtccgggcgtgatgttcgccgatatggagctgatcggcatcccgcacaccatcgtgctgggcgaccgtaacctcgacaacgatgatatcgaatacaaacatcgtcgcaacggcgagaagcagctgattaagaccggggatatcgtgaactacctggtgcagcaaattaaggggtaa

SEQ ID NO: 87324 - DNA, 720 bp, Enterobacter aerogenes
atggattataaggaattcacagtgaagaaaattgtattttcgctcgcagcggcctgttcgctctttgcgctgtttggctgtaaccatcgcgctgaggtggagacggtacagccgacggcgatggaagaactgaagccgatgcagcaaagctggcgcggtattttgccttgcgcggattgcgaagggattgagacctcgttatttcttgagaaagacggcacctgggtaatgaacgaacgttatcagggcgttagccgcgagccgtcatctttcgcttcgtatggcacctgggcgcgtaccgctgataagctagtgctgaccaacagtaaaggcgagaaatcttactatcgggcgaaaggcgataagcttgagatgctcgatcgcgacggcaacccgattaactctgcgcttaactatacgctggagtcggtgaaggccagcctgccgacgacgccgatggcgatgcgcgggatgtatttctacatggcggatgcggcaacctttaccgattgcgtcacaggtaaaacggtggcggttgccaataatgcccagcttgagcgagattatgccgctgcgcgcgggacggatactcgtccggtattgctggtggttgaaggacacttcacgcttgaagcgaatcccgataccggcgagatgatgaaaacgctaatgacggataaagacagcaaatttattccgggtaaagactgcggtaattaa

SEQ ID NO: 87325 - DNA, 414 bp, Enterobacter aerogenes
atgatcatgattagccgcagcgtttccatcccggatgaggagatttcgcttaccggggtccgcgcacagggggcgggcggtcagcacgtgaataaggcttcgacggcgattcacttacgttttgatattaaagcatcgagcctgccggagttttataaagagcgcctgcttgccgccagtcaccacttaatttctgctgacggtgtggttatcattaaggctcaggaatatcgcagccaggagatgaaccgcgaagcggcgatctcgcggctggttgcgttaataaaagaattaaccgcagtgcaaaaaagccgccgggagacgcgaccgactcgggcgtcaaaagagcgacgacttgcctccaaggcgcaaaagtcctcagtcaaagcgctgcgtgggaaagttcgccattga

SEQ ID NO: 87326 - DNA, 546 bp, Enterobacter aerogenes
atggcgctgaaagcgacgatttataaagctgtggttaacgttgccgatttggatcgcaaccagtttctggatgctaacctgacgctggcgcaacatccttccgaaacccaggagcgtatgatgctgcgcctgctggcgtggataaaatatgccaacgagcgcctgcagttcacccgcgggctgtcctcggatgatgaaccggagctatggcagttaaacgaccatttgggcatcgatctgtggattgagctggggctgccggacgagaagcgcctcaagaaagcctgctcgcgggcgcaggaggtggcgctattcgcctataatagccgggcggctgaaatctggtggcagcagaatcagaataagcttgcggcgtatccgaagctgaccatctggtatcttgatgatgcgcaactggcgcagctgagcgcttttgccgatcgcaccatgacgctgcaggcaaccctgcaggacggcggcatctggttatccgacgatcggaataatctggaaattcatttaacggcctggcagcagccggcatga

SEQ ID NO: 87327 - DNA, 201 bp, Enterobacter aerogenes
gtggatcaatattgtgagttaatacgcaagcggtatgcggaaatagccagcggagacttagggtatatcccggatgcgctgggctgcgtgttgaaagtattaaatgaggttgcggcggatcaggccctttcggagtcagtcagggaaaaggccgcttatgcggcagcaaacttattggtgagcgattatgtcaatgaatga

SEQ ID NO: 87328 - DNA, 261 bp, Enterobacter aerogenes
atgtcaatgaatgatacttatcaacccattaactgcgatgattatgacaacctcgagcttgcctgccagcatcacctggtgctggcgctggccctgaaagatggtgaacagctgcaggccaaagcaaacgatcttatctcgcgtaaaaatgtcgagtatctggtggtagaacttggcggtaacgtccgtgagctacgtctggataaaatcgccagtttcagccatcctgaaatcggcaccgtggtggtcagcgaatcctga

SEQ ID NO: 87329 - DNA, 1302 bp, Enterobacter aerogenes
atgacgccggatattgcctcatcgcttcgaccacatcgtcagtttttgctggccttcagcggcggcctggactcaaccgtcctgctgcaccggctggtacgctggcgccagcgtgagccagcgattcagctgcgcgcgattcacattcaccacggcctgagcgccaacgctgaccagtgggttgagcattgcgaacagatttgcctgcagtggcaggtaccgttacaggtggtgcgcgtgacgctggcggatgaggggttggggattgaagcgcatgctcgccaggcgcgctatcaggctttccgtgaggcgctgctgccaggcgaggcgttattgacggcacaacatctcgacgaccaatgcgagaccttcctgctggcgcttaagcgcggtagcggcccgaccggcttgtcggcgatggccgccagtagcgagttcgctggcggaaaattgctacgtccgctgctcaatgagagccgtgaatccctgcatcaatgggcgctgactcatcaactgcggtggattgaagacgaaagtaatcaggacgatgcctacgatcgcaactttctgcgcctgcgagtactgccgctgctgagcgagcgctggccgcattttgcggatgctgtcgcccgcagtgccagcttatgtggcgaacaggaacagttgcttgatgaaatgctgtcggcggagcttgccgcgctggttgatgagcgtggttcgctggcgatagaaccgctgagcgcgatgagcgcgccgcgtcgtgcggcgctgttgcgccgctggctggcatcccaacaggcgccgatgccgtcgcgcgaaatgccggagcgcatctggcaggaagtggcgctggcgcgtgaagacgccgcgccttgtctgcggttaggcggttttgccgtccggcgctaccagcagcgcttgttttgggtaaagcatctggcaagcctgacggaacgggaaataccatggggtgatgcgactaaagcgctgacactaccggaaacgctgggagaactggcgttgcagcccggtgggccgctacgcgcgccacgcgcggatgaaccggtatcgatacgttttcgcgccagcggtaatctgcacatcgtcgggcgtccgggcgggcgtaagcttaagaaaatctggcaggaaatggcggtcgcgccctggcgtcgcgataccacgccactattgttttatggcgaaacgttgatcgcggcggccgatgggctgtttgtcaccagagaggggcaagtacaggaaggcgaggggttacagctggtatggcggaaaacgggcggctaa

SEQ ID NO: 87330 - DNA, 390 bp, Enterobacter aerogenes
atgctgggtttaaaacgggttcaccatattgccatcatcgcgacagactacgcgaagagcaaagcgttctattgcgacatcctcgggtttacgctgcaaagcgagttctaccgcgccgagcgtgattcgtggaagggcgacctggcgctgaacggcgagtacgttatcgagctgttttcgttcccgttccctcctgcgcgcccaagccgtccggaagcctgtggtctgcgccacctggcgtttagcgtcgacgatattgatgccgcggttgcgcatttgcaggcgcatggcgtcgcctgtgaagctatccgcattgatccgtttaccgataagcgtttcaccttcttcaacgatcccgacggcctgccgctggagatttaccaacagtaa

SEQ ID NO: 87331 - DNA, 2139 bp, Enterobacter aerogenes
gtgaatatcatcgccatcatggggccccacggcgtctaccataaagacgaaccgatcaaagagctggaagccgctctgcagaagcaaggattccagactatctggccgcaaaacagcgccgacctgctgcagtttatcgaacacaatccgcgaatctgcggcgtgatcttcgactgggacgagtacagcgttgatttatgcagcgatatcaatcgcctgaacgaatatctccccctgtatgcttttatcaatacgcactcgacgatggacgtcagcagccaggatctgcggatggcgttgtggttcttcgaatatgcgctggggctggcggaggatatcgctacccgcattcgccagtacaccaatgagtatctggacaatatcacgccgccatttaccaaagcgttgtttaattatgtgcaggaggggaaatataccttttgtacacccggacacatggcgggaaccgcctatcagaaaagcccggtcggctgcctgttttatgatttcttcggcggtaatacgctgaaagccgatgtttctatctctgttaccgaactggggtcgctgctggaccataccggcccgcatctggaagcggaagagtatatcgctcgcgcctttggcgccgagcagagctacatggtgaccaacggcacctcgacttcgaataaaattgtcggcatgtattcggcgcccgctggcagtacgttgctgatcgaccgtaactgccataaatcgctggcgcatctgttgatgatgaacgatatcgtgccgctgtggttaaaaccgacgcgtaacgcgctggggatcctcggcggcattccgaaacgggaatttacccgcgatagcgtccagcacaaagtagagacaacttgtggcgcgcagtggccggtgcatgcggtgatcaccaactccacctatgacgggctgttgtataacaccacctggattaaacagacccttgacgtgccgtcgatccacttcgattccgcctgggtgccttatacccacttccacccgatttatcaggggaaaagcggcatgagcggcgatcgcgtaccggggaaagtgatcttcgaaacccagtcgacgcataaaatgctggcggcgttgtcgcaggcttcgttgatccatattaaaggcagctacgatgaagataccttcaatgaagcctttatgatgcatacctctacctcgccgagctatccgatcgtcgcctcgatagaaaccgcagcggcgatgctgcgcggcaactccggaaaacgcctgattcagcgctctatcgaacgcgcgctacatttccgtaaggaggtgcagcgcttgcgtgaggaggccgacggctggttctttgatatctggcaaccggaggaggtcgacgaagcgcaatgctggccagtttccccaggagaagcgtggcacggattccaggatgccgatgccgaccatatgttcctcgacccggtcaaagtcaccattctcacgccgggtatggatgaacagggcaatatggcggaggaggggatcccggcggcgctggtggccaaattcctcgacgagcgcggcgtggtggtggagaaaaccgggccttacaatctgctgttcttgttcagtatcggtatcgataaaacccgggcgatgggcctgctgcgcggtctgaccgagtttaaacgcgcctacgatctcaacctgcgggtgaaaaatatgttgccggatctctatgccgaggatccggacttttaccgcaatatgcgcatccaggatctggcgcaggggatccaccgcctgatccgtcagcatcagctctcacagctgatgctgcgggcgttcgacgtgctgccggagatgaaaatgaccccgcatcaggcctggcagcggcagattaagggcgaagtcgaaaccatcgaactggagaatctggtggggcgtatttcggcaaacatgatcctgccgtatccgcctggcgtgccgctactgatgccgggggagatgatcaccgaagagagtcgcgcggtgctcgatttcctgttgatgctctgttcgatcggtcgccactatccaggttttgaaaccgacatccatggggccaaacgtgatgaagacggcgtctaccgtgtacgagtcttaaaaaataattag

SEQ ID NO: 87332 - DNA, 1785 bp, Enterobacter aerogenes
atggcaattcataaaaccgtcgccttaagcgccgtggcggcagggatcatgttaagtctgggggccgcacaggcggcgccgctgctcagcgccactgaaacaaccaccatgaccgccagcgaactggcggcaaaagaacaagcgctaaccgactttccgctgatggaagcggttaaatcctctattcgcaccctcgataatgccgtggtggagcagattgaacccggtagggcggcgaatccggagaacgttaagcgcgttgaaggcatgcttagcgagcaggattgggattatctgttcccgatgcgcgcgccggaatatacctacagcaatttcctgaaggcgatcggtaaattcccggcggtatgcggtacctataccgatggtcgcgatagcgatgctatctgccgtaaatcgctggcgacgatgtttgcccactttgctcaggaaaccggcggccacgaaagctggcgcgatattccggaatggcgccaggcgctggtctatctgcgcgaagtcggctggaccgaaggtcaaaagggcggctataacggcgaatgtaacccggatgtctggcaggggcagacctggccttgcggtaaagatgccgatggcgatttcctcagctattttggccgcggcgctaaacagctctcctataactacaactacggcccgttctcagaggcgatgtatggcgacgttcgcccgctgttggataaaccacagttggtggccgattcatggatgaacctcgccagcgccgtgttcttctttgtctatccgcagccgccgaaaccttccatgctgcacgttatcgacggtacctggcagcccaacgatcgcgataagagcaatggcctggtgccagggtttggcgtgagcatccagatcatcaacggcggcgtcgagtgcggcggcgcaacggaaaacgcccaatcgcttaaccgtattgcctattacaaagagttcgccaactacctcaaagtacctattgccgatgatgaagtgctgggctgtaagaacatgaagcagtttgatgaaggcggagccggcgcgctgccaatctactgggaacaggattggggatgggatccgaacaccgcggacggtaaaaccaatgcctgccagctggtgagctatcagacgccatacagcgcgtttaaagagggggattacagcaaatgcgtgcagcactacttcaacgtaaccgtcgttgatgatacgggtagcgatggcgcatctgataagacggatgatgttacgcctgctccgcaggtaaacgtcgcgccggtggcacgtattgccggcccggtcggcgcagtcgaagccggtagcctggtgtcgctgagcgcggaagcctctaccgatgccaacggcgataagctgagctatagctggatgtcgcaggatggtcagacgttgagcggcgcggataaagcggtgatcaattttagcgcaccagagagcgacaaagatgcccagtatgtcgttagcctgaccgttagcgatggcagtttatccagcacggccacctatactctgaatgtgaaggcgaaggcggcggcggatgacgcgaaggatgagccggcaggcgatagcggcgttatcaactatccagcgtggagcgccagccagagctggaaaccaggtgacatcgtcaataaccacggcgcgcttttccagtgtaaaccgctgccggaaggggcatggtgcaacgtggcgccaacctactacgaaccgggcgctggtctggcctgggatgatgcgtggaaagcgctgtaa

SEQ ID NO: 87333 - DNA, 960 bp, Enterobacter aerogenes
atgagtctgaatttcctagattttgaacagccgatcgcagagctggaagcgaaaatcgattccctgactgctgtaagccgtcaggatgagaaactggatattaacatcgatgaagaagtgcatcgtctgcgcgaaaaaagcgtagagctgacgcgcaaaatcttcgccgatcttggcgcatggcaggtagcccagctggcgcgtcatccacgtcgtccctataccctggattatgtccgccttgctttcgacgaatttgacgagctggcaggcgatcgcgcctatgctgacgataaagctatcgtcggcggtattgcgcgtcttgatggtcgcccggtgatgatcatcggtcatcagaaaggccgtgaaaccaaagagaagatccgtcgtaactttggtatgccggcgccggaaggctaccgcaaagcgctgcgcctgatggaaatggctgagcgtttcaaaatgccgatcattaccttcatcgacacccctggcgcctatccgggcgttggcgcggaagagcgcggccagtcggaagcgattgcccgcaacctgcgtgaaatgtcgcgtctgagcgtgccggttatctgcaccgtgattggcgaaggcggctccggcggcgcgctggcgatcggcgtaggtgataaagtcaacatgctgcagtacagcacctattcagttatctcgccggaaggctgtgcgtccattctgtggaaaagcgcggataaagcgccgctggccgcggaagcgatgggtatcatcgcgccacgcctcaaagagctgaagctgattgattccatcgttccagaaccgctgggcggcgctcatcgtaaccctgaagcgatggcggcgagcctgaaggcacagctgttggccgacctggctgacctggatactctcagcgaagaagagctgcgtaatcgccgctatcagcgtctgatgagctacggctacgcctga

SEQ ID NO: 87334 - DNA, 3483 bp, Enterobacter aerogenes
atgtctgaaccacgtttcgtacacctgcgggtgcacagcgactattccatgatcgatgggctggcgaaaaccgggccgctggtgaaaaaggcggccgctttgggcatgcctgcgctggcgatcaccgatttcaccaacctctgcggtctggttaagttctacggaacgggccatggcgccgggattaaaccaattgtcggcgctgacttccatgttcagtgcgatctgcttggcgatgaattcaccgagctgacggttttagcggccaacaataccggctatcagaacctgactctgctcatttctcgtgcctatcagcgcggctatggcgcgctggggccatggatcgatcgcgactggctggttgagcatcaggaagggctgattctgctgtccggcgggcgtaaaggcgacgttggcgtcagcttgatccgcggaaatatgccgctggtagagcagtgtctcgccttctatcaacaacattttccggatcgctactatctggagctgatccgtaccggtcgtcaggacgaagaaagctatcttcatgccgcggttcaactggcggaagagcatggtttgccggtagtggcgaccaacgatgtgcgcttcctggaaaccggcgacttcgacgctcatgaaatccgcgtcgccattcacgatggcttcaccctcgacgatccgaagcgtccgcgtaactactcgccgcagcaatatatgcgcagcgaggaggagatgtgcgagctatttgctgacatcccggaagcgctggaaaacaccgttgagatcgccaaacgctgcaacgtcaccgtgcgccttggcgaatacttcctgccgcagttcccgaccggcgacatgactaccgaagattttctggtgatgaagtcgaaagaggggctggaagagcgtctcgaattcctgttcccggatcccgaagagcgcgctaagcgtcgcccggaatatgaccaacgtctggatgtggaactgcaggttatcaaccagatggggttccctggctacttcctgatcgtcatggaatttatccagtggtccaaggataacggcgtgccggtagggccggggcgaggttccggcgccggctcgctggtagcctacgcgttgaaaatcaccgaccttgacccgctggagttcgacctgctgttcgaacgtttcctcaacccggaacgtgtttcgatgcccgacttcgacgtcgatttctgcatggagaaacgcgaccaggtgattgagcacgtggcggatatgtatggccgcgacgcggtatcgcagatcatcaccttcggtaccatggcggcgaaggcggttattcgcgacgtgggccgcgtgctgggccacccttacggctttgttgaccgaatctctaagctggtgccgccggatcctggcatgacgctggcgaaagcctttgaagcggaaccacagctgccggaaatctacgaagcggacgaagaagttaaagcgctgatcgatatggcgcgtaagcttgaaggcgtaacgcgtaacgccggtaagcacgcgggcggcgtggttatcgcgccgaccaaaatcaccgatttcgcgccgctgtactgcgatgagcaggggctgcacccggttacccagtttgataagaacgacgttgaatatgccgggctggtaaaattcgacttcctcggcctgcgtacgctgaccatcatcaactgggcgctggagatgatcaacaagcgccgggcgaagaacggcgaagggccgctggatatcgccgcgataccgctggatgacaagaaaagcttcgacatgctgcagcgctcggaaaccaccgcggtattccagcttgaatcgcgcggcatgaaagatctgattaagcgcctgcagcctgactgcttcgaagacatgatcgcactggtggccctgttccgtccgggcccgctgcagtcggggatggtagataactttatcgaccgtaagcacggccgtgaagagatttcctacccggacgtgcagtggcagcatgaatgtctgaaacctgtactggagccgacttacggcatcattctgtaccaggaacaggtcatgcagatagcccaggagctctctggttataccctcggcggcgcggatatgctgcgtcgtgcgatgggtaagaaaaagccggaagagatggccaagcagcgttctgtcttcgaagaaggtgcgaagaaaaatggcgttgacggcgaactggcgatgaaaatctttgacctggtggagaaattcgccggttatggatttaacaaatcccactccgccgcctatgcgctggtctcctaccagacgctgtggctgaaagcccactatccggccgagtttatggcggcggtgatgactgccgatatggacaacaccgagaaggtggtgggcctggtcgatgagtgctggcgcatggggctgaaaatcctgccgccggacattaactccggcctgtatcatttccacgtcaacgatgatggggaaatcgtgtatggtatcggcgccattaaaggcgtcggcgaaggcccgattgaagcaatcattgaagcgcgtaacaatggcggttacttccgcgagctgtttgacctgtgcgcccgtaccgatattaaaaaactcaatcgccgggtgctggaaaaactgattatgtccggggcgttcgaccgcctcggcccgcatcgcgcggcgctgatgaactcgctgaacgatgcgctgaaagccgccgatcagcacgccaaagccgaagccatcggtcaggcggatatgttcggcgtgctggcggaagagccggaacaaatcgagcaatcctacgccagctgccagccgtggccggagcaggtggtgctggatggtgaaagggaaacgctggggctgtatctgaccggccacccgattaaccaatatctaaaagagatcgaacgctacgttggcggcgtgagactcaaagacatgcacccaaccgatcgtggtaaagtgaccacggcggcggggctggttattgctgcgcgggtaatggtcaccaagcgcggcaatcgtatcggcatctgtacgctggatgaccgttccgggcgtctggaggtgatgttattcaccgacgcgctggataaataccagcagttgctggaaaaagaccgcatacttatcgtcagcggacaggtcagctttgatgacttcagcgggggccttaaaatgaccgcccgtgaagtcatggatattgacgaagcccgggaaaaatatgctcgcgggcttgctatctcgctgacggacaggcaaattgatgaccagcttttaaaccgactccgtcagtctctggaaccccaccgttcgggaaccattccagtacacctctattatcagagggcggatgcgcgcgcgcggttgcgttttggcgcaacatggcgcgtctctccgagcgatcgtttactcaacgatctgcgtggccttatcggctcggagcaggtggaactggagtttgactaa

SEQ ID NO: 87335 - DNA, 600 bp, Enterobacter aerogenes
atgatggagttcgtttatccacatacccatctggtcgccggtgtcgatgaggtaggccgcgggccgctggtcggcgcggtggtcactgccgcggtaatccttgatccgcgtaagcctatcgtaggcctcaacgactctaaaaaattaagcgaaaagcgccgcctggcgctgtttgatgaaatcaaagacaaagcgctgtgctggagcctggggcgcgccgagccgcatgaaatcgacgagctaaacatcctgcatgccacgatgctggcgatgcagcgcgccgtcgctggtctgagtattacccctgagttcgtgcttatcgacggcaaccgctgcccatcgcttccgatgccgtcgcaggcggtagtgaaaggcgatagccgggtggcggaaatcagcgcagcgtctattctggctaaagtcactcgcgacgccgaaatggctacgctggatattgcatttccgcaatacggttttgcccagcacaaaggctatcctaccgttgtacatctgcaaaaactgcaggaacacggcgcaacagagcaccaccggcgtagtttcggcccggtgaaacgcgcgctgggcctggcgtccaactaa

SEQ ID NO: 87336 - DNA, 1149 bp, Enterobacter aerogenes
atggccgaacagcgtcccctgacgattgccctggtcgccggagaaacctccggcgatattcttggcgccggtctcatccgcgccctcaaagctcgcgtcccggatgcgcgctttgtcggcgtggcggggccgctgatgcaggcggaaggatgcgaagcctggtacgaaatggaagagctggccgtgatgggcattgttgaagtgcttggtcgactgcgccgcttactgcatattcgcgccgatttaacgcgccgcttcggtgaactgcgtcccgatgtcttcgttggcatcgacgcccctgatttcaatattaccctcgaaggtaacctgaaaaagcagggcatcaaaaccattcattacgtcagcccgtccgtttgggcatggcgacaaaaacgcgttttcaaaattggcagatccaccgatctggtcctggcattcctgcctttcgaaaaagcgttttacgatagatttaacgttccctgccgtttcatcggccacaccatggcggatgccatgccgctggatcctgataagggcgcagcgcgtgaccgtctgggcatcccgcatgacgttcactgcctggcgttgctgcccggtagccgcggcgcggaggtcgaaatgctcagcgccgacttcctgaaaaccgcgcagcttctgcgtaatgcttatcccgacctgcaggttgtggtgccgctggtcaatgccaaacggcgggaacagtttgagcgaatcaaagctgagacggcgccggatatgacggtacatatgctggatggtcaggcgcgcgatgcgatgatcgccagtgatgccgcgctgctggcctcggggacggcggcgctggagtgcatgctggcgaaatgcccgatggtcgttggctaccgcatgaagccgtttaccttctggctggcgaagcggttggtgaaaaccgattatgtttccttgccaaatctgctggccgggcgcgagctggtgaaagagctgctgcaggatgaatgcgagccgcaggcgctggccgccgctctgaaaccgctgctggccgacggcaaaaccagccacgatatgcatgatactttccgcgcgctgcatcagcagatccgctgcaacgcggacgagcaggcggcggacgcagtactggagttagcaaaatga

SEQ ID NO: 87337 - DNA, 789 bp, Enterobacter aerogenes
gtgattgataaaaccgcctttattcatcctaccgccattgtagaagaaggcgccgtcattggcgctaacgtccacattggtccgttttgtattgtgggcgccaacgtcgaaattggcgagggcaccgtactgaagtctcatgtcgttgtgaatggccacactaaaattggccgcgacaatgagatctaccagttcgcttcgatcggtgaagttaaccaggatctgaaatatgctggcgagccgactcgagtggaaattggcgatcgcaaccgcattcgcgaaagcgtcaccattcatcgcggcacagtacagggcggtggattaacgaaggtgggcagcgataacctgctgatgatcaacgcccacgtggcgcacgattgtacgcttggcgaccgctgcatcctggccaacaacgcgacgctggccggtcacgtgtctctggatgatttcgtcatcatcggcggcatgactgcagtacatcagttctgcatcatcggcgcgcacgttatggtaggcggctgctccggcgtcgctcaggacgttccgccgttcgtgattgcccagggcaaccatgccacgccgtttggcgtcaacatcgaaggtctgaaacgccgcggctttagccgtgaagcgattaccgcgattcgtaacgcctataaactgctgtaccgcagtggcaaaacgctggacgaagccaagccggaaatcgccgaactggcggctcagcatcctgaagttcagccatttgtcgatttctttgcccgttcaactcgcggcttgattcgttaa

SEQ ID NO: 87338 - DNA, 456 bp, Enterobacter aerogenes
ttgactactgacactcatactctgcacattgaagagattctggaacttctgcctcaccgttacccgttcctgctggtagaccgcgtgctggattttgaagaaggtcgttttctgcgcgcagtaaaaaatgtttccgtaaacgagccgtttttccaggggcatttccctggtaagccgattttacctggcgtgctgattctggaagcgatggcgcaggccaccggcattctggctttcaaaagcgttggaaaacttgagccgggcgaactgtactacttcgcgggtatcgatgaagcgcgtttcaaacgtccggtagtgccaggcgaccagatgattatggaagtcactttcgagaaaacccgccgcggcctgacccgtttcaaaggcgttgcgctggttgacggtaaagtggtttgcgaagcgacgatgatgtgtgcgcgtagccgggaggcctga

SEQ ID NO: 87339 - DNA, 1026 bp, Enterobacter aerogenes
atgccttcaattcgactggctgacttagcacagcagttggatgcagaattacacggtgatggcgatatcgtcatcaccggcgttgcgtccatgcagagcgctaaagcaggccaaattactttcatggtaaatcctaaataccgtgaacacctggccgcttgccaggcctccgccgttgtcatgacgccggacgatttaccgtttgcccatagcgccgcgctggtagtgcgtaatccctacctgacctacgcgcgcatggctcaaattttagataccacgccgcagccggcgcaagacatcgccgcaagcgcggcgatcgacccaacggcgaagctgggtaacaacgtctccgtcggcgcgaatgccgttatcgaatccggcgtggtgctgggcgataacgtggttatcggcgctggctgtttcgttggtaaaaatagcaaaatcggcgccggctcgcgtttatgggccaacgttaccatttaccacgagattgagatcggtgaaaattgcctgatccagtccagtacggtgatcggcgcggacggtttcggttacgctaacgatcgcggtaactgggtgaagatcccgcagcttggtcgcgttattattggcgatcgtgtggagatcggcgcctgtaccaccatcgatcgcggcgcgctggacgataccgtgatcggcaatggcgttatcattgataaccagtgccagatagcgcacaacgtagtgattggcgacaataccgccgtcgctggcggcgtgattatggccggcagcctgaaaattgggcgttactgcatgattggcggcgccagcgtgattaacggccatatggaaatctgcgataaagtcaccgtaaccgggatggggatggttatgcgtcctatctctgaacctggcgtctattcctcaggtattccgctgcagccgaacaaggcgtggcgtaaaactgcggcgctggtgatgaatattgacgagatgagcaagcgcctgaaagcggttgagcgcaaggttaatcaacaagactaa

SEQ ID NO: 87340 - DNA, 486 bp, Enterobacter aerogenes
gtgaaaaagtggttattagctgcaggtctgggtttagcaatggtaacttccgctcaggcggcagataaaattgctctggttaacatgaataacctgttccagcaggttgctcagaaaactggcgtttccaaaacgctggagaacgagttcaaaggccgtgctagcgaactgcagcgtatggaaggcgatctgcagtctaaaatgcagcgtctgcagtccatgaaaccgggcgcagatcgtaccaaactggaaaaagacgtgatgtctcagcgtcagaccttctctcagaaagcacaggcttttgagcaggatcgcgcacgtcgttccaatgaagaacgtggcaaactggttacccgtatccagactgccgttcagagcgtagcgaaagatcagagcatcgatctggttgttgactctaatgccgtggcatacaacagcagcgatgttaaagacatcaccgctgatgtactgaaacaggttaaataa

SEQ ID NO: 87341 - DNA, 2421 bp, Enterobacter aerogenes
atggcgatgaaaaagttgctcatagcgtcgctgctgtttagcagcgcgactgtatacggtgctgaagggttcgtggtgaaggacattcatttcgaaggcttgcagcgtgtcgctgttggtgcggccctcctcagcatgccagtgcgtcctggcgatacggtgaccgatgatgatatcagtaacaccattcgcgctctgtttgccactggcaactttgaggacgtccgcgtcctgcgcgatggtgataccctgctggtgcaggtgaaagagcgcccaacaattgcgagcattaccttctccggcaacaagtcggtgaaggatgacatgctcaagcaaaaccttgaggcatccggcgttcgcgttggggaatctctcgatcgcaccaagcttgccgatatcgaaaaagggctggaagatttctactacagcgtcggtaaatatagcgccagcgttaaagctgtcgtgacgccgctgccgcgtaaccgcgtcgacctgaaactggttttccaggaaggcgtctcggcgaaaatccagcagattaacattgtcggtaaccacgctttcaccactgacgaactgatttctcacttccaactgcgcgatgaagtgccgtggtggaacgttgtcggcgatcgtaaataccagaaacagaaactggcgggcgaccttgaaaccctgcgcagttactatctggatcgcggctacgcgcgtttcaacatcgattcgacgcaggttagcctgacgccggacaagaaaggcatctatatcaccgtaaacatcaccgaaggcgagcagtacaagctctccggcgtgcagattacgggcgatctggcgggccattccgcggaaatcgaatcgctgaccaaaattgagccgggcgagctgtataacggcaccaaagtgaccaaaatggagaatgatattaagaaactcctcggtcgctatggttacgcctatccgcgcgtccagtcgcagccggaaatcaacgacacggataaaaccgtgaagctgcatatcaacgttgatgccggtaaccgttactacgtgcgtaaaattcgcttcgaaggtaacgacacctccaaagattccgtcctgcgccgcgaaatgcgccagatggaaggagcgtggctgggcagtgacctggtcgatcagggtaaagaccgtcttaaccgtttaggttatttcgaaaccgtcgataccgatacccagcgcgtgccgggtagcccggatcaggtcgatgtcgtttacaaggtgaaagagcgtaacaccggtagcctgaacttcggtatcggttacggtaccgaaagcggcgtcagcttccaggcaggcgttcagcaggataactggttaggcaccggctactctgttggcattaacgggaccaagaacgactaccagacctatgctgaactgtcggtcaccaacccgtatttcaccgtagatggcgtgagcctcggcggccgcatcttctataacgacttcgatgcgaacgacgcggatctgtctgactataccaacaaaagctatggtacagacgtcaccctcggcttcccgatcaacgaatacaactcgctgcgcgcaggtttaggttacgttcataactccctgtccaatatgcagccgcaggtggcgatgtggcgttacctgaattcgatggggcagtacccggataccactaacgataataactcgtttagcgccgacgacttcaccttcaactatggttggacgtacaaccgcctcgatcgcggctacttcccgactgaaggttcgcgtgtcaacctgaacggtaaagtcactattccgggctctgataacgaatactacaaagtgacgctggatactgcgacctatgtaccgatcgatgacgatcatcagtgggtcgtgcttggtcgtacgcgcttcggttacggtgatggactcggcggtaaagagatgccgttctatgagaacttctatgccggtggttcaagtaccgttcgcggcttccagtcgaatacgattggtccgaaagcggtttatctcccttcaactaccagtcgtgatgactatgatacggaatgtgcgagcactgaaagcgcgccttgtaaatcggacgatgcggtgggcggtaacgccatggcggtcgccagccttgagctgattaccccaacgccgtttatcagcgataaatacgctaactcggtgcgtacttccgtgtttatggatatggggaccgtctgggatactaactgggattccacgaagtacggtggctaccctgattacagcgatccaagcaacattcgtatgtctgcgggtatcgcggtacagtggatgtcgccgttggggccgttggtcttctcctacgcccaaccgtttaaaaagtacgatggagacaaagccgagcagttccagtttaacattggtaaaacctggtaa

SEQ ID NO: 87342 - DNA, 1353 bp, Enterobacter aerogenes
atgctgagcgttctctggaatttggccgcttttattattgcgcttggcgtactgatcaccgtgcacgagttcggccatttctgggtggctcgtcgctgcggcgtgcgcgttgaacgtttttccattggttttggtaaagcgctgtggcgccgcgtagataagcagggtactgaatttgttatcgcgctgatcccgcttggcggctatgtgaagatgctcgacgaacgcgtcgagccggtggcgccggaaatgcgtcattacgctttcaataataaaaccgtcggtcagcgtgcggccatcattgccgcaggccctatcgccaacttcatttttgccatctttgcatactggctggtgtttatcatcggcgtccccggcgttcgtccggttattgatgaaatatcgcccaattccatcgctgcgcaagcacaaattgcaaaaggaatggaacttaaagcgatagatggcatcgaaacgcctgattgggatgcagttcgtatggcgttagtcgcgaagatcggcgaccaacaaacaatacttaccgtcgcccctttcgggacgaaccaacgtcaggataaaatcctcgatctgcgtcactgggcgtttgagccggataaacaagatccggtggcctcgctgggcatcaagccgcgtagcgcgcagattgataccgccctggctgaggtacaacctcagtcggccgcgcagaaagcaggtttgcaagcgggagacaggatcgttaaagtcgatggtcaaccgttaacgcagtggatgacgtttgttaatctggtgcgtgataatccgggcaaggcgctggctctggaggtcgacagacaaggtacgccgctgtcgttgactttgactccggatacgaagtcggtgaaaggcaaggctgaagggtttgcaggggtagtaccaaaggttatcccgctgcctgatgaatacaagacagtgcgtcagtacgggccgtttgccgccatcgccgaagccacggataaaacctggcaactgatgtcgttaacggtcaggatgctgggcaaattgataaccggtgatgtcaaactgaacaacctcagtgggccgatttctatcgctcagggggctggaatgtcagcggaatttgggttgatttactatctgatgttccttgcgctgataagcgtgaaccttggaataatcaacttgttcccgttacccgtcctcgacggggggcatctgctgtttttggcgattgaaaagctgaagggcgggccggtatccgagcgagttcaagactttagttatcgcattggctcaatactgctggtgctgttaatggggcttgcacttttcaatgatttctctcggttgtaa

SEQ ID NO: 87343 - DNA, 858 bp, Enterobacter aerogenes
ttgctgaagtatcgcctgatttccgctttcgttttaattcccgtcgtaattgcggcgctttttctattgccgcccgcgggttttgctatcgtcaccctggtcgtttgtatgctcgccgcgtgggagtgggggcaattaagcggtttcacctcaacgacgcagcgcgtgtggctggcggtgctttgcggcctgctgctggcgctaatgctctttatgttgcctgaataccactatgacgctcatcaaccgatggttgagggatcgttatgggcttcgtttggctggtggattgtcgccttggtgctggtgctctcttatccggcctcggcggcgttgtggcgccattcaaaagcgctgcgtctgatcttcggcgtgctgactattgtcccgtttttctggggcatgctggcgctgcgggcctggcattatgccgataaccactatagcggcgcggtgtggctgctgtacgtcatgattctggtgtggggggcggattccggcgcctacatgttcggtaaaatgttcggtaagcataagctggcgccaaaggtttccccggggaaaacctggcagggtttcttcggtggcctgctgacggccgcggttatctcctgggcgtacggcatgtgggctcatctggatgtcaccccaaccgtgttgctgatttgctcggtggtggcggcgctggcttcagtgctgggcgatttgacggaaagtatgtttaagcgtgaagccggcatcaaggatagcgggcatctgatccctggacatggcggtattttagatcgcattgatagcctgacggctgcggtgccggtgttcgcttgtctgctgttgttagtcttcaggacgatttga

SEQ ID NO: 87344 - DNA, 762 bp, Enterobacter aerogenes
atgttgtctgctaatcaaactgtcagcaaaatgtcgcctgcgcatggttgtcgccatgtcgccattatcatggacggcaacggtcgttgggcgaaacaacaaggtaaaattcgcgcctttggccataaagctggagcgaaatctgttcgtcgcgcggtctccttcgcggcgaataatggtattgaagcattaacgctttacgcattcagtagtgaaaactggaaccgtccggcgcaggaagtgagcgcgctgatggaactgtttgtctgggccctggatagcgaagtaaaaagcctgcatcgccacaatgtccgcctgcggattatcggcgagacgacgcgctttaatgcccggctgcaggagcgtatccgtaaggcggaagcgctaacggcaaacaataccggactaacgctgaatatcgccgctaattacggcggccgctgggatatcgtccagggcgcgcgtcaactagccgaacaggtacaaaacgggttgctaaaacctgaagagatcacggaagacatgttgagccagcaggtatgcatgcatgaactggctcccgttgatttagttattaggaccgggggagagcaccgaataagtaactttttgatttggcaaattgcctatgccgaactttactttacggatgttctttggcccgattttgctgaacaggactttgaaggtgcactccatgcattcgttagtcgagagcgtcgttttggcggcacagaagagccgggtggcagtcatgcctga

SEQ ID NO: 87345 - DNA, 1185 bp, Enterobacter aerogenes
atgaagcaattaaccgttctcggttcgaccggttcaatcggctgcagcacgctggacgtggtgcgccataatcccgaaagcttttccgtcgccgcgctggtcgcggggaaaaatgtcgaccgtatggttgaacaatgtctggaattttctccccgcttcgcggtgatggatgatgcgcaaagcgctgagcgtttgcgtacgctgctgcgtgagcagggctgccgcacggaagtgctgagcggtaagcaggcggcggccgacgtcgcggcgctggatgaagtcgatcaggtgatggcggccatcgttggcgcggccggtctggcgccgacgctggcggccattcgcgccggcaaaacggtgttgttagcgaataaagagtcgctggtgacctgcggccgcctgtttatggacgcggttcagcagtatggcgctcgcctgttgccggttgatagcgaacataacgcgatttttcagagtttgccggaaacaattcaaaaccatctgggatacgctgacctgacgcagaacggcgtctcgtcgattctgctgaccggttccggtggacctttccgggaaacggcgatttctgagctggcggcaatgacgccggatcaggcttgccgccatccgaactggtcaatgggacgcaaaatttccgttgattccgccacgatgatgaataaagggctggagtacatcgaagcccgctggctgtttaatgcctctgctcagcagatggaagtcattattcatccgcaatcggtgattcactccatggttcgctatcaggacggcagcgtgctggcgcaattaggcgagccggatatgcgcacgccgatcgcccataccatgggttggccgcagcgcctgaactccggcgttaaaccgttggacttctgtcaattgagcaacctgagtttctcagcgccggattacgatcgctatccgtgcctgaagctggcaatggacgcttttgatgtcggccaggccgcgacgacggcgttgaatgccgctaacgaagtttcggtggcggcgtttctgaatagtgaaatccgctttaccgatattgcggcggttaaccaggcggtgctggatagtatggcgctcaatgaaccgcaaagtattgatgaagtggttgcgattgatgccgaagcgcgcgtcgccgcacagcgacaactccgataa

SEQ ID NO: 87346 - DNA, 558 bp, Enterobacter aerogenes
gtgattagcgatatcagaaaagatgctgaagtacgcatggaaaaatgcgttgaagcattcaaaaaccaaatcagcaaaattcgcacgggtcgtgcttctccaagcctgctggatggcatcattgtagaatactacggcacgccgactccgctgcgtcagctggcaagcgttacggtagaagattcccgtacgctgaaaatcaacgtcttcgaccgctctatgagcccggccgttgaaaaagcgattatggcgtctgacctgggtctgaacccaagctctgcgggtagcgatatccgcgttccgctgccgccgctgacagaagaacgtcgtaaagatctgaccaagatcgtgcgtggcgaagctgaacaggcgcgtgtcgccgtgcgtaacgttcgccgtgacgcgaacgacaaagttaaagctctgctcaaagagaaagagatcagcgaagatgacgatcgccgctctcaggacgacgtgcagaaaatgactgacgccgccattaagaaagttgatgcggcgctggcagagaaagaagcggaactgatgcagttctga

SEQ ID NO: 87347 - DNA, 726 bp, Enterobacter aerogenes
atggctaccaatgcaaaacccgtctacaaacgtattctgctgaagttaagtggcgaagctctgcagggttcagaaggcttcggtattgatgcaagcatacttgaccgtatggctcaggaaatcaaagaactggttgaactgggtattcaggttggcgtagtgattggtggcggtaacctgttccgtggtgctggtctggcgaaagcgggtatgaaccgcgttgtgggcgaccacatgggcatgctggcaacggtcatgaacggcctggcaatgcgtgatgcgctccatcgcgcctatgtgaacgctcgcctgatgtccgcaatcccgctgaacggcgtgtgtgacaactacagctgggcggaagcgattagcctgctgcgtaacaatcgcgtggtgatcctctccgcaggtaccggcaatccattctttactaccgactccgcagcctgcctgcgcggtattgaaatcgaagccgacgtggtactgaaagcgaccaaggttgacggcgtgtttaccgctgacccggcgaaagatccttccgccaccatgtacgatcagctgacctacagcgaagtactggataaagagctgaaagtgatggatcttgccgccttcaccctggcgcgcgaccacaaactgccgattcgcgtatttaacatgaacaagcctggcgcgctgcgtcgtgtggtgatgggcgaaaaagaaggcacattgattacggaataa

SEQ ID NO: 87348 - DNA, 852 bp, Enterobacter aerogenes
atggctgaaattaccgcttccctggtaaaagagctgcgcgaacgtactggcgcaggcatgatggattgcaaaaaagcactgactgaagctaatggcgacatcgagctggcaatcgaaaacatgcgtaaatccggcgcgatcaaagcggcgaaaaaagcaggcaacgttgctgctgacggcgtgatcaaaaccaaaatcgacggcaactacggttacattctggaagttaactgccagactgacttcgttgctaaagatggtggtttccaggcatttgctgacaaagtactggacgccgctgttgctggtaaaatctccgacgttgaagttctgaaagcgcagttcgaagaagaacgtgttgccctggttgctaaaatcggtgagaacatcaacatccgtcgtatcgctatcctggaaggcgacgttctgggcagctaccagcacggtgcgcgcatcggcgttctggttgccgctaaaggcgctgacgaagagctggttaagcagctggcaatgcacgttgctgcaagcaagccggaattcgttaagccggaagacgtttctgctgaagtagtagaaaaagagtaccaggttcagctggacatcgcgatgcagtccggtaagccgaaagaaatcgcagagaaaatggttgaaggccgtatgaagaaattcaccggcgaagtttctctgactggtcagcctttcgttatggaaccgagcaaatctgttggtcagctgctgaaagagcacaacgccgacgttactggcttcatccgctttgaagtgggcgaaggcatcgagaaagttgagactgactttgcagcagaagttgctgcgatgtccaagcagtcttaa

SEQ ID NO: 87349 - DNA, 726 bp, Enterobacter aerogenes
atggcaactgtttccatgcgcgacatgctcaaggctggtgttcacttcggtcaccagacccgttactggaacccgaaaatgaagcctttcatcttcggcgcgcgtaacaaagttcacatcatcaaccttgagaaaactgtaccgatgttcaacgaagctctggctgagctgaacaaaatctctgcccgtaaaggcaagatcctgttcgttggtactaagcgcgctgcaagcgaagcggtaaaagaagctgctaacagctgcgaccagttcttcgtgaaccatcgctggctgggcggtatgctgactaactggaaaaccgttcgtcagtccatcaaacgtctgaaagacctggaaactcagtcccaggacggtactttcgagaagctgaccaagaaagaagcgctgatgcgcactcgtgagctggacaagctggaaaacagcctgggcggtatcaaagacatgggcggcctgccggacgcactgttcgttatcgacgctgaccacgagcacatcgctatcaaagaagcaaacaacctgggtatcccggtatttgctatcgttgataccaactctgatccggacggcgtagacttcgttatcccgggtaacgacgatgcaatccgcgcagttagcctgtacctgggcgctgttgcagctaccgttcgtgaaggtcgctctcaggacctggcttctcaggcggaagaaagcttcgtagaagctgaataa

SEQ ID NO: 87350 - DNA, 795 bp, Enterobacter aerogenes
atggctatctctatcaagacatctgaagacatcgaaaaaatgcgcgttgccggccgcctggccgccgaagtgctggaaatgatcgaaccctacgtcaaaccgggcgtcagcaccggcgagctggatcgcatctgcaacgactacattgttaatgaacagaaagcggtctccgcctgcctcggctatcacggcttcccgaaatcggtctgtatctctattaatgaagtggtgtgccacggcatcccggatgacggcaaactgctgaaagacggcgacatcgtcaatatcgacgtgaccgtgattaaagatgagttccacggcgatacctcaaaaatgttcatcgtcggtaaaccgactatcctcggcgagcgcctgtgccgcatcacccaggaaagcctctatctggcgctgaagatggttaaaccggggatcaacctgcgcgcgatcggcgcggcgatccagaaattcgttgaagcggaaggtttttccgtggtgcgcgagtactgcgggcacggtatcggccgcggcttccacgaagaaccgcaggtactgcactatgattcgccggaaaccgacgtggtgctcaagccgggtatgaccttcaccatcgaaccgatggtcaacgccggtaagaaagagatccgcagcatgaaggacggctggacggtgaaaaccaaagaccgtagcttgtctgcgcagtacgagcatactattgtggtaaccgataacggctgcgaaattctgacgctacgcaaggatgacaccatcccggcgataatctcgcacgacgaataa

SEQ ID NO: 87351 - DNA, 2664 bp, Enterobacter aerogenes
atgagcaactctttacctgacacagcctcccctcttctgcccatcccgccggaacatccggtaaactggccgcagggcgatctgaactgtgccgcaatcaaggcgcacatcgataccttccagcactggctcggagaggcatttgataacggcatcgccgcagagcagctcatcgcggcgcgcaccgagtttatcgaccagctgctgcagcggctgtgggtcgactatggttttgaatccgtctgcgacctggcgctagtggccgttggcggctatggccgcggcgagctgcacccgctctccgacgtcgacctgctgattctgagccgtaaaaagctgccggacgagcaggcgcaaaaggtcggcgagctcctgaccctgctgtgggacgttaagctcgaagtcggccacagcgtgcgtaccctcgaagagtgtttgctcgaagggctttcagatcttaccgtcgccaccaacttaattgaatcccgcctactcatcggcgacgtcgcgctgtttcttgaactgcaaaaacatatttttagcgacggcttctggccgtcggaaaagttcttcgccgccaaggttgaagagcagaatgttcgccaccagcgctaccatggcaccagttacaacctggagccggacgtcaaaagcagccccggcggcctgcgcgatatacataccctgcagtgggtggcccgccgccacttcggcgccacctcgcttgatgaaatggtcggcttcggcttcctcaccgaagccgagcgcaacgagcttaatgagtgcctgcaccagctctggcgcatccgttttgctttgcatcttgaagtgaatcgctacgataaccgcctgcttttcgatcgtcagctgaatgtcgcccaccgcctcggctatgaaggcgaaggtaatcagccgatcgaacacatgatgaaagatttcttccgcgtcacgcgtcgggtgagtgaactcaataacatgctactgcagctgtttgatgaggcgatcctcgcgctaaccgagaacgaaaaaccgcggcctattgatgatgatttccaactgcgcggcaccctgatagacctgcgtgacgacaccctgtttatgcgcgagccgcaggcaattctgcggatgttctttattatggtgcgcaacagcagcatcaccggcatttactccactactctgcgtcacctgcgccacgcgcgccgccacctgacgcaaccgctgtgctatatcccggaggcgcgaactctcttcctcagcatgctgcgccatcagggcgcggtgagtcgcggcctgctgccgatgcatcgccacagcgtgctgtgggcctatatgccgcagtggtcgcatattgtcggtcagatgcagttcgacctgtttcacgcctataccgtcgacgaacacaccatacgcgtcttgttaaagctggaaagcttcgcgaaagaagagacccgcagccgccatccgctgtgcgttgagctgtggccgcggctggcccatcctgaacttatcctcatcgccgccctgtttcacgatatcgctaaaggccgcggcggcgatcactcgattctcggtgccgaagacgtgctgaaattcgccgagctccacgggctcaattcgcgggagacgcagctggtcgcctggctggtacgccagcatctattgatgtcggtaaccgcccagcgccgcgacattcaggacccggaggtgattaaacagttcgccgaagaggtacagacggaaaatcgcctgcgctatctggtatgcctgaccgtcgccgatatctgcgccaccaacgaaacgctgtggaacagctggaagcaaagcctgctacgcgagctctatttcgccaccgaaaaacagctgcgtcgcggtatgcagagcacgccggatatgcgtgaacgggtacgccaccatcagctgcaggcgctggcgctgttgcgcatggacaatatcaatgaagaggcgctgcaccagatttggaaccgctgccgggcgaactactttgtgcggcatacgccgaaccagctcgcctggcacgcccgcaacctgctgaagcacgatctcagtaaaccgatgatcctgctgagttcgcgggccacccgcggcggcaccgagatcttcatctggagcccggaccgcccttacctgttcgccgccgtctgcggcgaactggatcggcgcaacctcagcgttcacgatgcgcagatcttcaccacccgcgacggcatggcgatggatacctttatcgtccttgaacccgacggcagcccgctttccgccgatcgccacgaggcgattcgccacggtcttgagcagacaataactcaacgcagttgggagccgccggccccgcgtcgccaggcggctaaactacgtcatttttccgtcgccactgaggtgaattttctgccgacccataccgaccggaaatcatttcttgagctcattgcgctcgatcagccagggctgctcgcccgcgtcggtcaggtgttcgccgacctcgggatttcgcttcacggagcccgaattacgacaattggcgagcgagtagaagatttatttataatcgccaccgccgaccggcgtgcccttaataatgagctgcaacaagaagtgcaacaacggttgacagaggccctcaatccaaacgataaagggtaa

SEQ ID NO: 87352 - DNA, 825 bp, Enterobacter aerogenes
atgcagcagttacagaacgttattgagtccgcctttgagcgtcgcgccgacatcacgccggcaaatgtggataccgtcacccgcgaagcggttaaccaggttattgccctgctggattccggtgcgctgcgcgtcgctgagaagatcgacggtcagtgggtgacgcatcaatggctgaagaaagcggtactgctctctttccgtattaacgataaccaggttatcgatggtgcggaaagccgctacttcgataaagttccaatgaaattcgccgactacgatgaagcacgcttccagaaagaaggcttccgcgtagtgccgccggcagccgtccgccagggcgcgttcatcgcgcgcaataccgtgctgatgccgtcctacgtcaacatcggcgcttatgttgatgaaggcaccatggttgatacctgggccaccgtcggctcttgcgcgcagatcggtaaaaacgttcacctgtccggtggcgtcggtatcggcggcgttctcgagccgctgcaggctaacccgaccatcatcgaagataactgcttcatcggcgcgcgctctgaaatcgttgaaggcgttatcgttgaagaaggcgcggtgatctccatgggcgtgtacatcggccagagcaccaaaatctacgatcgcgaaaccggcgaagtccattacggccgcgtgccggcgggctcggttgtcgtttccggcaacctgccgtcgaaagatggcaaatacagcctgtactgtgcggtgatcgtgaaaaaggttgacgcgaagacccgcggtaaggtcggtatcaacgaactgctgcgtaccatcgactaa

SEQ ID NO: 87353 - DNA, 387 bp, Enterobacter aerogenes
atgtacgataatctgaaaagtcttggcattaccaatcctgatgaaatcgatcgctatagcctgcgccaggaagctaacaacgacatcctgaagatctatttccagaaagataaaggcgaattcttcgctaaaagcgtgaagtttaaatacccacgccagcgtaaaaccgtggtcgccgacggcgtcggtcagggctacaaagaagtgcaggagattagtccgaacctgcgttatgtcatcgacgaactggatcagctctgccagcgcgatcgtactgaaatcgacctcaagcgtaagatccttgacgatttacgccatctggaaagcgtcgtcaccaataagatcagtgaaattgaagccgatctggaaaaactgacgcgcaaataa

SEQ ID NO: 87354 - DNA, 2988 bp, Enterobacter aerogenes
atgacacaggaaattgaacaaaaatgttacaccctacaatccgccacctggctggataaggcgggttttgagaaaggacgaaaacacgatcgtcaggcgctgggctttattctgcccgccaacacggtgctgaaaattcggcaaacggacctcagtaacggcatctcgaccctgcgcctgatgtgtgatgatagcgctctggagaaaaccagcgctctgaccacctcctggacaacgattagcaccaccgtcgattctgtgccgtttgtcgatacgttgtttaccgacagcccctgcgagttctccgtgatttaccaacaacccgcggcgacgaaaccgctccccagctggaaatcaagacagtctgaagagacgtttttcctggattgggagaataataaatcgtctttcgcgctggtggatctggatgttatcaatctgctgttgccctacgccgaccgcgacaacgcgatgaaagcgggattagcgtcgttacaccgtttttataaccaccttttcaccagctataacgattgggccggactaagcgaaaatcccgattcgcaatggaatcagaacgttgccaaccgctactttttgcgggcggataaacatggcgtcggttcggcttattataataccaactggtgcgcgcagaccgccgccacggttggcgaaggctggctggataacgtcgccacgcagtgggttatcctgcatgaaatcggccacggctatcagggtaaatttatgcaggatcccacgctttccgtcagcgaagtgtggaacaatatttacgcttccttctatcaacagctcacgctgagtcaggataatcatctatataccgatggctggctatacaactacggtaagctggccgcgcaggaagcacagttggttaactatattaccgacaagacgccggtcaccagttggagcctgcgttcgcgcctgcaattcctgatgctgatgttattcaaagccggtatcgcatccttccgcacctttaatcagaactatcgccaacttgccaatagcgagagcttccagccgtcggatcatcagcttgccgatatgctggcaaccgccatcgctacctccgcgggatatgatgtgacgccgtttatcgagctctgcggtttaacgctgaaaaacgccacccgggaaaatatcgtctcgctggcgacaaaaccgctctatccgctgtatcgttttctaccgcaaagcgaatgggatagcgcgcgccaacagttagggctggattccttcttctggctggtggataacagcgaactggcaatattaggcaaaacgggggcgctgaccctgacgctgaatatcgatcgcccggagcaaatttacggtcagacgctggctatcaaggataattgcggcaaccattattcactggtgattaatagtgacgtcctgaccctgaaggacatgccaatcggcgtgtatcaggtcgaactgcctaaaggccgctcgcaaaaatatcgcccggatatcagctatatcaccgtaaaagaaggcgccaatacggtcaccgtcaactacgttcagcaaaacgataccagcgaacgtaacgtgacgatctcctttttaggttatagcgatgcgccttttgcccacctggatgttgattacgaaaaccagcagcttattctcaatgtgaccagcgccaacccgcacagctactaccccgggacattgtatgccgcagtcagtgtactctccgccaacggtgaaaaagtgtttgagcgtaagatgaccggcaccaactgcgcgacgggtaaagtgattattccattcagccctcactatcacttatatatcacccacatggagccgggacggctgaaaacctcaccgggatatttaacgctggttgcgcgtgagaaataccaactgatgcgcattgatgataatggactgtataactttattctcggcaatagtccggcggatgacttagaggcgattttcgagcataacgctcaggctatccgtactcagccctcgctggtagcgcaggaagagtgcgtctgtaaaaacgatctttggctgatgctcccccatattgaagaaccccggcgcagtgaactgcttaaagcgtatgccgatgtcctgcctcaggataataacgatccgggcgagctaacgggcaaaagcgtgacgctcgatctccgcggccagggcaataacgagttttgccagatcgttatcgataataaacaacgcgcaatgacggtcgcgacacgggccggcacaccgcactcgtattacaccacccatacctatgccagcattacggttactgccgaggacgatacggttgtttatcaacgcagctacgccggtgctaccaacaatctggcaaacagcgaaacgattaccctcgcggaagggatgatcatcgagattttccatgatgaaccataccgctccagcgccactaatggcacgacccaaaacgccgtcacgctgaaacagcataaccgctggcgcgtagtgaaaacgggcctcgaagtctatgcgctcgcgcctgatgaaccggatgaggaagccactgatacagaagaggaaactcaggagaccaccgcactgtatggcgatcgcttcagttggcaactgcttggcgatgatgatgtttgctttgccgggatggagatggatattggcagcggcgcgttgacctttagcgccaatgcggtggtaccgaataagcactttacgaccacttacgccacggtcaatgtctacaatacgcgtggttcggtggtgtatcgccagtcgattaaaggatcgtcgcagcttggcgactatgttgataccgccatcctggatgagggctataccattgaagtcttccatgccgaagcgggaaatcgttccgttattattaatccactcaatggcaatagctggcaacaacccaataccgccacctggcaagtgaccccccgcgggctgcagcgcctgtaa

SEQ ID NO: 87355 - DNA, 1158 bp, Enterobacter aerogenes
atggctggctggcatcttgataccaaaatggcgcaggatatcgtggcgcgaacgatgcgcatcattgataccaatattaacgtaatggatgcccgcgggcgcattattggcagcggcgatcgtgagcgtattggtgaattgcacgaaggcgcgctgctggtgttgtcgcaggggcgggtggttgatatcgatgatgcggtcgctcgccatctgcacggcgtgcgtcaggggattaacctgccgctgcgtcttgaaggggaaatcgtcggcgttatcggattaaccggcgagcccgaatcactgcgtaagtatggtgagctggtgtgtatgaccgcggagatgatgctcgaacagtcgcggctgatgcatctgctggcgcaggacagccgcctgcgtgaagaactggtcatgaacctgattcaggcggaagaaaataccccggcgctcaacgaatgggcgcagagactgggcatcgacctcaatcaaccacgggtggtggcgatgattgaagttgatagcggccagcttggcgtcgatagcgcgatggcggaactacagcagttgcagacagcgttgaccacgccggatcgcaacaacctggtggcgattgtctcgttgaccgagatggtggtattgaaacccgcgttaaatgcctttggccgctgggacgccgacgaccactgcaagcgcgttgagcaactgattgcccgtatgaaagagaacggccagctacagttccgcgttgcgttaggtaatttctttactggtccgggcagtatcgcacgctcttatcggaccgcgcgtacgacgatgatggtagggaagcagcggatgccggaaagccgcagctacttttatcaggatctgatgctgccggtgctgctggatagcctgcgcggcggctggcaggccaatgagctggcgcgcccgctgacgcggctgaaggcgatggataacaacggcctgttgcgccgcaccttgcaggcatggtttcgtcataacgtgcagccgttggccacctcaaaggcgctgtttattcatcgtaataccctggagtatcggctcaatcggatttcggaactaaccggattggacctgggaagttttgacgaccgtctgctacggtacattgcattgcagctggatgagcaacgctga

SEQ ID NO: 87356 - DNA, 1434 bp, Enterobacter aerogenes
atgaaaaaaaccacgttagcaatgagtgctctggctctgagtttaggtctggcgttgtccccgctctctgcgagcgcggctgaaacggcttcctcggcgaccactgcgcagcagatgccgagcctggcgccgatgctggaaaaagtgatgccgtctgtggtgagcatcaacgttgagggcagcacgactgttaacacgccgcggatgccgcgtaacttccagcaattcttcggtgacaactcgccgttctgccaggatggttcgccattccagagctctccattctgtcagggcggcggccagggcgcccctggcgataacgcgcagcagcagaaatttatggcgctcggttccggggtaattattgatgcggccaaaggctacgtggtgaccaataaccacgtggtcgataatgccaccacgattaaagttcagctgagcgatggccgtaagttcgatgcgaaagtcgtcggtaaagatccgcgctccgacatcgcgctgattcaaattcaggatccgaaaaacctgacggcgattaagcttgccgactctgacgcgctgcgcgtcggcgactacaccgtggcgatcggtaacccgttcggcctcggcgaaaccgtgacttccggtatcgtctccgcattgggccgcagtggcctgaacgtggaaaactatgaaaactttatccagaccgatgcggctattaaccgcggtaactccggcggcgcgctggtgaatctcaacggtgaactgatcggtatcaacaccgcgatccttgctccggacggcggcaacatcggtatcggctttgctattccgagcaacatggtgaaaaacctgaccgagcagatggtcaagtttggccaggtgaaacgcggcgaactggggatcatgggtaccgagctgaactccgagctggcgaaggcaatgaaagttgatgcccagcgcggcgcgtttgtaagccaggtgatgccgggctctgcggcggcgaaagcgggtattaaagctggcgacgtgattaccaccctgaacggcaagccgatcagcagtttcgcggcgctgcgtgcgcaggtcggtacgatgcctatcggcagcaaagtcgagcttggcctgctgcgcgacggcaagccggtcaacgttaccgttgaactgcagcagagcaatcagaaccaggttgactccagcagcatctttaacggcattcaaggcgcggaaatgagcaacaagggccaggacaaaggtgtggtggtgagcaacgtgaaagcgggcacgccggcggcgcagattggtctgaagaaaggcgatatcattgtcggcgctaaccagcagccggtgaaaaacatcgctgacctgcgcaaaatcttcgatgcaaaaccgtccgtactggcgctgaatattcagcgtggtgatacctctatctacctgctgatgcaataa

SEQ ID NO: 87357 - DNA, 1515 bp, Enterobacter aerogenes
atggcaaatattgattttcgcaacaagattcactggcgtcggcgctaccgttcgccgcagggtgtagagacggaacgcgagatcctgcgggtatttgaaagcgatcgcgggcgcattatcaattcaccggccatccgccgcctgcagcaaaaaacccaggtctttccacttgagcgtaacgcggcggtccgcacccggctcacccattcgctcgaagtccagcaggtcgggcgctacatcgccaaagaggtgctaagccgcctgaaagagcaaaagctgctggaatgctacggtctggatgaactgagcggcccgtttgaaagcgtggtggagatggcctgcctgatgcacgatatcggcaatccgccatttggccattttggcgaggcggcaattaacgattggttcagcaaacggctggcgccgaaagatgccgccagccagccgttaagccaggatcgctgccaggttgacgcgctgcgtctgcacgatggcgaaggggtgctcaacgaactacggcgtaaggtgcgtcaggatttgtgctgctttgaaggcaatgctcagggcatccgtctggtgcacacgctgatgcgtatgaacctgacctggacccaggtcggctgcattctgaaatatacgcggccggcgtggtggcggggagagacgcttgccagccatagctacttaatgaaaaaacctggttattatttagccgaagaagagtatatcgcgcgtctgcgtaaagaattggatctggcgccttacaatcgttttccattaacgtggattatggaagctgccgatgatatctcatattgcgttgctgacctcgaagatgcggtagaaaaacgaatattcagcgcggagcaattgtatcagcatctctatgatgcgtggggcactcatgaaaaaggatcattgttcgcgcaagttgtagaaaacgcgtgggagaaatcgcgcgcaaattcactgagccgtagcactgaagatcagttctttatgtatttacgggttaatacgttgaataaactggtgccttatgcggcgcatcggtttatcgaaaacttaccggctatttttagcggcgattttaatcatgcgctgttagaggacgacagcgattgtagtcagctacttgaactttataaaaacgtcgccataaaacaggtgtttagtcatcctgatgttgaacagctggaattgcagggctaccgggttatcagcggactgctggatatctacgagccgttactgaaattatcgctggaggagttcagccaattggtggaacaagatcgggtacgcagtttgcctattgcttcgaggttgttccagaaactttcgacccgacatcggttggcttatgtggaggcggtaaataagctttcgcgcgataccgaagaatatcccgtgctggagtattattaccgctgtcgattgattcaggactatatcagcggaatgacggatttgtatgcgtgggatgaatatcgccgtctgatggcggtggaataa

SEQ ID NO: 87358 - DNA, 699 bp, Enterobacter aerogenes
atgaaaattggcattattggcgccatggaagaagaagttacccttctgcgcgacaaaatcgagaaccgccagactatctctatcggcggtagcgaaatctataccggccaacttcacggtaccgaggttgctctgctgaaatccggcattggtaaagtagcagctgccatgggcgccaccctgttgctggagcgctgcaagccggatgtgattatcaataccggttccgcgggcggtctggcgccgacgctgaaagtcggcgacatcgtggtctctgacgaagcgcgctaccacgatgccgacgtcaccgcgtttggctacgaatacggccaactgcctggctgtccggcgggtttcaaagctgatgacaaactgattgccgccgcggaaacctgcattaaggcgctgaatctcaacgccgttcgtgggctgatcgtcagcggcgacgcattcatcaacggctcggtagggctggcgaaaatccgccacaacttcccgcaggccgttgccgtagaaatggaagcgaccgccatcgcccacgtctgccataacttcagcattccctttgtggtggtgcgcgcaatctctgatgtcgctgaccagcagtcgcatcttagcttcgacgagttcctcgccgtcgccgccaagcagtccaccctgatggtggaaaacctggtgcagaacctggcgcgtggctaa

SEQ ID NO: 87359 - DNA, 801 bp, Enterobacter aerogenes
gtggctaagtcgctacagaaggcgttaaccgccctgctgttactcgccccggcgtggcttttcgccgcgccgcgggtggtgacgctctccccggccaacaccgaattggcctttgctgccggcattacgccggtcggcgtcagcagttattccgactaccctcccgccgcggcgaaaatcgaacaagtcgccagttggcagggaatgaaccttgaacgtattgtcgctctgaagcccgatctggtgctggcgtggcgcggcggcaatgccgaacgccaggtgaatcagctcagttcgctgggaatcaaggttatctgggttgaaaccggttcgattgagcaaatcatcagcgctctgcggatgctggcgccgtggagcccgcagccggaaaaagcccggcaggccgcacaggcgatgcaagacgattaccaggcgctaaaagcccgctatgccaacgcgccgaaaaaacgcgtatttctgcagtttggcgccgacccgctgttcaccagcaacagcgcctcgatccagaatcaagtattgagcctgtgcggtggggaaaatatttttgccgccagccgcgttccctggccgcaggtcagccgcgaacaggtgctgtcacggcatccgcaggcgatcgtcatcaccggcgacgccagtaaaattcccgccgtggaccgctattggcaaaatcagctcacaatttcgctcatcgccttacatagcgactggtttgaacgcgcgggcccacgtattatccttgccgcaaaacaactctgtactgcgcttgagcaggtaaaataa

SEQ ID NO: 87360 - DNA, 627 bp, Enterobacter aerogenes
atgcttgtctattggctggatattattggcacagccgtatttgctatctccggcgtattgctggcaggaaaattacgcatggaccctttcggggtgctggtattaggcgtggttaccgccgtgggcggcggaaccatccgcgatatggcgctggccaatggcccggtgttctgggttaaggatcctaccgatctggtggtagcgatggtcaccagtatgttaacgattctactggtccgccagccgcggcgcatgccgaaatgggtactgccggtgctggatgccgtcggcctggcggtgtttgtgggcatcggcgtgaataaagcctttattgcccataccggcccgctggtagcgatctgcatgggcgtggtcaccggcgtcggcggcgggattatccgcgacgtactggcgcgagaagttccgatgattctgcgcactgaaatctacgccaccgcctgcattgtcggcggtatcgtgcacgcgacggcgcactatacctttcagctgtcgctggaaaactcggcgatgttaggcatggtggtgacgctggggatacgtctggctgcgattcgctggcacctgaagctaccaacctttgcgttggatgataacggacgttcataa

SEQ ID NO: 87361 - DNA, 345 bp, Enterobacter aerogenes
atgagtgatgacgtagcgttgccgctggagttcaccgaagccgcagcgaacaaagtaaaacatctgattgcggatgaagataatccgaacctgaaactgcgcgtgtacatcaccggcggcggttgcagcggtttccagtatggcttcacctttgacgatcagatcaacgaaggcgatatgaccatcgagaaacagggcgtcggcctggtagttgacccgatgagcctgcagtatctggttggcggcgccgtcgactataccgaaggcctggaaggttcacgtttcatcgtgactaacccgaacgcgaaaagcacctgcggctgcggttcctcgttcagcgtttaa

SEQ ID NO: 87362 - DNA, 1461 bp, Enterobacter aerogenes
atgcctctcttctcatttgtattaccaataaatgataatggcatgaaagcagaaactccctcttttgaagcacatcagtttgttcgcgtgcgccgtagtgatgcggtccgccgtttgattcaacgcgacaaaacgccgttggcggtattgttgatggcggcggtggtcggcacgctggccgggctggtgggcgtggcgtttgaaaagagcgtgaactgggtgcagaaccagcgaattggcgccctggtgcaggtggcggaccactggtacctcgtctggccgctggccttcattctgtcggggctgctggcgatggttggctattttctggtgcgccgctttgcgccggaggccggcggttccgggatcccggaaatcgaaggcgcgctggaagagttgcgcccggtacgctggtggcgcgtgctaccggtaaaattcatcggtggtatggggacgctgggcgccgggatggtgctggggcgcgaagggccgatggtgcagcttggcggcaatatcgggcgcatggtggtggatgtgtttcgtctgcgcagcccggaaacgcggcacacgctgttggccaccggcgcggcatcaggcctctccgcggccttcaacgcgccgctggcgggcatcctgtttatcatcgaagagatgcgcccgcagttccgctacaatctgatttcgattaaagccgtatttaccggcgtgatcatgtcgagcatcgtgtttcgtatttttaacggcgaaggggcgattatcgaagtcggcaagttgagcaatgcgccggtgaataccctgtggctgtatctggtgctgggcatgatctttggctgtttcgggccattgtttaatgctctggtgctgcggacgcaggatatgttccagcgcttccacggcggcaatatcaaaaaatgggtgttgattggcgggcttatcggcggcctttgcggcctgctgggcctgatgcagccaacggcggtaggcggcggctttaatctgatccccatcgccgctgccggtaacttctcggttgggctgctgctgttcatctttattgctcgcgtcattaccacgttgctgtgcttctcttccggcgcgccgggggggattttcgccccgatgctggcgctcggcacgctgctgggaacggcattcggcatggctgccatcccgctgtttccctcctataatctggatgctggtaccttcgctatcgccgggatgggggcgttgctggcggcttcggtacgcgcgccgctcaccggaattgtactggtgctggagatgaccgataactatcagctcattttgccaatgattattacctgccttggggcaacactattggcgcagttcctcggaggtaagcctttgtattcgaccattctgcagcgtaccctggcgaaacagaaggccgaagaggcggcgaaagcgcagcaggtaccccgggagaatacttga

SEQ ID NO: 87363 - DNA, 1281 bp, Enterobacter aerogenes
atgagcaaatctgaaaatctgtataacgccgcccgcgaacttatccccggcggcgtcaactcgccggtccgcgcctttactggcgtcggcggcaccccgctgtttattgaacgtgcggatggcgcctacctgtacgatgtcgatggtaaagcttatatcgattatgtcggttcctggggcccaatggtgctgggtcacaaccatccggccattcgtaacgcggtgattgaagcggcagagcgcgggttaagcttcggcgcgccaaccgaaatggaagtcaaaatggcggaactggttactgaactggtgccgaccatggatatggtgcgcatggtaaactccggcaccgaagccaccatgagcgccattcgcctggcacgcggcttcaccggccgcgacaaaatcatcaagttcgaaggatgctaccacggtcacgccgactgcctgctggtgaaagccggctccggcgcactgactctcggccagccgaactcgccgggcgtaccggcggatttcgcgaagcataccctgacctgcacctataacgatcttgcctcggtacgcgcggcgtttgagcagtatccgcaggatatcgcctgtatcatcgtcgaaccggtggccggtaatatgaactgcattccgccgcagccggagttcctgccgggcctgcgcgcactgtgcgacgagtttggcgcgttgctgattattgacgaagtgatgaccggcttccgcgtcgcgctggcgggcgcccagtcttattacggcgtggagccggatctgacctgtctgggtaaaatcatcggcggcggtatgccggtgggcgctttcggcggtcgccgcgaggtcatggacgcgctggcgccgaccggtccggtataccaggccggtacgctgtcaggcaaccctatcgccatggccgcaggcttcgcctgcttaagcgaagtggcgcagccgggcgtgcatgaaaccctgaccgagctgaccaatcaactggcggatggcctgctgaacgcggcgcgcgaaaccgggatcccgctggtggtgaataatgtcggcggcatgttcggcatcttctttaccgaagccgaaaccgtcacctgctatcaggatgtggtgaagtgcgatgttgaacgtttcaagcgtttcttccacctgatgctggaagaaggggtttacctcgccccgtcagcgtttgaagccggctttatgtccgtcgcccatagcgaagcggatatcaacaacactatcgatgccgcgcgtcgggtgtttgccaaactgtaa

SEQ ID NO: 87364 - DNA, 1983 bp, Enterobacter aerogenes
atgaacgcgcgtttctcgccgttagctatgatcctgctggccgtactgctggttgccgctttcgcgctgagcatcgtcaaccttcaggtggctttaccttacgcgcagtggcatcaggcgctgtggcagccggatagcgataatatcgcccagatgctgttccattacagcctgctgccgaggctggctgtatcgctgctggtcggcgcgggactggggctcgttggcgtactgttccagcaggtactgcgtaacccgctggcggagccgaccacgctcggcgtcgccaccggcgcgcagctcggaatgacggtgacgacgctatgggcgatccccggtgtgctggcgtcgcagtttgccgcgctggctggcgcttgcctggtcggcgcgctggtgttcggcgtttcgtggggcaaacgtctatcgccggtgacgctgattctggccggtctggtggtgagtctctattgcggcgcggtcaatcagctgatggtgattttccatcacgaccagctgcaaagcatgttcctgtggagtaccggtacgctgacgcagaccgactggagcgtggcgcagcgcctgtggccgcagctgcttggcggcgcgatgttgacgctgctgttgttacgcccgttaacgttgatggggctggatgatggcgtggcgcggaatctcgggctggcgctctctctggcgcgccttggcgtcttgaccctggcgatagtaataagcgcgctgctggtcaacgcggtcggtattatcggctttataggtctgttcgcgccgctactggcgaaaatgctcggcgcccgccgcctgctatcgcggctggtgctggcggcgcttcttggcgcgctgatcctgtggctttccgaccaaattattctctggctcagccggatatggcgagaagtgtctaccgggtcagtcaccgcgctgattggcgcgcctttattactgtggctgctgccgcggctgcgtagcatcagcgcgccggtgatgaatggcggcgataaagcgctgattgagcgccgcaacgtgcagtggttcgcgctgggcggactggcgctgatgttgttggcggtaaccgccgcgctgacctttggccgtgatgcgcaggggtggcaatgggccagcggcgatctgctggagcaattgatgccctggcgctggccgcgggtattctcggcgctgtttgccggggtgatgctggccgttgcgggttgtattattcaacgcctgaccggtaacccgatggccagcccggaagtgctgggtatcagctctggcgcggcgttcggcgtggtgttgatgctgttcttcgtgccgggcaacgcttttgtctggctgctgccagccggcagtcttggcgcggcggcgacgctgctggtcatcctggtcgccgccgggcgcggcggattctcgccgcaccggatgctgctggcggggatggcgctaagtaccgccttcaccatgctattgatgatgctacaggccagcggcgatccgcgaatggcgcagatcctgacgtggatgtccggttcgacctatagcgcgacgcctgagatggtgctgcgtagcggcgtggtaatgctggcgctattggcgctggcgccgctctgccgccgctggctgaccatcctgccgctcggcggcgaggcggcgcgagcggtaggaatggcattgacgccatcgcgtattgggttgctgctgctggcggcgagcctgacggcaacggcgacgctaaccattgggccgttaagttttgttggcctgatggcgccgcacattgcgaggatgatgggctttcgccggacgatgccgcatatggtcatttccgggctgattggcgggatgctgctggtgttcgccgactggtgcgggcgaatgataatgttcccctaccaaatcccggcaggtctattgtcgacgtttatcggcgcaccgtattttatctatttgctgagaaagcagagccgctaa

SEQ ID NO: 87365 - DNA, 891 bp, Enterobacter aerogenes
atggaaaattcgaacttcttctcacgtcgacgcctgttgacggcaatggcgctgtcgccgctgctgtggcagatgcgcggcgcgcaggcggcaaacgttgatccgcagcgcgtcgtcgcgctggagtggctgccggccgaactgctgctggcgctcggcgttacgccctacggcgtggcagacattcccaactataacctgtgggtgaatgagccggcgttgcccgcctcggtgattgatgtcggcctgcgcactgaacccaatcttgaattactgacgcagatgaaaccgtcgtttatcgtctggtcggcaggctatggcccgtcgccggaaaagctggcgcgcattgcgcccggtcgcggtttcaccttcagcgacggcaaacggccgctggcgatggcccagcgttcgctgctggaaatggccgatctgttgggtaagcaacagcaggcgaagcgccatctggcggagttcgacgcgttgatggaaagcctgcgtccacgatttaccgaccgtgacgatcgcccgctgctgatgatttcgctacttgatgcccgccatgtactggtattcggtgagaactgcctgttccaggaagtgctcgatcgctttggcatcaaaaacgcctggcacggcgaagcggcattctggggcagtatcaccgtaggcatcgatcggctggcggaatttaaagaagccgatgtcatctgtttcgatcatggtaacgatcgggagatggcccaactgatggcgaccccgttgtggcaggcgatgcctttcgtgcgtgcggggcgtttccagcgtcttccggcggtgtggttctatggcgcgacgctgtcggcgatgcatttcgctcgcgtactggccgatgcgcaggggagggcagtatga

SEQ ID NO: 87366 - DNA, 798 bp, Enterobacter aerogenes
atgcaggaacagactccgcactctgaaacgacgtttgcgttaaatcgcgtgacctttcgcgtgcctggccgcacgcttcttcatcccctttcgttgaccttcccggcaggaaaagtcactggcctgattggccataacggttctggcaaatccacgttactgaaaatgcttggccgccatcagccgccttccgagggcgatgtgctgcttgacggccagccgctggacagctggagcagcaaggcgtttgcccgcaaagtggcctatctgccgcagcagctgccggcggcggaagggatgacggtgcgcgaactggtggcgattggccgctatccgtggcatggcgcgctggggcgcttcggcgcggcggatcgcgaaaaagtagaagaggctattgcgctggtggggctgaaaccgctggcgcatcggctggtggacagcctttccggcggcgaacgccagcgcgcgtggatcgccatgctggtggcgcaggatagccgctgtttgctgctcgatgaaccgacgtcggcgctggatatcgcccatcaggtcgatgtgctggcgctggtgcatcgtctcagccagcagcgtggcctgacggtgatcgcggtcctgcatgatattaatatggccgcccgctattgcgattatctggtcgcgctgcgcggcggcgaaatgatcgcccaggggacgcccgcggagctgatgcgcagcgaaacgctggagcaaatctacggcatcccgatggggatcctgccgcacccggcgggcgcagcgccggtaagttttgtctattga

SEQ ID NO: 87367 - DNA, 2205 bp, Enterobacter aerogenes
atggcgcgtcttaaaactgctcagccaaatcactcgctgcgtaaaatcgcagtcgtagtagccacggcggttagcggcatgtctgtttatgcacaggctgcggaacaaccgaaagaagaaaccctcgtcgttaccgcggcgcccgccagccaggaaagcgcctgggggccggccccgactatcgcggcgaagcgttccgccacggcgaccaaaaccgatactcccattgaaaaaacgccgcagtctatctccgtggtgacccgcgaagagatggacatgaagcagccggcaacggttaaagaggcgctctcttacacgccgagcgttttctccactcgcggtagctcgaccacctatgatgtggtcaccattcgtggattcaccacctcgagcacggtgaacaccaaccagtatctggatggcatgaagctgcagggtaacaactactctgaagtctcgatggacccgtatttcctggaacgcgtggaagtgatgcgcgggccaacctcggtgctgtacggcaacagcaacccgggcggtatcgttagcatggtcagcaagcgtccgaccaccgagccgctgaaagaagtccagtttaagatgggcaccgataacctgtggcaaaccggttttgacttcagcgacgccattgatgatgacggcgtgtggtcataccgcctgaccggattaggccgcagccaggatgcgcagcagcagatggcgaaatcgacccgttacgccatcgctccgtccttcagctggcgtccggatgataaaaccgatttcaccttcctgagcaacttccagaatgacccggatgcgggttactacggctggctgccgcgcgaaggcaccgtggtgccgtattacgatgccaacggtaaggcccacaagctgccgaccgatttcaacgaaggcgagtccgataacaagatggcgcgccgtcagcagatggttggctatagtttctcccaccagttcgatgacacctttaccgtgcgtcaaaacctgcgctatgccgatgtgcatacgctgtatcgttcggtctatggctatggttatcaggagcctggtaaaatccagcgcaactatgttcgttccgatgagcacctgaatacctttaccgttgatacgcaactgcagtctgatttcgccaccggcgcggtgaaccacacgctgctgaccggcgtggactactcgaggatgcgtaatgacgttgacgcggactacggtacggccgatgccattagcatgagtaatccgcagtacggcaatccaaatattgagctgaactccaaatatgctgtgcttaaccgtatggagcagacgggcctgtacgcgcaggatcagatggagtgggataagtgggtgatgaccttaggaggccgttacgattacgcgactacgtctaccttcacccgttccaccagcaacatggcggagaatcacgaccagcagttcagctggcgcggcggtatcaactatctgttcgataacggcatctccccgtacttcagctatagcgaatcgttcgaaccggtatctggctcaggcctcaacggtaaaccattcgatccctcacgcggcaagcagtatgaagccggcgtgaaatacgtgccgaaagatatgccggtggtggtgaccgcggcggtctatcagctgaccaaagataaaaaccttacagcggatcccaacgacaccagcggttttttcagcgtgcaaaccggcgaaatccgctcccgcggctttgagctggaggcgaaagcggcggtcaatgccaatatcaacctgactgcggcttacagctataccgatgccgaatacactcacgacaccgtcttcgaaggcaagcgtccggcggaagtgccgcgtaacatggcgtcactgtgggcggattataccttccacgaaaccgcgcttagcgggttgacgattggcgcgggcgcgcgttatatcggctcaacggtgagttattacaagaatgttgaagggaagaaaaatgattccttcaatgtggccggttatgcgctgatggatgcgacagtgaaatacgatctggcgcgctttggtctgccggggtcttcggtcggcgtcaacgtcaacaacctgtttgaccgcgaatatgtctccagttgctatagcgagtacgcatgctactggggaacggaacgtcaggttgttgctaccgcaaccttccgcttctaa

SEQ ID NO: 87368 - DNA, 2553 bp, Enterobacter aerogenes
atggcgggagatgaccgcgagcctatcggacgtaaagggagaccttcacgcccggcaaaacaaaaagtcacccgtcgccgggtccgggaagaggactacgacgatgattacgatgacgattatgaggatgaacgaccaatgccgaagaaaggaaagggcaaaggcaataagcctcgtcgtaagcgcagctggctgtggctgctggttaagttggggattgtctttgcggtaattattgccgcctatggcgtctacctcgaccagaaaattcgcagccgtattgacggtaaagtctgggaactgccggcggcagtgtatggccggatggtcaaccttgagccggatatgcagatcagcaaaaacgagatggtgcgcctgcttaatgcgacccagtaccgtcaggtcagcgcaatgacgcgtcctggcgaatacaccgtacaggctaacagcatcgagatgatccgccgtccgttcgatttcccggatagcaaagaggggcaggtgcgcgcgcgtctgaccttcgatggcgatcatctggataccatcgagaatatggataacaaccgtcagttcggtttcttccgtctcgacccgcgcctgatcaccatgctgcagtcggcgaacggcgagcagcgcctgttcgtgaagcgcagcggtttcccggatctgctggtggatacgctgctggcgaccgaagaccgccacttctatgagcatgacggcatcagcctgtactcaatgggccgcgcggtgctggcgaacctgacggcggggcgtacggtgcagggggcgagtaccctgacccagcagctggtgaagaacctgttcctgtccagcgagcgctcctactggcgtaaggccaacgaagcctatatggcgctgattgttgacgcccgttacagcaaggatcgtatccttgagctgtatatgaacgaggtgtacctcggtcagagcggcgataatgaaatccgcggcttcccgctggcgagcctgtactactttggccgcccggtagaagagctgagcctcgatcagcaggcgctgctggtcgggatggtcaaaggggcgtcaatctataatccgtggcgtaacccgaaactggcgctggagcggcgtaacctggtgctgcgtctgctgcagcagcagaatattatcgaccaggagctgtacgatatgctgagcgcgcgtccgctgggcgtgcagccgcgcggcggagtgatttcaccgcagccggcgttcatgcagatggtgcgccaggaactgcaggcgaaactgggcgataaagtgaaagatctctccggcgtgaagatctttaccacctttgacccggtggctcaggatgcggcggaaaaagcggccatcgaaggtatcccggtgctgaagaaacagcgtaagttgccggatctggaaaccgccatggtggtggtcgatcgcttcaccggcgaagtccgggcgatggtcggcggcgcggagccgcagtttgccggctacaaccgtgcgatgcaggcgcgtcgttcgattggttcgttggcaaaaccggccacttatctgaccgcgctgagccagccgaaccagtatcgcctgaatacgtggattgccgatgcgccggtgacgattcgcttgtcgaacggccagacctggtcgccgcagaacgacgatcgccgctttagcggtcaggtgatgctggtggatgccctgacccgttcgatgaacgtgccgacggttaacctcgggatgtcgctggggctgccggcgatcaccgatacctggcagaagctgggcgtgccgaaagaccagttgaatgcggtaccggcgatgatcctcggcgcccttaacctgacgccaatcgaagtggcgcaggcattccagaccatcgccagcggcggtaaccgcgcgacgctatcggcgctgcgttccgtgattgctgaagatggtacggtgctgtaccagagctacccgcaggcggaacgcgccgttccggcgcaggcggcctatatgaccctgtggaccatgcagcaggtggtgcagcgcggtaccggccgtcagcttggcgccaaatatcctggcctgcatctggcgggtaaaaccgggaccaccaacaacaacgtggatacctggtttgccggtatcgatggcagccaggtgacgattacctgggttggccgcgataacaaccagccgaccaagctgtacggggccagcggcgcgatgtcgatttatcagcgctacctggctaatcagaccccgacgccgctggcgctgacgccgccggaagatgtggtggacatgggcgtggatagcaatggttacttccagtgcagcggcggtatgcgtacactgccggtgtggaccacctcgccggatgcgctgtgccgtcagggcgaagccctgcagcaacagcagcagcaacaacaggaagccaataacccgttcaaccagaccgggcagcagcagcctgctaaccaaccgcagcagcaacagcagcaacctgcgaagcaagagaagagcgatggcgttgccggttggattaaagatatgtttggcggtaactaa

SEQ ID NO: 87369 - DNA, 2430 bp, Enterobacter aerogenes
gtgtcctcattgccggttgccgcaattcttcccgaacttctttccgccctgcagcaggcgccgcaggtgttgcttaatgcgcctaccggcgcgggtaaatcaacctggctgccgttacagatcctcgccgacggcaacattgatggccggattatactgctggagccgcggcggctggcggcacgtaacgtcgctcagcgtctggcggagctactgggagaaaaaccgggagaaacgataggctaccggatgcgcgctgaaagctgcgtagggccaaatacccgcctggaagtggttactgaagggatcttaacccgtactttgcagcacgatccggaactttccggcgtggggctagtgatcctcgatgaatttcatgaacgtagcctgcaggcggatttggcgctggcgttgttgctggacgtccagcaggggctgcgtgacgatctcaagttgctgatcatgtcggcgacgttggataacgatcgtctgcagcgtctgttgccggaggcgccggtggtggtttccgaagggcgcgcgttcccggttgaacgtcgctttgcgccgctggcgagccatcagcgttttgccgaagcggtagcgatagccgccgcggatctgctgcgtgaggagcagggctcgatgctgttattcctgcccggcgttggcgaaattcagcgcgtacaggaacaattgagcgagcgtgtagccagcgatgtgctgttatgcccgttatacggcgcgctgccgctgagcgaacagcgcaaagcgattctcccggcgcctgccgggatgcgcaaagtggtgctggcgactaatatcgctgaaaccagtttgacgatcgaaggcattcgcctggtggtcgacagcgctcaggaacgggtcgcgcgtttcgatccgcgcaccggcctgacccggctaatcacccagcggataagccaggcgtcaatgacccagcgcgctggtcgcgccgggcgtctggagccggggatctgcctgcatctgctggcgaaagagcaggcggagcgcgcggcggcgcagagcgatccggaaattctgcaaagcgatctgtcggggctgctgctggagttgctgcagtggggctgccgcgatccggccgagcttcgctggctggatctaccgccggcgataaatctggcggcggcgcggcgtctgttgacggcgttatcggcgctggagggcgaacgcctttcggctcacgggcgcaaaatggcgacgctgggtaacgacccgcgtctggcggccatgctgacggcggccgattccgcggatgacgcggcgacggcggcgaaactcgccgctattcttgaggagccgccgcgcggcggcaatagtgacttaggcgccgcgtttgcgcgccagcagggcaactggcagcagcggacgcagcagttattgaagcggctggccagtctcggcggtcagccagacgctgcgcggatggcggcgttgctggccccagcctttgccgaccggattgcccgtcgacgcggccaggaagggcgctatcagttggctaacggcatgggggcgatgctggatgccgatgacgcgctcggtcgtcacgaatggctaattgcgccgctgctactacagggcagttcggcgcccgatgcgcgaattttgctggcgctgccgctggatattgaccaactggtggcgcagcgtcctgagctgatacagcgctccgataccgtggagtgggatgaagcgcaggggacgctaaaagcctggcggcgtagctgcattggccagctggtgataaaaactcagccgttggcgaaaccgtcggaagcggagctgcaccaggcgatgctcaacggtattcgcgataaggggctcggggtattgaactggacgccggaggctgaacaactgcgcctgcggctgcactgcgccgcgcagtggctgccggaagcggactggcccgccgttgatgacgcatcgctgttagcttcgctggaggcgtggctgttgccgcagatgaccggggtgcattcgcttcgggcgctcaaggcggtagacctgcggcaggcgctgcaaaactggctgccgtggacgttacgccagaagctggatagcgagctgccgacccattacacggtgccgaccggcagccgtatcgctattcgctatcatgaagataacccgccggcgctggcggtacggatgcaggagatgttcggcgaggcggcgacgccgcgcattgccgaagggcgggttcccctggtgctggagttactctcgccggcgcagcgaccattacaaattacccgggatttaagcgccttctggcagggggcataccgcgaggtgcaaaaagagatgaaagggcgctatccgaaacatgtctggccggatgacccggcgaacaccgcccccacccggcggacgaaaaaatactcctga

SEQ ID NO: 87370 - DNA, 537 bp, Enterobacter aerogenes
atgtccgagccgaaacggctgtttttcgctcttgaactgccgaaagcgatacagaaacagattattcactggcgcgccgcccattttgccgacgatgccggaaggccggtcgccgccgataacctgcatctgacgctggcgtttctcggcgacgtcagcgctgaaaaacagcgcgcgctgtcggcgatggccggacgcattcagcaaccgccctttaccctgacgctcgacgacgccggccagtggctgcgttcgcgcgtagtctggctcggtacccgccagccgccgcgcggcatgctgcaactggcaaatatgctgcgtgcccaggcggcgcggagcggctgctatcaaagcccgcagccgtttcatccgcatatcaccctcctgcgcgacgcccgccacgcggtgccgatcccgccgccgggtttttgctggcaggtgccggtcaacgaattcgtgctttatgagtccagctttatccgcgggcgcacccgctacaacgcgctggaacgttatccatttaccagggaactctga

SEQ ID NO: 87371 - DNA, 717 bp, Enterobacter aerogenes
atgctgttcactccgcctttgcagtccgccactttaattaaacgttacaaacggtttctggccgatgtcatcacgccggagggccaggcgctgacgctgcactgcccgaataccggcgccatgaccggctgcgccgcgccgggagataccgtctggtattccacttccgataatcctaaacgtaaatatgcgcatacctgggaattaactgaaacccggcagggggccgtcatatgcgttaacaccttgcgggcaaataccctggcgaaggaagcggtactcgccggaaatatccctgagcttgccgggtataacattctgaaaagcgaagtaaaatatggtgaagaaaatagccgaatcgaccttatgttacaggcagaagaccgccgtaactgctatattgaagtgaaatcggttacgttggcggaaaaagagtacggttattttcccgatgccgttaccgcacgcggtcagaagcacctgcgggaactcatgagcgtcgctgccgcgggccatcgggccgtgattttattcgccgtgctgcattcggcgatagaccgtttctcacccgcgcatcatattgatgccaaatacgcacagctgttgatagaggcgcaggaaaagggggtagaaattctcgcctggaaagcggaactttctaccaaaatgatgactctgaataagccgatcgccgtggcgttaacccccggtaattaa

SEQ ID NO: 87372 - DNA, 456 bp, Enterobacter aerogenes
atgcaagaagggcaaaaccgtaaaacatcgtccctgagtattctcgccatcgctggggtggagccgtaccaagagaagccgggcgaagagtatatgaacgaagcccagctggcgcacttcaagcgcattcttgaagcatggcgtaatcaactcagggatgaagtggatcgcaccgtaacgcatatgcaggatgaagctgctaacttcccggacccggtcgaccgtgccgcgcaggaagaagagttcagcctggagctgcgtaaccgcgaccgcgaacgtaaactcatcaagaagattgagaaaacactgaaaaaagtcgaagacgaagacttcggcttctgcgaatcctgtggcgtggagattggcattcgccgtctggaagcgcgtccaacagctgacctgtgcatcgattgcaagacgctggcggaaattcgcgaaaaacagatggcgggttaa

SEQ ID NO: 87373 - DNA, 882 bp, Enterobacter aerogenes
atgaccgattcagactatatagggcgctttgctccctcaccttccggcgaactccacttcggctcattaatcgccgccctcggcagctatctacaggcgcgggcgaaaggcggtatctggcgcgtacgcattgaagatatcgacccgccgcgggaagttcccggcgccgccgacaccattttgcgacagctcgatcgctacggtctgcactgggacggcgaggtactgtggcagtcccagcggcacgatgcctatcgcgagcgcctcgcctggctgcgcgatcgggatctctgctactactgcacctgcacccgcgcgcgcattcacagcgtcggcgggatctacgacggtcactgtcgcgatttgcgccttggcgccgaaaacgccgcgctgcgcctgcgccagacccgtccggtactggaattttatgaccagttgcgcgggaccctcgtcgccgacgaaccgctggcgcgggaagatttcatcatccatcgtcgcgatgggctgttcgcctataacctggcggtagtggttgacgaccattttcagggggtcagcgaaatcgtccgcggcgccgatctcatcgagccaacggtacgacaaatttcgctgtatcaacactttggctggcctgtaccagattacgtacatctgccgctggcgctgaatgccgaaggtaataagctctcaaaacagaaccacgccccggccctgccggagggcgatccgcgcccggaaattgtgcgggcattaacatttttgaatcaggatgtcgttgaggattggcaagccctgagtattgacgatttactcaaacaagcgatagccaactggcagccagcaaaaatccagcattctcaaatggctcccgctgagctatga

SEQ ID NO: 87374 - DNA, 1365 bp, Enterobacter aerogenes
gtgctaagccgtgaagagcgcgaggcagaggctgccgccgtcgaacaaacgcatatgacggtgatcccgcgtgaacagcatgcaatttcccgcaaagatatcagtgaaaacgcgctcaaggtgctctatcgactgaacaaggcgggctacgaagcttacctggtcggcggcggcgttcgcgacctgctgctgggcaagaaaccaaaagattttgacgtcaccaccagcgcgaccccggaccaggtacgtaaactgttccgcaactgccgcctggtgggccgtcgcttccgcctggcgcacgtgatgttcgggccggaaatcattgaggtcgccaccttccgcggccatcacgaaggccacaccaacgaccgcgtcacctcccagcgcggccagaacggcatgctgctgcgcgataacatcttcggctctatcgaagaggatgcccagcgccgcgacttcaccatcaatagcctttattacagcgtggcggacttcaccgtacgcgactacgttggtggaatgcgcgatctgcaggaaggggtgatacgcctgattggcgacccggaaacccgttaccgtgaggatccggtgcgcatgctgcgcgcggttcgtttcgccgccaaactgcatatgcgcatcagcgccgaaagcgccgagccaatcccacgtctggctaccctgctgcacgacgtaccgcccgcgcgtctgtttgaagaagtgctgaaactgctgcaggcgggttatggttatgaaacctaccagctgctgcgcgaatacagcctgttccagccgctgttcccgacgatcacccgctacttcaccgagcgcggcgatagtccgatggaacgcatcatcattcaggtgctgaagaacaccgataaccgcctgcataacgatatgcgcgttaacccagcattcctgttcgcggtcatgttctggtatccgctgctggaaatggcgcagaaaatcgcgcaggagagcgggctggcctattacgacgccttcgcgctggcaatgaatgacgtgctggatgaagcctgccggacgctggcgatccctaaacgcatcaccaccctggtgcgcgacatctggcagttgcagcttcgtatgtcccgccgtcagggcaaacgcgcgtggaaactcatggagcatccgaagttccgcgccgcctatgacctgcttgaactgcgcgcaggcgccgagaacaaccacgaactgcagcgcctggccaaatggtggggcgagttccaggtggccacgccgccggaacagaaagatatgctcaacgacctcggcgacgatccggctccgcgccgccgccatcgccgcccgcgtaaacgcgcgccgcgtcagggtaacgcatga

SEQ ID NO: 87375 - DNA, 480 bp, Enterobacter aerogenes
atgaccctggtctatatcgccattggcagtaatctcgcctcgccgctcgaacaagtgaatgcggctatccgcgcgctggccgacattccggacagccgcgtggtgagcgtatcttcactgtaccgtacgccaccgctggggccgcaggatcagcctgactatctcaatgccgccgtcgcgcttgaaacctcgctcgcgccagaagcgctgctcgatcacactcagcgcatcgaactgcagcaggggcgggtgcgcaaagccgaacgctgggggccgcgtacgctggacctcgacatcatgctgtttggcgacgcaatcattaacagcgagcgcctgacggtgccgcactacgatatgaaaaatcgcggttttatgctctggccactgtttgaaatcgccccgcagctccacttccccgatggcctcgcccttcgcgccgcgctggaaaatctgggcgccgaaaagcctgccatctggtaa

SEQ ID NO: 87376 - DNA, 792 bp, Enterobacter aerogenes
atgaaaccgaccaccattgccctgctgcagaaatgtaaacaggagaaaaagcgcttcgccactatcaccgcctacgactacagcttcgctaagctttttgccgatgaaggcattaacgtcctgctggtgggcgattcgctggggatgacggtacagggccacgactccacgctgccggtgaccgttgacgatatcgcttaccatacccgtgctgtgcgccgcggcgcgccgaacagcctgctgctcgccgacctgccgttcatggcctacgccacgccggagcaaaccttcgaaaatgccgccgtcgtgatgcgcgccggcgccaatatggtcaaacttgaaggcggcgcctggctggctgataccgtcaggatgctggcggagcgcgcggtaccggtttgcggtcacctcggcctgacgccgcagtcggtgaacgtgttcggcggctataaagttcagggccgcggcgatgcggcgcaggcgctgtttgatgacgcgttagcgctggaagaggccggcgcgcagctgctggtgctggagtgcgtgccggtagagctggcaaaacgcatcaccgaagcgctgacgatcccggttatcggcatcggcgcaggtaacgtgaccgacgggcaaattctggtaatgcatgacgctttcgggatcaccggcggccacattcctaaattcgccaagaatttcctcgcagaagcgggcgacatccgcgccgcggtacggcagtatattgccgaagtcgaatccggggcctatccgggcgaagaacatagtttccattaa

SEQ ID NO: 87377 - DNA, 855 bp, Enterobacter aerogenes
gtgctgataattgaaaccctgccgctgctgcgccagcatatccgtcgtttacgccaggaaggcaagcgcattgcgctggttcccaccatgggcaacctgcacgatggccatatgaagctggtcgatgaagccaaagcctgcgcggatgtcgtggtggtcagtatcttcgtgaatccgatgcaatttgaccgcccggacgatctggcgcgctatccgcgcaccctgcaggaggattgcgaaaagctgaacaagcgcaaggtcgactttgtctttgctccggcgccggcggaaatttatccgcagggtactgaaggacagactttcgttgacgttcctggcctgtcgaccatgctggaaggcgccagccgccctggccacttccgcggcgtctcgaccattgtcagcaaactgttcaacctggtgcagccggatgtcgcctgcttcggcgagaaagatttccagcagctggcgctgatccgcaaaatggtcgccgatatgggctacgacattgagatcgtcggcgtgccgatcatccgcgctaaagacggcctggcgctgagctcgcgtaacggttatctgaccgccgagcagcgtaaaatcgcccccggtctgtacaaagtgctgagtacggtagcgggcaaacttgccgcaggcgagcgtaaccttgaggaaatcattgccatcgccgagcaggagctcaatgaatcaggttttcgtgccgacgatatccagatccgcgatgccgacactctgctggagctgacggaagccagcaaacgcgcggtgatcctgatggcggcatggctgggccaggcgcgcctgattgataacaaaatcgtcgagctgggccagtag

SEQ ID NO: 87378 - DNA, 381 bp, Enterobacter aerogenes
atgatgcgtaatatgctgcagggcaagctccatcgcgttaaagtcacgcaggctgacctgcattacgaaggttcctgcgccattgaccaggatttcctcgaagcggccggtattctggaaaatgaagccattcatctgtggaacgtgaccaacggtaaccgtttctcaacttatgcgatcgccgccgagcgtggttcgaagattatctccgtcaacggcgctgcggcgcactgcgcaagcgtcggcgatatcctcattatcgccagcttcgtgactatgtctgacgaagaagcccgcacctggcagccgaaagtcgcctatttcgaaggcgataacgaaatgaagcgccaggcgaaagctattccggtgcaggtcgcctga

SEQ ID NO: 87379 - DNA, 1254 bp, Enterobacter aerogenes
atgcgcatgtttgcccgagtcattacattgttcctttttctggcatctgccagcgtttccgccagtctgctcagccagcagggcgttcccgcacgctatatgcaagtcacggaagatgccgatatctgggcgcaggtcggcaaccatgtggtaagcgtcggcaacgttcgcgccgggcagatccttgccgtggtgccgaccacggcagactattatgaattcaatttcggcttcggtaccggttttattgataaaggacatctgggggcggtgcagggcgcaaaacgggttgaggatagcctgggcgatttacgccagccattgagcaaccagaacctgctgacctggaaagatacgccggtatacgatgcgccatcagtgggcagcccgccgtttggtacattagcgaataacctgcgctatcccattatcagcaagctgaaagatcgccttaatcagacctggtatcagattcgtatcggcaaccggctggcgtgggtgagtagtctggatgcgcaggaggataacggcattccgctactgacttatcaccatattctgcgtgatgaagaaaatagccgttttcgccatacctccaccaccacttcggtgcgcgctttcagtaaccagatgacctggttgcgtgaccagggttataccaccctgacgatgtatcaactggaagggtatctgcgtaacaaggttaatctgcctgcacgctcggtggtgattacctttgatgatggcctcaagtcggtgaatcgctacgcttatccgatcctcaagcagtacggcttccacgcgacggcgtttattatctcgtcgcggatcaaacgtcatccgcaaaagtgggatccgaaatcactgcagtttatgagtatctctgagctcaggcagattcaggacgtgtttgatgtacagtcgcatacccattttctgcaccgggtcgatgccgcccgtcacccgatattgctcagccggaattatcacaacattctctttgatttcgagcgttcccggcgggcgctgagtcagtttaatccgcacgtgctgtatctttcgtatccgttcggcggctataacgccacggcggtcaaggcggcgaacgatgccggctttcatctggcggtaacgacggtgagagggaaggtgaaaccgggggataatccgttcctgctgaagcggttgtatatcttacgtaccgattcgctggagacgatgtcgcggcttatcagcaatcagccgcaagggtaa

SEQ ID NO: 87380 - DNA, 441 bp, Enterobacter aerogenes
atgttaggttgggtaattacctgtcatgatgagctggcgcaggagatgctggatcgtctggagaaaaagattggcccgctggcgcaatgccgggcggtgaattactggcgtaatctgagcgtcaatatgctgagccgcatgatgtgcgacgcgctgcatgccacagactgcggcgatggggtgatttttctcaccgataaaaccggtgccgcgccgtatcgcgccgccgcgctgatgagtcacaaacacacccattgtgaagtgatttccggcattcgctatccattgctggaggaaatgtatttacagcgctataccctcagcagtgacgccttccgtaatgctatcgttagcgccggaggccccacggtgagtagcctgtggcatcagcagcaaaaaaatccgccttttcgtctcctgcatgatacgttcggaaattag

SEQ ID NO: 87381 - DNA, 768 bp, Enterobacter aerogenes
atgcagctttactgggtcgcgctgaaaagcatctggaccaaagagatccaccggtttatgcgtatctgggttcagacgctggtgccgccggtgatcaccatgaccctctatttcgtcatctttggcaatctgatcggctcacggatcggcgagatgcacggttttacctacatgcagtttatcgtgccggggctgattatgatggcggtgatcaccaacgcctacgccaacgtcgcctcgtcgttcttcagcgccaagtttcagcgcaacattgaggaactgctggtggcgccggtgccaacccacgtggtgatcgccggttacgtcggcggcggggtggcgcgcgggctgtgcgtcgggattctggttacggctatctcgctgttcttcgtcccgttccaggttcattcctggctgttcgtcgccctgacgctgattttgacggcaatcctgttctcgctggcaggcctgctcaatgcggtgtttgcgaaaaccttcgacgacatcagcctgatcccgactttcgtgctgacaccgctgacctatcttggcggggtgttctattcgctgacgctgttgccgccgttctggcaggcgctctcgcatttgaacccgatcgtctacatgattagcggcttccgttttggcttcctcggcattcatgacgtcccgctggcgaccacctttggcgtactggtggtgtttatcgtggccttctatattctgtgctggtatctgatccagcgcgggcgcggcctgcgtagctaa

SEQ ID NO: 87382 - DNA, 927 bp, Enterobacter aerogenes
atgaccattgctctggaattaaaacagctcaagaaaacctatcccggcggggttcaggcgctgaaaggcattgacctgcaggttgaagccggcgacttttatgcgctgctgggcccgaacggcgcggggaaatccacgactatcggcatcattagttcgctggtcaataaaacctccggtcaggttaatgtatttggttacgacctggaaaaagatgtggtgaacgccaaacgccagctcgggctggtgccgcaggagttcaacttcaacccgttcgaaaccgtacagcagatcgtggttaaccaggcgggttactatggcgttgagcgtaaagaagcaattttgcgtagcgaaaagtatctgaaacagctcgatctgtgggaaaagcgcaatgaacgcgcgcgtatgctctccggtgggatgaagcgccgcctgatgattgcccgcgcgctgatgcatgagccgaagctgctcatccttgatgaacccaccgccggggttgatatcgaactacgtcgctcgatgtgggggttcctcaaagatctcaacgataaaggcaccaccattatcctcacgacccactatctggaagaagcggaaatgttgtgccgcaatatcggcattatccagagcggcgagctggtggaaaacacctcaatgaaggcgctgctggcaaagctgaaatcggaaacctttatcctcgatctggcgccgaaaagcccgctgccgaccctcgatggatatcaataccggctggttgatacctcgacgctggaagttgaagtcctgcgcgagcaggggattaacagcgttttcgcccagctaagcgcccagggcgtgcaggtattaagtatgcgtaacaaggccaaccgtctggaagagctgtttgtcacgctggtgcacgacaaaaaaggagaatcagcatga

SEQ ID NO: 87383 - DNA, 663 bp, Enterobacter aerogenes
atgaatgatatagatacactcatcagcaataatgcactatggtcaaaaatgctggtggaagaggaccccggcttctttgcgaaattgtcgcaggcgcagaaaccgcgttttctgtggattggctgttccgatagccgcgtccccgcagagcgcttaaccggcctggaacccggtgagttgttcgtgcaccgtaacgttgccaatctggtgatccacaccgacctgaactgtctgtcggtggtgcaatacgccgttgacgtgctggaagtcgaacacattattatctgcggccactacggctgcggcggtgtacaggcggcggtcgagaacccggaattggggcttattgataactggctgctacacattcgcgatatctggtttaaacacagttcgctgctcggtgaaatgccggaagagcggcgtctggatacactttgcgaactgaacgtaatggagcaggtatacaacctgggacactcgacgatcatgcagtcggcgtggaaacgtggacaaaaagtgacgatccacggttgggcttatggtattcacgacggactactgcgcgatcttgatgtcaccgccgtcagccgggaaaccctcgagcagcgctatcgccacgggatttccaatctcaagagcaagcacgccaaccataaatag

SEQ ID NO: 87384 - DNA, 537 bp, Enterobacter aerogenes
atgaaacatactgtagaagtgatgatcccggaagccgagatcaaagcgcgtatcgccgaactgggtcgtcaaattaatgaacgctacaaagacagcggcagtgaaatggtgctggtgggtctgctgcgcggttcatttatgtttatggctgacctgtgccgtgaggttcaggtgccgcatgaagtcgactttatgaccgcctccagctatggcagcggcatgtccaccacccgcgatgtcaaaatccttaaagacctggatgaagatattcgcggtaaagacgtattgatcgtcgaagacatcatcgattccggcaacaccctgtctaaagtgcgcgaaatcctcagcctgcgcgagccgaaatcactggctatctgtacgctgctggataaaccaagccgtcgtgaagtgaacgtcccggtggagtttgtcggttttgcgattccggatgagttcgtggtgggctacggtatcgactacgctcagcgctatcgtcatctgccgtatgtcggcaaagtgatcctgctggacgagtaa

SEQ ID NO: 87385 - DNA, 2391 bp, Enterobacter aerogenes
atggcagaaacaaaatctcaacaatcacggttacttgtcacgctgacggcgctgtttgccgccttctgtggcctgtatctgttaatcggtggggtatggctggccgctattggcggttcctggtactaccctatcgcaggcctggtgatgctggccgtcaccgttatgctgttccgcggcaagcgcgctgcgctgtggctgtacgccgccctgctgctggcaaccatgatttggggggtatgggaagtcggtttcgacttctgggcgctgacgccgcgtagcgacatcctggtcttcttcggcatctggctgattctgccatttgtctggcgtcgtctgccggtcccttccgccggtgccgttggcggtctggttatcgccctgctgattagcggcgggatcctgacctgggccggtttcaacgatccgcaggaagtgaacggtacgctgagcgctgacgcgacgccggctgcgccgatttctaccgtcgccgatagcgactggccggcttatggccgcaaccaggaaggccagcgttattcaccgctgaagcaaattaataccgataacgtgaagaacctgaaggaagcctgggtattccgcaccggcgacctgaagcagccgaacgatccgggtgaaatcactaacgaagtgacgccgattaaagttggcgacatgctgtatctgtgtaccgcgcaccagcgtctgttcgcgcttgacgcggccaccggtaaagagaagtggcattttgacccgcagctgaacgccgatccgtcgttccagcacgtgacctgccgtggcgtctcctatcatgaagccaaagcagataacgcgcctgccgacgtcgtcgccgactgcccgcgccgtattattctgccggtcaacgatggccgtctgttcgcggtgaacgccgataacggtaagctgtgcgaaacctttgccaacaaaggcattctcaacctgcaaaccaatatgccggtaaccacgccgggtatgtatgaaccgacgtcgccgccgattatcaccgataagactatcgtcattgccggcgcggtaaccgataacttctcaacccgcgagccatcaggcgttatccgcggctttgatgtgaataccggtaaactgctgtgggccttcgacccgggcgcgaaagaccctaatgcgatcccgagcgatgaacatcacttcacactcaattcacctaactcctgggcgcctgccgcctatgacgcgaagctggatttagtctatctgccgatgggcgtaaccacgccggatatctggggcggcaatcgcacgccggaacaggaacgttacgccagctctatcgtggcgctgaacgcaaccaccgggaaactggcgtggagctaccaaaccgtacaccacgatctgtgggatatggatatgccgtcgcagccgacgctggccgacattgatgtgaacggtaaaaccgtaccggtgatttacgctccggccaaaaccggtaacatcttcgtactagatcgccgtaatggcgagctggtggtcccggcgccggaaaaaccggttccgcaaggtgcggcaaaaggcgattatgttgctaaaacccagccgttctccgagctgagcttccgtccgaagaaagacctgaccggcgcagatatgtggggcgccaccatgtttgaccaactggtgtgccgcgttatcttccatcagatgcgctatgaaggtatcttcactccgccgtctgaacagggcacgctggtcttcccggggaacctggggatgtttgaatggggcggaatctccgtcgatccaaaccgtcaggtggctatcgccaacccgatggcgctgccgttcgtctctaaactgatcccacgcggcccgggcaacccgatggaaccgccaaaagacgcgaaaggctctggtaccgagtccggcgttcagccgcagtatggcgtcccgttcggcgtcacgctgaacccgttcctgtcgccgtttggcctgccgtgtaaacaaccggcatggggttatatctcggcgctggatctgaagaccaacgaagtagtgtggaaaaaacgcatcggtacgccgcaggatagtctgccgttcccgctgcctgtcccgctgccattcaatatgggtatgccgatgctgggcggaccgatctcaaccgccggtaacgtgctgtttatcgccgccaccgccgataactacctgcgcgcttacaacatgagtaatggtgaaaaactgtggcaggcgcgtctgcctgcaggtggccaggcgacgccgatgacctatgaagtgaatggcaagcagtacgttgtcatctctgccggcggtcatggctcgttcggtactaaaatgggcgactacatcgttgcctatgcgttaccggatgacgcgaaataa

SEQ ID NO: 87386 - DNA, 1596 bp, Enterobacter aerogenes
atgcaacgtcgtgagtttatcaaattaagcgccgcgcttggcgcggtcagcgccttaccgctctggagccgttcggtattcgctgctggccgtccggctttgccggtcccggatttattgaccgccgacgcgcgcaatcgcattacgctgacgattcaagccggaaagacacagtttggcccgcatcttgcgacgacctggggttataacggcaacctcctcgggcctgcgttgaagctgaagcaaggtgaagcggtgacggtagatattcataaccgcctggcggaggagaccacggtccactggcatgggctggaagtgcctggcgaagtcgatggcggcccgcagggcgtcatcgccgcaggagcctcaaggacggtgagttttacgccgacgcagcgagcggcgacctgctggttccatccccatcagcatggtaaaaccggccgtcaggtcgcgatggggctggcgggtttggtgctgattgaagatgtcgagagcgggcaattactgctgccgaagcagtggggaattgatgatattccggtgatcgtgcaggacaaaagattcaatgccaatggagaaatagattatcagctcgatatcatgagcgccgccgttggctggtttggcgataccctgttgactaacggcgcgctgtatcccgaacacgctccaccgcgcggttggctgcgcctgcgtctgcttaatggttgtaatgcccgctcgctgaatttcgctaccagcgatcgccgcccaatgtatgtagtagcaagcgacggcggcctgttagcggaaccggtcaaagtgagcgaactgccggtactgatgggcgagcgctttgaggtattgattgatacccgcgacggaaaggcatttgatctcctgacgctgccggtgagccagatggggatggcgattgcgccatttgataagccgcagccggtgctccgtatacagccgctattgatcccggcatccggtaagctacccgatactttggcggcgatacccgcgctgccgtcactggaggggctgacgcagcgcacgctacagctgtcgatggatccgatgctcgatatgatgggaatgcaggcgctgatgaagaaatatggcgaccaggcgatgtccggtatgaaccatgggatgatgatggatcatggcgacatgggcaatatgaatcacggtcagatgaagaatatgaaccatggcggcggaatgggacatggcgcttcatctgataagggcttcgatttccataacgccaaccgtatcaacggtaaagcctttgatatgaatgtgccgatgttcgccgcggccagggggcagtacgagcgctggctgatctccggcaagggcgacatgatgctgcatcctttccatattcatggcacgcaattccgtattctgagtgaaaatggccaggcgccagcggcgcatcgtcgcggctggaaggatacggtaagagtggagggcggggtgagtgaagtgctggtgaagttcgatcatcaggcgcccagggagtttgcctatatggcgcactgtcatctactggagcatgaagacaccgggatgatgttggggttcaccgtttag

SEQ ID NO: 87387 - DNA, 327 bp, Enterobacter aerogenes
atgctgtttggcagcctgctcgccctctccgccaatagctatgcattaagtgaatccgaagcggaagatatggctgatttaacggcggtatttgtattcctgaaaaacgattgcggctatcaaaatttgccaaatacgcaaattcgccgcgcgttggtcttttttgcccagcaaaaccaatgggacctcagcaactacgacagctttaatatgaaagcattaggtgaggacagctatcgcgatctcagcggtatcaaaatcccaacagccaaaaaatgcaaagctctggcccgagactccctcagcctgctggcctatgtgaagtaa

SEQ ID NO: 87388 - DNA, 369 bp, Enterobacter aerogenes
atgttagcgggttgccaggcacatcgtcaggctaacgctcccataacgccgccaatcgtcatcgccaccgatgcgcaacagaatgaaaagctgcgactggccgctgagcaggagcggcttaatgcctgccgccaggcgttggattcgttaaaagaagttaatccgaaagaagcctcaagactgggtagtgaattcaccgccctgataggtgcggcgtcgcaatataattcagtgcgaacgaaagtcgccgatccaacccgtcagggcatcgattccatgtatcaatttaaatccattaagctttgcgccgatattgaaaagtcgctgatcgatagtctggtcatgcgcggcgataatgcggtgaagtga

SEQ ID NO: 87389 - DNA, 1281 bp, Enterobacter aerogenes
atgataattcgccttaatatattgacgctggccttcattttgctggcgtccttttttattggtcatgcgcaagcggatgacggcgcgcctgcgtttctcaactatgtccagcagcaggagaaaaaagagaagaaagaaatacctccggcgccggaggccagtaaacccgtcagggcccgcgacaacaacacggcagcgctgcaaaaaaaactggccgcacaaaaaggtctcattgccgacaaagataagaccatccaccagctgcaggcacagctaaaatcacaatctcccgccgtcacgccagcgccggtagataattcagcgttgaataaaaccatcgcacaactccagggtcggataaccacgctggacacggaaaacaagcggcttgttctgcaagcccgcaccgtccagcaggaaaaagccgagggcgcagataatctcaaacgctctgccgcctctctgcagacgcaaacggtaaagctcaacgcgctggagagagacaagcaggccctgagcgacaagctggctgcggcaatggcggagaaacagaaactgagcgccgaactcgccgcagtaaaaaccaccgccgcggcaaccaaatcatccgcgctaaacctcagtaatgccccacagcagcaggcatactccgtcggtgtatcaatagggcaagatgcgcttaaaacgctgtccagccaggcagcgaaagggttaaatctgcaacaggagaccgttattaagggcattaacgatgtttttgccggtaagctggcgctggatgaacaagcgcgcaataaggcgcttttcgacgtgtcgcagcggttatacaaaaacattgataaaattgagcagcaaaccctccgcgaaggtaaaaagtatcagcagcaatttgccgcgcagaaaggcgttctactcaaaggcgggatctatagccgcatagattaccccggcaaaggtaaggtcggtgaaaacgatatcgtcaccgtcgttatcaaagaaagcttgatcgacggtaccgtgataaacgatatggaagccgaagataaggtctggtcacaggcgctaagtcagtatcccccgaccttccgtgaaccgcttaaacgcctgaataaccatggcgccatcactatcgtgattccaccggagcgggcttacggcagcaaagggatccctggaaaaattccgccgggcgcgacgatggtgtataccgtccgaattgttgacgtcaggcccaatagcgatcaacaacccaaaacacctgcgccgaaaacctcacgctag

SEQ ID NO: 87390 - DNA, 861 bp, Enterobacter aerogenes
atggccgagagtaatcagtggcatgagacgctgcacgaccattttggtcaatattttaccgttgataacgtgctgtaccatgagaagaccgatcatcaggatttaatcatcttcgaaaatgcggcatttggccgcgtgatggcgcttgatggcgtggtgcaaaccaccgagcgcgatgagtttatttaccatgaaatgatgacccacgttccgctgctggcccatggtcacgcaaagcacgtgctgatcatcggcggcggcgatggcgcgatgctgcgtgaagtctcccgccaccaacatatcgaaaccattaccatggtggaaatcgacgccggagtggtatcgttctgccgtcagtaccttccaaaccataacgccggcgcctatgacgacccgcgctttacgctggtgattgatgacggcgtgaacttcgtcaaacaaacgtcacaaacttttgatgtcattatctccgactgtactgacccgatcggccccggtgagagcctgtttacctcggagttttatgctggctgtaaacgttgcctgaaccccggcggaattttcgttgcccagaacggcgtaagcttcctgcagcaggatgaagcggtaggcagccatcgcaaactcagccactatttcaccgatgtcagcttctaccaggcggcgatcccgacctactatggcggcatcatgacctttgcctgggcgaccgataatgaagccctgcgtcatttgtcgacggaaattattcaggcccgcttccatagcgccgggctgaaatgccgttattacaacccggcaattcataccgcggctttcgcgctaccgcaatacctgctggatgcgctgaccgccagctaa

SEQ ID NO: 87391 - DNA, 795 bp, Enterobacter aerogenes
ttgaaaaagcttaagctgcacggcttcaacaacctgactaaaagcctgagtttttgtatttacgatatctgctacgctaaaaccgccgaagagcgcgatggctatatcgcctatatcgatgaactctataatgccaaccgcctgacggaaatcctctccgagacctgttcaatcattggcgccaacatactcaacatcgcacgccaggattatgaaccgcagggcgcaagcgtcaccattttggttagcgaagagcctatcgatccgcagcttatcgatcagagcgagcatccgggcccgctgcctgagaccgtggtcgcacatctcgataaaagccatatctgcgtgcatacctatccggaaagccatccggaaggcggtctgtgcaccttccgcgccgatattgaagtctccacctgtggagtgatttcaccgctgaaggcgctgaactacctgattcaccagctggaatccgatatcgtaaccattgattatcgcgtgcgtggtttcacccgtgatatcaacggcatgaagcattttatcgatcatgaaatcaactctattcagaacttcatgtcagaagatatgaagtcgctctatgacatggtggacgtgaacgtctatcaggaaaatatgttccataccaaaatgatgctgaaagagttcgatctgaaacactacatgttccacaccaaaccggaagagttaagcgaacaagagcgcaaggtgattaccgacctgctgtggaaagagatgcgggaaatttattacgcccgcaatatccctacggtgtaa

SEQ ID NO: 87392 - DNA, 363 bp, Enterobacter aerogenes
atggattacgaatttctgcgcgatattaccggtgtggtaaaggtgcgaatgtcgatggaccacgaggcgattggtcactggttcaacgaagaggtgaaagataacctggcccttctggatgaagtggaacaggcagcgcgcaccgtgaaaggcagtgaacgttcctggcagcgggccggccatgaatatacgttgtggctggatggcgaagaagtgatgatccgcgccaaccaactggaattttccggcgatgaaatggaagaggggatgaattactacgacgaagagagcctctctctttgcggcgtggaggatttcctgcaggtggttgccgcataccgtgaatttatgcagcagcgttaa

SEQ ID NO: 87393 - DNA, 2598 bp, Enterobacter aerogenes
gtgctagaagaataccgtaagcacgtagctgagcgtgccgccatggggattgttgccaaacccttagacgcaacccaaatggccgcgctggtagaactgctgaaaaacccgccagcgggtgaagatgaattcctgttagatctgcttaccaaccgtgtaccgccgggcgtcgatgaagccgcctatgttaaagccggattccttgccgctatcgctaaaggcgaagcgacctccccactggttacccctgaaaaagccgttgaactgctgggcaccatgcagggcggttacaatattcatcccctgattgaagcgctggacgatgccaaactggcaccgattgcggcgaaagcgctgtcccataccctgctgatgttcgataacttctatgacgtagaagagaaagccaaagcgggtaatgaatacgctaaacaggttatgcaatcctgggctgacgccgagtggttcctgaaccgtccgcaactggcggaaaaaattaccgttaccgtcttcaaagttaccggcgaaaccaataccgatgacttgtctccggcgcctgatgcctggtcccgtccggatatcccactgcacgctctggcgatgctgaaaaacgctcgtgaaggtattgagccggatcagccgggcgcagtcggtccgattaaacaaattgaagcgctgcagcagaaaggcttcccgctggcctacgttggcgacgttgttggtaccggttcttcgcgtaaatccgccaccaactcggtgctgtggttcatgggcgacgatatcccgaacgtaccgaacaagcgcggcggcggcctgtgcctgggcggcaaaattgcgcctatcttcttcaataccatggaagatgcgggcgcgctgcctattgaagtggacgtgagcaacctgaacatgggcgacgtcattgacgtttacccgttcaaaggcgaagtgcgtaaccacgaaaccaacgagctgttggcaagcttcgaactgaaaaccgatgtactgatcgacgaagtgcgcgccggtggccgtattccgctgatcattggtcgcggactgacgaccaaagcgcgcgaagcgctgggtctgccgcacagcgacgtcttccgtcatgcgaaagatgtggcggaaagcaaccgcggcttctctctggcgcagaaaatggttggccgcgcctgcggcgttgccggtatccgtccgggcgcttattgcgagccgaaaatgacctccgtcggttctcaggacaccaccggtccaatgacccgcgatgagctgaaagacctggcgtgcctgggcttctccgctgacctggtgatgcagtccttctgtcacactgcagcctatccgaagccggttgacgtcaccacgcaccacactctgccggacttcatcatgaaccgcggcggtgtttcactgcgtccgggcgatggcgttatccactcctggctgaaccgtatgctgctgcctgataccgtaggtaccggcggcgactcccatacccgattcccgattggtatctcattcccggcgggctcaggtctggtggccttcgccgccgcgaccggcgtgatgccgctggatatgccggaatcagtactggtgcgcttcaaaggtaaaatgcagccgggcattaccctgcgcgacctggttcacgccattccgctgtatgctatcaagcagggcctgctgaccgttgagaagaaagggaagaaaaacatcttctctggccgcatccttgaaatcgaaggtctgccggatctgaaagtcgagcaggcatttgaactgaccgatgcttccgccgagcgttcagctgcaggttgtaccatcaagctgaacaaagagccgatcgttgagtatctgaactccaacatcgtcctgctgaagtggatgatcgcagaaggttacggcgatcgtcgtacgctggagcgccgtatccagggcatggaaaaatggctggcggatccgcaactgctggaagccgacgctgatgcggaatacgcggcagtgatcgacatcgatctggcggatatcaaagagccaatcctgtgcgcaccgaacgatccggacgatgcgcgtctgctgtcagacgtgcagggcgagaagatcgacgaagtgtttatcggttcctgcatgaccaacattggccacttccgtgctgccggtaaactgctggacagccacaaaggccaactgccgactcgcctgtgggtggcgccgccaacccgtatggatgccgcgcagttgacagaagaaggctactacagcgtgtttggtaagagcggcgcgcgtatcgaaatccctggctgttccctgtgtatgggcaaccaggcgcgcgtggctgacggcgcgacggtcgtgtcgacctctactcgtaacttcccgaaccgtttaggtaccggcgccaacgtctatctggcctctgccgaactggcggcggttgcttctctgctgggcaaactgccgacgccggaagagtatcagaccttcgtcgctcaggttgataagacggcggaagatacctatcgctacctgaactttaaccagctggatcagtacactgaaaaagctgacggcgtgatcttccagaccgccgtgtaa

SEQ ID NO: 87394 - DNA, 1635 bp, Enterobacter aerogenes
atgtcactaccgttcaaaccccatattatcgccctgctctgcagcgccggcttactcgcggcggcgggaacgctatatgttaaaagtcgtaccccagagactatcgctgaagcgccggtgacggcgcagcctgtgccaacgtcagcaccagcgactgcgccagcgcaacctgtcgccgccacctatacccaggcgcaaatcgaccaatgggtcgcgccaatcgcgctctacccggacagtttactctcgcaggtactgatggcctccacctatccggacaacgtcatgcaggcggtgcagtggtcgcaggataacccgtcgatgaaaggcgacgcggccgtgcaggccgttgccaaccagccgtgggatccgagcgtcaaatccctcgtcgcttttcccgccctgctggcaatgatgggcgaaaacccgccgtgggtagaaaaccttggcgatgcatttttagcccagccgcacgacgtgatggattccgtacagcgcctgcgcgctattgcccaacaaaccggaacattaaaatccacaccgcaacaaaaggtgaccgtcacggccgccgcgccggcctcttcgaggtcatcgaatagcagcacggtatcaacctcaacaacctcaacgccatcgccttcgcagatcatcaaaattgaaccgaccaatccgcaggtggtatacgttccaagctataacccttcgaccgtctacggcagttggccgaatagcgcctatcccccggtctatctgccgccacctccaggagagcagttcaccgatagcttcgtcaaaggttttggttacagccttggcgtcgccaccacctgggcgctcttcagcagcatcgactgggatgatgacgatgattaccatcatcatgacgacgattaccatcacggcggttacctgcacaatggcgataacatcaatattaatgtgaataatttcaaccgcattaccgggcagaatctgccgggtaaccatgttaactggcagcacaaccccgcctatcgcggcaacgtgccttatccgaataataatgtcgcccagcgctatcatcagaccaatgtgcccggcggactcagcgcaacccagcatgcgccggtcgatcgcaatgctcaacggcaagcggcgatgacgcagctccagcatcccaacgcccctgccgccagcgcaggcaaactggcggccactagcgcctcgcgcgatgcgcagcgtcaggcagcctctcagcaattgaagcaggccacccagcgcagcagctaccgtggctacgacagcacgccgacgcctgccaaacagcagcgtcgcgaagcggcgaaaacgcagctgcaacacccaacgccacagcagcaacagcatcgcgaggccgtgaagagccacgtgcagaatccaacgcctcagcaacaacagcgccgtcagcagattcactccgcgacgccggcccaacgtcagcaagctgtgagcacggtacgcgccaatgccttaagcggcaacgaaagtcgctccccctcctggcaatcacagcaggcgcgcgggctgcaaagccgtaatatttccggcttgagcagcgaacagcgcggcgccgccagagagcgtctttccgaacatcatgaattgcgtcgtcgctga

SEQ ID NO: 87395 - DNA, 807 bp, Enterobacter aerogenes
atgagaaaaccattacagatcgccctattatcgctaatgctgtcgccgctcgccgccttcgcccagcaaccgttccccacgccggagaaagccgcaagcgcgctggccgatgcgctcaatcatcgtgataaagccgcgctcaataatctgctcggcgataactggcagcagtttttacccaccgatggtattgatcccaatgccgtcgaccgctttcagcgcgactggcaggtgaaacacgtcattgtccagcagggtaatagcgcctggcttgatgtcggtagtgaagcgtggcggttgccgattcccattgtcaaagatgaacagggctggcgttttgatatggcggccggagaagatgaaattctcacacgcgccatcggccgcaatgaattgtcggcaattgccgccatgcacgcctacgttgatgcccagcaggattactatcaaatgaatcatcgctgggcgcaaaaaatcatcagcagcgaaggcaaaaaagatggcctgtactggccaacctcaccgggcgaaacgcccagcccgctggggccggcctttagcccggctgagcccggcgccggttatcatggctaccgtttccgcattatcgccgataacgatagccaaggcgtcgccttactggcctggccggtagagtggggagaaaccggggtgatgagctttatgatcgatcagaacgataaggtctggcaggcgaacctgggcgaagagagcgcgacgaaagcgcaggcaattacgcattttgcccccgattcagcggcgggatggcagccggtcaatcaataa

SEQ ID NO: 87396 - DNA, 285 bp, Enterobacter aerogenes
atgaaacgcttattgaccacggcgctgttagccacgatattcgtatccggtatggcctgcgcggctgatgcaaccattccatgggcggcgaacagcggcggtaccgaaagtacccatattgcggcgatgggtcaggatctgaatgcgcagcatcagttggtgacgaagacgaatgaaggggtgtgggcggcgaattccgggagcatcagctcggatgaagcggcgctgaccagtcagaaacctgcttttgccggttatccggagctgatgccgcaccagggctaa

SEQ ID NO: 87397 - DNA, 1425 bp, Enterobacter aerogenes
atgagtactgaaatcaaaactcaggtcgtggtacttggggcaggtcctgcaggctactctgcagccttccgttgcgctgatttaggtctggaaaccgtcatcgtagaacgttacagctccctgggcggtgtttgcctgaacgtgggttgtatcccttctaaagcactgctgcacgttgctaaagttatcgaagaagcgaaagcgctggccgaacacggcatcgttttcggcgaaccgaaaaccgacattgacaagatccgcacctggaaagaaaaagttatcactcagctgaccggtggtctggctggcatggccaaaggtcgtaaagtgaaggtggttaacggtctgggtaaattcaccggcgctaacaccctggaagttgaaggcgaaaacggcaaaaccgtgattaacttcgacaacgcgatcatcgcggcgggctcccgtccgattcaactgccgtttatcccgcatgaagatccgcgcgtttgggattccaccgacgctctggaactgaaatctgtaccgaaacgcatgctggttatgggcggcggtatcatcggtctggaaatgggtaccgtataccatgcgctgggttcagagattgacgtggttgaaatgttcgaccaggttatcccggctgccgacaaagacgtggttaaagtcttcaccaagcgtatcagcaagaaattcaacctgatgctggaaaccaaagtgactgccgttgaagcaaaagaagacggtatttacgtttccatggaaggcaaaaaagccccggcggaagcgcagcgttacgacgcggtgctggtagctatcggccgcgtgccgaacggtaaaaacctcgacgcaggcaaagccggcgtggaagttgacgatcgcggcttcattcgcgttgacaaacaaatgcgcaccaacgtgccgcacatctttgctatcggcgatatcgtcggtcagccgatgctggcgcacaaaggcgtacacgaaggtcacgttgccgcagaagttatctccggcctgaaacactacttcgatccgaaagtgatcccgtccatcgcctacaccgagccagaagtggcatgggttggcctgactgagaaagaagcgaaagagaaaggcatcagctacgaaaccgccaccttcccgtgggctgcttccggccgtgctatcgcttccgactgcgcagacggtatgaccaaactgatcttcgacaaagagacccaccgtgttatcggcggcgcgattgtcggcaccaacggcggcgagctgctgggtgaaatcggtctggctatcgaaatgggctgcgacgctgaagacatcgcgctgactatccacgctcacccgactctgcacgagtccgttggcctggcggcagaagtcttcgaaggtagcattaccgacctgccaaacgcgaaagcgaagaaaaagtaa

SEQ ID NO: 87398 - DNA, 1893 bp, Enterobacter aerogenes
atggctatcgaaatcaaagtaccggacatcggggctgatgaagttgaaatcaccgagatcctggtcaaagttggcgacaaagttgaagctgaacagtcgctgatcaccgtagaaggcgacaaggcctctatggaagttccgtctccgcaggctggcgtcgtgaaagagattaaagtctccgtcggcgacaaaaccgagactggcaaactgatcatgattttcgattccgccgaaggtgcagcagccgctgcacctgcgcaggaagagaaagcggctgctccggcaccggcagcagcgccggcggcaagcgcagcgaaagaagttcacgtaccggatatcggcggcgatgaagttgaagtcaccgagatcatggttaaagtgggcgacactattgccgctgagcaatccctgatcaccgtagaaggcgacaaagcttctatggaagttccggcgccgttcgcgggtaccgttaaagagatcaaaatcaacaccggcgacaaagtgtccaccggctccctgatcatgatcttcgaagtggcgggcgctgcgcctgcagccgctccggcacaggctgccgctccggctgccgcggcaccagctgcagcggctggcgtgaaagacgttaacgtaccggatatcggcggcgacgaagttgaagttaccgaagtgatggtaaaagttggcgataaagtggctgctgagcagtcactgatcaccgtcgaaggcgacaaagcttctatggaagttccggcgccgttcgcgggtaccgttaaagagatcaaaatcagcaccggcgacaaagtatccaccggctctctgatcatggtcttcgaagtggaaggcgccgcgcctgctgctgctccggctcaggccgcggcaccggcaccggctgctgcacctgcaccggctcagaaagctgccgcgccggctgcgaaagcagaaggtaaaaccgaattcgctgaaaacgaagcttacgttcacgcgactccgctgattcgccgcctggcgcgcgagttcggcgtaaacctggcgaaagtgaaagggaccggccgtaaaggtcgtatcctgcgcgaagacgttcaggcttacgtgaaagaagcggttaaacgcgctgaatccgcaccggctgctgccgcaggcggcggtctgccgggcatgctgccatggccgaaagttgacttcagcaagtttggcgaaatcgaagaagtggaactgggtcgtatccagaaaatctctggcgctaacctgagccgtaactgggtgatgatcccgcacgttacgcacttcgacaaaaccgatatcaccgatctggaagcgttccgcaagcagcagaatgccgaagctgagaagcgcaaactggacgtgaaattcaccccagtggtcttcatcatgaaagccgttgccgctgcgcttgagcagatgccgcgcttcaacagctcgctgtccgaagacggtcagcgcctgacgctgaagaaatacatcaacatcggtgtggcggttgatactccgaacggtctggtggttccggtctttaaagacgtgaacaagaagagcatcaccgagctgtctcgcgagctgaccaccatctcgaagaaagcgcgcgatggcaagctgactgctggcgaaatgcagggcggttgcttcaccatctccagcatcggcggcctgggtactacccacttcgcgccgattgttaacgcgccggaagtggccatcctgggcgtgtctaagtccgcgatggagccggtatggaatggtaaagagttcgttccgcgtctgatgctgccgatctctctgtccttcgaccaccgcgtcatcgacggtgctgatggtgcccgcttcattaccatcattaacaacaccttgagcgacattcgccgcctggtgatgtaa

SEQ ID NO: 87399 - DNA, 2664 bp, Enterobacter aerogenes
atgtcagaacgtttccagaatgacgtggatccgatcgaaactcgcgactggcaacaggcgatcgaatcggtcatccgtgaagaaggtgttgagcgtgctcagtatctgatcgaccagcttctttctgaggcccgcaaaggcggcgtgaaagtagcggccggtgcggcagcgcataattacgtcaacactattgccgttgaagatgaaccggaatacccgggcaatctggagctggaacgccgtattcgttcagcgatccgttggaacgccatcatgaccgttctgcgcgcatcgaagaaagatctggagctgggtggccacatggcatcctaccagtcttccgctaccttctacgaagtttgcttcaaccacttcttccgtgcgcgcactgagaaagacggcggcgatctggtttacttccagggccacatctctccgggcgtatatgcacgtgccttcctggaaggtcgtctgactgaagagcagatgaacaacttccgtcaggaagttcacggtaatggtctgtcctcttatccgcacccgaaactgatgccggaattctggcagttcccgaccgtatcaatgggtctggggccgttgggcgcaatctatcaggctaaattcctgaaatatctggaacaccgtggtctgaaagacacctctgcgcaaaccgtttacgccttcctgggcgatggcgagatggatgagccggaatctaaaggcgctatcaccatcgcgacccgtgaaaaactggataacctggtcttcgtcatcaactgcaacctgcagcgtctggacggcccggtcaccggtaacggtaaaatcattaacgaactggaaggcatcttcggtggtgctggctggaacgttatcaaggttatctggggcggtcgttgggatgagctgctgcgtaaagacaccagcggtaagctgattcagctgatgaacgaaaccgttgacggcgactaccagaccttcaaatccaaagacggcgcctacgttcgtgagcacttcttcggtaaatatccggaaaccgccgcgctggttgccgactggactgacgagcagatctgggccctgaaccgtggcggtcacgatccgaagaaagtctacgctgcactgaaaaaagcgcaggaaaccaaaggccagccgaccgtgattctggcgcataccattaaaggttatggtatgggcgacaccgcggaaggtaaaaacatcgcgcaccaggttaagaaaatgaacatggacggcgttcgctacgtccgcgatcgtttcaacgtgccggtggctgatgccgatatcgaaaaactgccgtacgtgaccttcccggaaggttctgaagagcacacttacctgcacgctcaacgtgaaaagctgaacggctacctgccgactcgtcagccgaaattcactgagaaactggagctgccgaccctggccgacttcagcgcgctgctggaagagcaaaacaaagaaatctctaccactatcgctttcgttcgtgccctgaacgtgatgctgaagaacaagtcgatcaaagatcgtctggtgccgatcatcgccgatgaagcgcgtactttcggtatggaaggtctgttccgtcagatcggtatctacagcccgaacggccagcagtacaccccgcaggaccgtgagcaggttgcatactacaaagaagacgagaaaggccagattctgcaggaaggtattaacgagctgggcgcaggcgcatcctggctggctgctgcgacctcctacagcaccaacgacctgccgatgattccgttctacatctactactcgatgttcggcttccagcgtatcggcgatctgtgctgggcggctggcgatcagcaggctcgcggcttcctgattggcggtacttccggtcgtactacgctgaacggcgaaggtctgcagcacgaagatggtcacagccacattcagtcgctgactatcccgaactgtatctcctacgacccgtcttacgcgtacgaagtcgctgtcatcatgcatgacggtctggtacgtatgtacggcgaagcgcaagagaacgtttactactacatcactacactgaacgaaaactaccacatgccggccatgccggaaggcgccgaggaaggtatccgtaaaggtatctacaaactcgaaaccctcgaaggtagcaaaggtaaagttcagctgctgggctccggttctatcctgcgtcacgttcgtgaagcagcgcagatcctggcgaaagattacggcgtaggttctgacgtgtatagcgtcacctccttcaccgaactggcgcgtgatggccaggattgcgaacgctggaacatgctgcacccgctggaaactccgcgcgtaccgtacatcgctcaggtgatgaacgacgctccggctgtagcatccactgactatatgaaactgttcgccgagcaggttcgtacttacgtaccggctgatgattaccgcgtactgggtaccgatggcttcggtcgttccgacagccgtgaaaacctgcgtcaccacttcgaagtcgatgcttcctacgtggtcgttgcggcgctgggcgaactggctaaacgtggtgaaatcgataagaaagttgtggctgacgccattgctaaattcgacatcgatgcagaaaaagttaacccgcgtctggcgtaa

SEQ ID NO: 87400 - DNA, 780 bp, Enterobacter aerogenes
atggcctacagcaagatccgccaaccaaaactttctgatgtgatagagcagcagctggagtttctgattcttgaggggacgttgcgccccggtgaaaaactcccgcctgaacgcgaactggcaaaacagttcgacgtttcccgtccctcgctccgtgaggcgattcaacgcctcgaagccaagggcctgttgcttcgtcgccagggcggtggaacctttgtacaaagcagcctgtggcagagctttagcgacccgttggtcgagctcctgtccgaccaccctgaatcccaattcgatttgctggaaacccgtcacgcgctggaaggcatcgcggcttattacgcggcgctgcgcagcaatgatgaagatcgcgaccgtattcgcgagctgcatcaagccattgagcgggcccaacagtccggcgatctcgacgccgaatccggcgctgtcgtccagtaccaaatcgccgtcaccgaagcggcgcacaatgtggtgttgctccatctgctaaggtgtatggagccgatgctggcacaaaacgttcgtcagaactttgaattgctgtatgcccgccgggaaatgctcccgttggtcagcaaccatcgtactcgcattttcgaggcgataatggccggggagccggagcaggcgcgtgaggcgtcgcaccgtcacctggcgttcattgaggaaattttgctggatcgtagccgtgaacagagtcgtagagaacgttcactgcgtcgtttacagcaacgaaaggacgagaactccggttcttaa

SEQ ID NO: 87401 - DNA, 1371 bp, Enterobacter aerogenes
atggaaggtcaacagcatggcgatcgactcaagcgcggcttgaagaaccgccatatacagctcattgcgctaggaggcgctattggtacgggcttattcctgggtagtgcgtcagtgattcaatctgcaggtcctggtattattctcggctacgctatcgccgggtttatcgccttcctgatcatgcgtcaactcggcgagatggtcgtcgaagaaccggtggccggttcattcagccattttgcttataaatactggggcggctttgccggctttgcctccggctggaactattgggtgctgtatgtgcttgtcgccatggcggagctgaccgccgtgggcaaatatatccagttctggtggccggaaatccctacctgggcctccgcggcggtcttcttcatcgccattaacgccattaacctgaccaacgtaaaagtgttcggcgaaatggagttctggttcgcgattattaaagtcgtcgcggtagtggccatgattctgttcggcgcctggttgttgttcagcggcaacggcggcccgcaggcgacggtcagtaacctgtgggatcagggcggtttcctgccgcacggcttcaccgggctggtaatgatgatggcgatcattatgttctccttcggcggcctggaactggtgggtatcaccgcggcggaagcggacaacccggaaaagagcatcccgaaagccactaaccaggttatctaccgtatccttattttctatgtaggctccctggccgtgctgctctcactgctgccgtggacgcgcgtcaccgccgataccagcccgttcgtcctgatcttccacgaactcggcgacacgctggtggcaaacgccctcaacatcgtagtgctgaccgccgcgctctcggtttacaacagctgcgtatactgtaacagccgtatgctgttcggcctggcgcagcagggtaatgcgccgaaagcgctgctgaccctcgataaacgcggcgtaccggtcaacaccattatggtatccgccgtagtcaccgcgctgtgcgtgctgatcaactacctggcgccggaatcggcgttcggactgctgatggcgctggttgtctccgcgctagtgattaactgggcgatgattagcctcgcgcacatcaaattccgtcgcgccaagcagcaggaaggcgtgaaaacacgtttcccggcgctgttctacccgttgggtaactgggtatgcctgctgtttatggtcgcggtactggccatcatgctgatgaccccggggatggcgatttcggtgtggctgataccggtatggattgccgttctcggcgttggctatctgtttaaacagaaaagcgctggcgtcgtaaaagcacaataa

SEQ ID NO: 87402 - DNA, 1407 bp, Enterobacter aerogenes
atgacaggcaatacactttcgctgaaagaaaagattggctacgggatgggcgatgccggatgtaacattatctttggcgccatcatgttgttcgttaactatttttatacggatatttttggtcttgcgccggcgctggttggggtgctgctgctttcggtgcgcgtcatcgatgccgtcaccgacccgatcatgggggcgatggccgaccgcactcgtagtaaatatggccgctttcgcccatggctgctgtggatggccttcccctacgctctgttcagcgtgctgatgttcaccaccccggaatggacctacaacagcaaggttatctatgccttcgtcacctacttcctgctgtcgataacctataccgcgataaacatcccctactgctctttgggaacggtgatgacatccgacccgcaagaacgtgtcgcctgccagtcataccgctttgtgctggtcggtatcgcgacgcttctgctctcgctgactctgttgccaatggcggagtggttcggcggcgccgataaagcgaaaggttatcaaatggcgatgaccgtattggcgttcatcggcatgtgtatgtttttgttctgcttcgccaccgtacgcgagcgcatccgtcctgcggtacaaaccaacgacgagctgaaaaaagacctcaaagacgtgtggaaaaacgaccagtgggttcgcattttgctcttaaccctatgtaacgtttgccccggctttatccgcatggccgccaccatgtactacgtcacctgggtgatggggcaaagcacccacttcgccactctgtttatcagccttggcgtggtcggcatgatgatcggcagcatgctggcgaaagtgctgaccgaccgctggtgtaaactgcaggtctttttctggaccaacattgtactggcagtcttctcctgtgcgttctacttctttaatccgcatgccacaacgctgattctggtgctctacttcctgctcaatatcctgcatcaaatcccgtcgccgctgcactggtcgctgatgtccgacgttgatgactacggcgagtggaaaaccggtaaacggatcaccggcatcagcttctccggtaacctgttcttcctgaaagtggggctggcggtcgccggggccatggtgggtttcctgctgtcgtggtacggctacgatgccggcgcgaagcagcaaagcgcctcggcgctaaacggtatcgtactgctgttctctgtgatccccggcgttggctacctgattaccgcaggcgtcgtacgcctgttgaaagttgaccgtgatctgatgcgccaaatccagagcgatctggaaaaacgccgcagtaactacagcgaactgaatgaactccaggaattgaaaaccagtgaacacataaggaaagcctga

SEQ ID NO: 87403 - DNA, 951 bp, Enterobacter aerogenes
atgaacaactggcctaacccctttattgaacaacgcgcggacccttttatcctgcgccatcacgaccactactattttattgcctccgtgccggaatacgatcggctggagatccgccgcgccgccacgctggaaggcctgcgtgaagccgaaccggtgaccgtctggcgcaagccgcaaaacgggccgatgagccagctgatttgggcgccagagctccaccatatcgacggcaagtggtatatctatttcgccgccgccccgacccatgacctcgacgcccaggggatgttccagcaccggatgttcgcccttgagtgtaccgacagcgatccgctcagcgaccgctggcaggaaaaagggcaaattatcacccccttcgataccttcgccctcgatgccaccaccttctgccatcaagggaaacgctggtatttatgggcgcagaaagacccgcagatcgccggcaataccaatctctatctggcggagctggaaaacccgtggacgctaaaaggcgcgccgatcatgctgagtaagccggagtttgcctgggaatgccggggatttatggtcaatgaggggcctgcggtgctggtacacggcgataagctgtttatcagctattccgccagcgcgaccgatgaaaactactgcatgggattattatggatagatattcaggccgatccgctacagccggctaactggcacaaatccccgcagccggtatttcgcaccagctacgaaaaccggcagtatggtcctggccacaatagctttacgcaaacgccggagggggaagatgtgctggtgtaccacgcgcgcaactacaccgaaatcgaaggtgacccgctgtacgatcctaaccgtcacacccggctgaagttagtgcgctggcaagaaaacgggatgcccgacttcggtatcccgcccgctgatacgctgtag

SEQ ID NO: 87404 - DNA, 855 bp, Enterobacter aerogenes
atgacgttgtttactacgctgctggttctcatcgccgagcgtctgttcaaacttggcgagcactggcagctcgatcatcgcctggaggtactgttccgccgcgtgaggcatttctcgctgttcggcaccgtgctgatgaccgtcgtcgcggtggcggtggtatacgttattcaacgcctgctacaggggcagctatttaacgtaccgctgctggtgttctggattttgctcggcctgctgtgtatcggcgcgggcaaggtgcgcctgcattatcatgcctatctgaaggcggcggcgaacaacgatagccacgcctgcgattctatggccagcgagctaacgcttattcacggcgtgccgccgggctgcgatcgtcaggagtatctccgcgagctgcaaaacgcactgctatggatcaactatcgctactatctcgcgccgctgttctggctggtggtcggcggcccgtgggggctgttgacgctaaccgcttatagcgtcctgcgcgcctggcagacctggcttgcgcgctatcagacgccgcgccatcgtttacagtccggcattgacggtattctgcatattgtcgattgggtgccggtgcgcctggttggcgtggtatacgcgctgctggggcacggcgaaaaagcgctgccggcgtggtttgcctcgctaggcgatcgtcactcttcacagtatcaggtattaactcgtctggcccagttctcgctggcccgcgagccgcacgtcgatgcggttgagacgccaaaagcggcggtttccatggcgaagaaaacctcgctggtggtggtggtgattatggcgctgctgaccatctacggaacgttgatttaa

SEQ ID NO: 87405 - DNA, 564 bp, Enterobacter aerogenes
atgcagttgaatggcggatggctggtgggcgcgcgtcgggtgccttcgccgcatcacgattgccgcccggacgatgaaaacccttctttactggtggtacataatatcagcctgccgcctggggagtttggcggcccgtggattgacgcgctatttaccggtacattggatgccgacgcgcatccttacttcgccgggattgctcatctgcgcgtttcggcgcattgtctgattcgccgcgatggcgagatagtccagtatgtaccctttgataagcgcgcatggcatgcgggcgtctccagctatcacggccgcgagcgctgcaatgatttttcgatcggtattgagctggaagggacggatactcaggcctacaccgaggcgcagtaccagcagttagtggtgattacccaggcgctcatccagcgttatcctggtattgctgataatattaccggccattgcgatatcgcgccgatacgtaaaacggatcccggcccggcctttgattgggcaaaataccgcggtatgttggccgcatcgtcacataaggagataccatga

SEQ ID NO: 87406 - DNA, 894 bp, Enterobacter aerogenes
atgacgcctcgtcgcgacagccccgaccgccgccgtgacgcgctgctggaacgtattaatctcgatattaccgacgccgtcgcgcaatcattacgcgaagatctgggcggcgaagttgacgctaacaacgatatcagcgcgcaattattgccatcggacgcgcgctctcacgccgtcgttatcacccgcgaagatggggtattctgcggtaagcgttgggtagaagaagttttcattcagcttgccggcgacgatgtcagcatcacctggcacgtggctgacggcgatacggttaaagccgatcagccgctgttcgaactgtatggcccgtcgcgggtgctgctgaccggcgagcgcaccgcgctaaatttcgtgcagaccctctctggggtagcaagcgaagtgcgccgctacgtcgacctgctcaaaggcaccaaaacgcaactgcttgatacgcgtaaaacgttaccaggcctgcgcaccgcgttgaagtatgcggtgctgtgcggcggcggcgcgaaccaccgtctgggcctcttcgacgctttcctgatcaaagaaaaccatatcatcgcctctggttcggtacgtcaggcggtggaaaaagccttctggctgcacccggacgtaccggtggaagtcgaagtcgaaacgctggatgagctggatgaagcgttaaaagccggcgctgatatcatcatgctcgacaatttcaccaccgacctgatgcgtgaggcggtgaaacgtaccaacggccaggcggcgctggaagtctccggcaacgttaccttcgataccattcgcgaattcgcggaaaccggcgttgactatatttccgtcggcgcactcactaagcacgtgcgggcgctcgacctgtccatgcgttttcgttaa

SEQ ID NO: 87407 - DNA, 432 bp, Enterobacter aerogenes
atggataagcaacgtggttttaccctgatcgaattaatggtggttatcggcattatcgccatcctcagcgccatcggcattcccgcctaccagaactacctacgcaaagccgccctcaccgatatgctgcaaacctttgtgccctaccgtacggcaatagaactgtgcgcgttggaccacggcggactaaccagctgcgatggcggcagcaacggtattccctcgccgtcgactacccgctatgtatcggcgatgagcgtcgcccagggcgtggtcaccctgaccgggcaggagagtctgaacggactggccgtcaccctgaccccttcctgggataatgccaacggcatcaccggctggcagcgcgtctgcgccatcggcgatgacagcgcgctaaagcaggcctgcgaagatgtcttccgctttaactga

SEQ ID NO: 87408 - DNA, 1386 bp, Enterobacter aerogenes
atgaaaagcgaacagctactctcactctgtcagcgccatcacgccattttgttgaaaagcgatgagcagaccatcgttatcgccgtcgtggatacgccggcgccagaactgatggaagcgctgcgcttcgctacccaaaagcgtatcgatattgaatgctggagccaggatcgaatggataagcatcagcacgaggcgcaacagtcagcatcagagtccgccacgggtaacacccggggcgtaaccgatctgctgaatcaaattctggagcaggcgctgcgccagcgtgcctctgatattcatattgagccggcggaaaaacagctgcggatacgcctgcgtgtcgatggcgtgttgcatgccctgccgttacttgaggccgcgctggctgcgccaatggccgcacggcttaaggtgctgggcaacctcgatattgccgagcatcgtctaccgcaggatggacagttcactctgacgctggccgggcgcacggtctcctttcgcattgcaaccctcccctgccgcggcggggagaaaatcgtcctgcgtttattacaccaggtggagcaggcgctggatctggaagctctggggctctcctctcgtcagcttgcttttttccgcgccgcattgaaccagccgcaggggttgctactggttaccgggccgacaggtagcggcaaaaccgtcaccctgtatagcgcgctgcaggcgcggaatcgcgaagaggttaatatctgcagcgtggaagatccgctggagatcccgctaatcggtctcaaccaaacgcagatcaatccgcgatccggcctcacctttcagagcgtcctgcgggcgctactgcgtcaggatccggacatcgtcatggtcggagaaattcgcgatgccgagaccgcggaaatcgccattaaggccgcacaaaccgggcatctggtgctctctacattacatactaactccaccagcgaaacgttgattcgcctgcaacaaatgggcgtggcgcgctggatgatctcctcagcgctttcgctggtggtcgcccagcggctggtgcgaaaactgtgtccccactgccggcgcgatggcggccgccctaccgaggtgccgcacagtctttggccacgcccattgcccggctggttggcagctggctgtcctcggtgctaccacggttactacggccgccaggccttattcgaactgctgccggtggatagcgcgctacgcgaggccattaatcgcgatctcagcgcggcggaaatcgaaacgctagcccgcgaagctggcatgatgacgctgtttgaaagcggctgtgaagcggtggagcgcgggttgaccagcctggaagaagtcgtgcgcgttctggggatcccacatggcgactaa

SEQ ID NO: 87409 - DNA, 1206 bp, Enterobacter aerogenes
atggcgactaagcagctttggcagtggcgcgggatggataagcaaggaatgccgtgcgaaggagcactctggcaagagacgcgcgcgcaggcgctggcatcactggaacagcagcggatactgctgctggcgctgcggcgccaaacggtacagggttcactgtggcgtccgcgctatagctgcgagattatccgccagcttgccacgctgctgcaggctggcttaccgctggccgaagggctggagctgctggcccaacaacagccgcacaaacagtggcaggcgctgctgcgaatgctggcgcaggaactggcgcagggtgtttctctctccagcgccctgacgcaatggccgcgggtctttccgccgctctatctggcgatgatccgcaccggcgagctcaccggtaagctggaacgctgctgctttcagctcgcgctacagcagcaggaacagcagcgtctgacagaaaaggtaaagaaggcgctgcgctacccaatggtgattctgactttggcgctggcggtggtcatagcaatgttgtttttcgtgctgccggaattcaccgctatctatcggaccttcaatacgccgctccccttgctgacgcaaatggtcattcacatcggcgatgcgttggcccgctactggccgttgctgccgccgctttttgctattccgctatctctcaaccgactggcccggcatcggccacgctggctgctgttaaggcaaaagttactacacgcgattccgattgccggtcgcctaatcaacggccaacagctaagccagatatttaccattctttcactgacccaaagcgcgggtataagctttgtccaggggctggagagcgtggaggaaaccatggggtgcccgctgtggcggcagcggattgcacaggcgcgcgcagatatcatccacggccaaccaatctggcaggcgctaacgaattgcggcggattcaccttactgtgtctgcagctcattcgtaccggcgaggcatcgggagcgctggatacgatgctcgataacctggcgcgccatcatagcgagcaaactcatcaacaggcggataatctggcgacgctgctggagccattactgctgggggtgaccggaacgatcgtcggcgtgctggtggtggcaatgtatctccccatttttcatttgggagacgcactcggcgggatgggaagttaa

SEQ ID NO: 87410 - DNA, 1044 bp, Enterobacter aerogenes
atgcgtattgaagaagatctgaagctaggttttaaagacgttcttatccgcccgaagcgctctaccctcaaaagccgttctgatgttcagctggaacgtgaattcacctttaagcattcaggccagacctggtccggcgtaccgattatcgctgctaacatggataccgtcggcaccttcagcatggcgaaagccctgtccgcttttggaattctgaccgccgtgcacaagcactacagcgttgaagaatggcaggcgtttgtgcagagcgaatccgcagaagtgctgcagcatgtgatggtttccaccggcacctctgatgcggactttgaaaaaactcagcagatcctgacccagaatccacagctgaactttgtgtgcatcgacgtggctaacggctactctgagcactttgttcagttcgtggcgaaagcccgcgccgcttggccgcaaaaaaccattattgccggcaacgtggtgaccggtgagatgtgtgaagaactgattctttccggcgctgatatcgttaaagtcggcatcggtcctggctccgtctgtactacccgcgtgaaaaccggcgttggctacccgcagctgtctgcggtgattgaatgcgccgatgccgcgcacggtctcggcggccagatcatcagcgacggcggctgcaccatgccgggcgatgtcgcgaaagcttttggcggcggcgccgatttcgtgatgctcggcgggatgctggcgggccacgaagagagcggcggtaccgtggttgaagagaacggtgaaaaattcatgctgttttacggtatgagctctgaatcggcgatgactcgccacgtcggcggcgtcgcgaagtaccgcgcggcggaaggcaaaaccgttaagctgccgctgcgcggcccggttgataataccgcgcgcgacatcctcggcggcctgcgttcagcatgcacctatgtcggcgcttcccgcctgaaagagctgaccaaacgcacaacctttatccgcgtccaggaacaagagaaccgcgtgttcaacagcctgtaa

SEQ ID NO: 87411 - DNA, 621 bp, Enterobacter aerogenes
atggggtatacggtagcgttaacaggcggcatcggtagcggtaaaagtaccgttgccgacgaatttgctcacctgggcgtaaccgttatcgacgccgatattattgcgcgccaggttgtagaacccggtacacctgccctgctcgccatcgccgaaagatttggtccacagatgatcaacgacgatggctgcctgaatcgccgccgcttgcgcgagcgtatttttgctcatagcgaggacaaggcctggcttaacgcgctgctgcatccgctgattcagcaagaaacgcgctgtcagatgcaggtctcaacctcgccttatctcctctgggtcgtacccttgctggtcgaaaaccgcctgaccgataaagccgatcgcgtgctggttgtcgatgtgccgaaagagacgcaaatcgagcgcaccatgcgccgcgatggggtcagtcgcgaacacgctgaacatattcttgccgcccaggcgacgcgcgaacagcgtcttgccgcagcggatgatgttattgaaaacatgggctccgcggatgccgtcgcatcccacgtcgcccgcctgcacgaaaagtatttaatgctggcatcgcaggccgcctcacaggaaaaatcgtaa

SEQ ID NO: 87412 - DNA, 744 bp, Enterobacter aerogenes
atgcatacccctgttctcttcgaacatccgctcaatgagaaaatgcgcacctggctgcgcattgaatttttatttcagcagctctcttctcgccccaccatcgccagctacgcggacgccctccattttttccgcaataccggcgatctcctggacgtgctggaacgcggtgaagtgcgaaccgatctgctgaaagagctggagcgacaacagcggaaattacaaacctgggccgaagtgcccggtgtcgaccagcagcgtattgatgctctgcgtcagcagcttaaacagtccggcagcaccttgatttccgctccgcgcattggccagtttcttcgtgaagatcgactgattggcctggtgcgccagcgtctgagcatccccggcggctgttgcggctttgatttaccaacgctacatatctggctgcatatgccgcaggaatatcgtgatgagcaggtggcgagatggttagcgagcctgacgccgctgatgcagtcgctggagctgatccttgatttgattcgtaactctgcgcctttccgtaagcaaaccagcctcaatggcttttatcaggataacggcgacgatgccgatctgctgcgcctgcgcctggatctcgcaagccagctgtatccgcaaatttccggccataaaagccgcttcgctatccgtttcctgccgctggacagcgagcatggcatcgtgccggaacgctttgattttgaactggcttgttgctaa

SEQ ID NO: 87413 - DNA, 195 bp, Enterobacter aerogenes
atgtcagaagagactatcgttaactgcccaacctgcggtaaaaacgtcgtctggagcgaacaaagcccgtttcgcccgttttgctcgaagcgttgccagcttatcgatcttggcgagtgggcggcggaagagaaacgtatacccagttccggagacttgtctgatagcgatgactggagcgagccgcagcagtaa

SEQ ID NO: 87414 - DNA, 393 bp, Enterobacter aerogenes
atgaaaaaactgcaaatcgccgtcgggataattcgcaatccgcaaggcgaaatttttattacccagcgtgccgcagacgcgcatatggctaataaactggaattccccggcggcaaaatagaatcaggtgagacgccggaacaggcgctggtacgtgaactgcaggaagaggtcgggattacggtgacgacgtccacgttgttcgacaaactggattatcagttccctgaccgccatatcacgctatggttcttcctggtggaaaactggcaaggcgagccgtggggcaaagaagggcaaccggggcagtggatggcgcagcgggcgctggatccgcaggcatttccgccggcgaacgagccgattatcaataaacttattacgcttgcctga

SEQ ID NO: 87415 - DNA, 2706 bp, Enterobacter aerogenes
atgctaattaaaatgttaactaaggtgttcggtagccgtaacgaccgtacgctgcgtcgtatgcgcaaagtcgtcaatatcatcaacggtatggaaccggcgatggaaaagctctctgatgatgagctgaaagccaaaaccggagaattccgcgcgcgtctggagaaaggcgaaagcctggaaagcctgatcccggaagcttttgccgtggtgcgcgaagcgagtaaacgcgtcttcggtatgcgtcacttcgacgtgcagctgctgggcggtatggtattgaacgaccgctgcatcgcggaaatgcgtactggtgaaggtaaaaccctgaccgcgaccctgccggcctaccttaacgcgctgaccggtaaaggcgttcacgtcgttaccgtcaacgactatctggcgcagcgtgacgctgaaaacaaccgtccgctgttcgaattcctcggtatgagcgtgggcatcaatatgtccggcctgcctgcgccggcgaagcgtgaagcctacgcggccgacatcacctacggtaccaacaacgaatacggcttcgattatctgcgcgataacatggcgttcagtccggaagagcgcgtacagcgtaaactgcactatgcgctggtggatgaggtggactccatcctgatcgacgaagcgcgtaccccgcttatcatttccggcccggctgaagacagctccgaaatgtatcgcaaggtgaacaaaattattccgcacctgatccgccaggaaaaggaagactccgacacctttaccggtgaaggccacttctccgtggacgagaaagctcgccaggttaacctgaccgaacgcggtctggtactgatcgaagagctgctggtgcaggaaggcatcatggaggaaggcgaatcgctgtattctccgaccaacattatgctgatgcaccatgttaccgccgcgctgcgcgcccacgcgctgtttacccgcgacgttgactacatcgtgaaagatggcgaagtcatcatcgtcgatgaacacaccggccgtacgatgcaggggcgtcgctggtccgatggcctgcaccaggcggtagaagccaaagaaggcgtggagatccagaacgagaaccagactctggcatccatcaccttccagaactacttccgtctgtacgagaagctggcggggatgaccggtaccgcggataccgaagcctttgaattcagctcaatctataaactggataccgttgtcgtcccgactaaccgtccgatgatccgtaaggatatggcggatctggtctatatgaccgaagcggaaaaaattcaggcgattatcgaagatattaaagatcgtaccgccgccggtcagccggtgctggtcggtactatctcaatcgaaaaatctgaagtggtttcccgcgaactgacgaaagccggcatcaagcacaacgtcctgaacgccaagttccacgccagcgaagcggatatcgtcgcccaggcgggttatccggctgcggtcaccatcgctaccaacatggcgggtcgtggtaccgatattatgctcggcggtagctggcaggcagaagtcgccgcgctggaaaatccaacgccggagcagattgaaaaaatcaaagctgactggcaggtgcgccacgatgcggtactggccgcaggcggtctgcacatcattggtaccgagcgtcatgaatcccgccgtatcgataaccagctgcgtggccgtgctggccgtcagggtgatgccggttcttcccgcttctacctgtcgatggaagatgccctgatgcgtatcttcgcctccgatcgcgtatccggcatgatgcgtaaactggggatgaagccgggcgaagctatcgagcacccgtgggtgaccaaagcgattgctaacgctcagcgtaaagtggaaagccgcaacttcgatatccgtaaacagctgctggaatatgatgacgtcgccaacgatcagcgtcgcgctatttacacccagcgtaacgagctgctggatatctccgacgtgagcgaaaccatcaacagcatccgcgaagatgtcttcaaagccactatcgatgcgcacattccgccgcagtcgctggaagagatgtgggatattgaaggcctgcaggaacgtctgaaaaacgacttcgaccttgatctgccaatcaaagagtggctggataaagagccggagctgcacgaagagaccctgcgcgaacgtattctgcagagcgcggtagaaacctaccagcgtaaagaagaagtggtcggcgccgaaatgatgcgtcacttcgagaaaggcgtcatgctgcaaacgctggattccctgtggaaagagcacctggcggcgatggactacctgcgccagggtattcatctgcgcggctatgcgcagaaagatccgaagcaggagtacaagcgcgaatccttctcaatgttcgcagccatgctcgaatcgctgaagtatgaagtcatcagcaccctgagcaaggtacaggtgcggatgccggaagaagtcgaagagatggaacagcaacgtcgcgaagaggcagagcgtctcgcgcagatgcagcagctgagccaccaggatgacgatactctggctgccgcttcgctggcggaacagaccggcgaccgtaaagttgggcgtaacgatccgtgcccgtgcggttccggtaaaaaatataaacagtgccacggccgtctgagctaa

SEQ ID NO: 87416 - DNA, 498 bp, Enterobacter aerogenes
gtgagtggattgctgacgcgttggcgacagtttggcagacggtatttttggccgcatctcctgttggggatggtcgcggctagcctcggcctgcctgcgcttaacaacagccacgaaaccactacgccggcgaaagccacggccagcaaccataacccgaataaagttaacttctcccagctggcgctgctggaggccaaccgtcggccgaactttaccgtcgattactggcatcagcatgcgattcgcaccgtcattcgccatctgtcgttcgcgatggcgccgcaggctttgccggtggcggaagaatcgtcgccgcttcaggctcagcatctggccctgctcgatacgctcagcgcgctgctgacccaggacagcagaccgccggtggttatccgccaggcagcttatatcccttcctcttattctgtcttccgcgtcagcgcctggataagccaggtagcggggatccgcgcagggcctcaacgtctcagctga

SEQ ID NO: 87417 - DNA, 918 bp, Enterobacter aerogenes
atgatcaaacaaaggactcttaaacgtattgttcaggcgactggtgtcggtttgcataccggcaagaaagtcacgctgactttacgccctgcgccggcaaataccggggtcatctatcgtcgcaccgacttgaatccaccggttgattttccggctgatgccaaatctgtgcgtgataccatgctctgtacttgcctggtgaacgagcatgacgtgcggatttctacagtcgagcacttaaatgccgcactggctggcctgggcatcgacaacattattgttgaagtcgatgcgccggaaatcccgattatggacggtagcgccgctccgttcgtttatctgttgctggatgccggcatcgatgaactgaacagcgccaagaaatttgtgcgtatcaaagagacggttcgcgttgaagatggcgacaaatgggctgagtttaagccgtacaatggtttttcgttggactttaccatcgactttaaccatccggcgattgactccagcacccaacgctatgcgctgaacttctcggccgatgcgttcatgcgtcagattagccgtgctcgtactttcggtttcatgcgtgatatcgaatatctgcagtcccgtggcctgtgcctgggcggcagcttcgattgtgccatcgttgttgacgattatcgcgtactgaacgaagacggtctgcgctttgaagatgagtttgtacgccacaaaatgctggatgcgatcggtgacctgtttatgtgtggtcacaacattatcggcgcattcacggcgttcaaatccggtcacgcgttaaataacaaactgctgcaggctgttctggcaaaacaggaagcctgggagtatgtgaccttcgaagacgacgcaaaactgccgctggcattccgcgcaccgtcaatggttctggcgtaa

SEQ ID NO: 87418 - DNA, 1152 bp, Enterobacter aerogenes
atgtttgaacctatggaactgaccaacgacgcggtgattaaagtcatcggcgtcggtggcggcggcggtaatgccgttgaacacatggtgcgcgagcgcattgagggtgttgaattcttcgcggtgaacaccgatgcgcaggcgctgcgtaaaacggctgttggccagactatccagatcggtagcggtattaccaaaggtctgggtgcaggcgcgaacccggaagttggccgtaatgcggctgacgaagaccgtgaagcgctgcgcgctgcgcttgatggcgcggacatggtctttatcgcggcgggtatgggcggcggtaccggtaccggtgcggcgccagtggtcgcggaagtggcgaaggatctgggtatcctgaccgttgcggtcgtcactaagccatttaatttcgaaggcaagaagcgcatggcgtttgctgagcaggggatcaccgagctgtccaagcacgttgactcactgatcaccatcccgaacgacaagctgctgaaagtactgggtcgcggtatctctctgctcgacgcttttggcgcggcaaacgacgtactgaaaggcgcggtgcagggtattgccgaactgattacccgtccgggtctgatgaacgtcgacttcgcggacgttcgtaccgtgatgtcggaaatgggctacgcaatgatgggctccggcgtggcgagcggtgaagaccgtgcggaagaagcggctgaaatggctatctcttctccgctgctggaagatatcgatctgtccggcgcgcgtggcgtactggtcaacatcaccgctggcttcgacctgcgtctggatgagttcgagaccgtcggtaacactatccgcgcctttgcttcggataacgcgaccgtggttatcggtacctctctggacccggatatgaacgatgaactgcgtgtaaccgttgttgccaccggtatcggtatggacaagcgtccggaaattaccctggtgaccaacaaacaggtacagcagccggtaatggatcgctaccagcagcacggtatggctccattaactcaagagcagaaaccggtcgcgaaagtggtgaacgacaatacgccgcaaaccgcgaaagagccggattatctggatattccagctttcctgcgtaagcaagccgattaa

SEQ ID NO: 87419 - DNA, 1263 bp, Enterobacter aerogenes
atgatcaaggcgacggacagaaaactggtagttggactggagattggcaccgcgaaggttgccgctttagtaggggaagttctgcccgacggtatgattaatatcattggcgtgggcagttgcccatcgcgcggcatggataaaggcggggtgaatgacctcgagtcggtagtgaaatgcgtacagcgcgctatcgaccaggctgaactgatggccgattgccagatctcatcagtgtatctggcgctttcaggtaagcatattagctgtcaaaatgagattggcatggtgcctatctccgaagaagaggtgacgcaggatgacgtggaaaacgtcgttcataccgcgaaatcggtacgcgtacgcgacgaacatcgcgtactgcacgtcatcccgcaggaatacgccatcgactaccaggaaggtattaaaaacccggtagggttatccggcgtgcgtatgcaggcgaaggtacatctgattacctgccataacgatatggcgaaaaacattgttaaagcggttgaacgttgtggtctgaaagttgaccaacttattttcgccggtttagcggccagttattccgtattaacggaagacgaacgtgagctgggtgtctgcgtagtggacatcggcggtggtacaatggatatcgccgtgtataccggcggcgcgctgcgtcacaccaaagtgatcccttacgcgggcaacgtggtgaccagcgacatcgcctatgccttcggtacgccgccgagcgacgccgaagccatcaaggttcgtcacggttgcgcattaggttcaatcgtcggtaaagacgaaaacgtggaagtaccgagcgtgggcggacgtccgccgcgtagcctgcagcgtcagacgctggcggaggtgattgaaccgcgttataccgaactgctcaatctggttaatgaagaaatcctgcagctgcaggaacagctccgtcagcaaggggtcaaacaccatctggcggcggggattgttttaaccggcggcgccgcgcaaatcgaaggcctggcggcctgcgcgcagcgcgtgttccatacgcaggtacgcattggcgcgccgctgaacattaccggtttaacggattacgctcaggagccgtattattcgacggcggttgggctgctgcactacggaaaagagtcacatctcagtggtgaagcagaagtcgaaaaacgcgtgacggcgtcagtgggctcgtggattaagcgactcaacagctggctgcgaaaagagttttaa

SEQ ID NO: 87420 - DNA, 834 bp, Enterobacter aerogenes
atgtcgcaggcggcgctgaatacgcggaaccaggaagaagaatcgattgcttcttcgcgtcggaataatggaacccggctggcagggatcgttttcctgctggcggtgttgtgtaccgtgttggtcagcggatggatggttcttggttggatggaagatgcgcagcgtctgccgttgtcgaaaatggtcgtcaccggcgaacgtcactacacgcgtaacgatgatatccgtcaggctattctggcgttgggctcgccgggcacctttatgactcaggatgtcaacatcatccagagccaaattgagcgcctgccgtggattaaacaggcgagcgtaagaaaacaatggcccgatgaattgaagattcatctggttgaatatgtgccgattgcgcgctggaatgatcaacatatggtagacgtcgaaggaaattctttcagcgtgccggcggatcgtaccagcaaacagaacttaccgatgttatacggcccggaaggcagcgaaaatgaagtgctgcagggataccgcgacatgggacaggtgctggcaaagaataagttcacgttgaaagtggcggcaatgaccgcgcgtcgctcctggcagttgacgcttaataacgatattaagctcaaccttggccgcggcgacaccatgaaacggcttcagcgctttatggaactctacccggttcttcagcagcaggcacagaccgacggcaaacggataagctacgttgatttgcgctatgactcgggtgcggcggtaggttgggtacctgctcccgtagaggaaaataatcaacaacagaatcaggcacaggcagaacaacgatga

SEQ ID NO: 87421 - DNA, 921 bp, Enterobacter aerogenes
atggctgataaaatcgcggttctcttcggcggaacctccgctgaacgtgaagtctcgctgaattcaggcgctgcggtgttggccgggctgcgtgaaggcggggtggatgctcacccggtcgatccgcgcgacgttgatatcacccagttgaagaacatgggctttaagaaagcgtttattgccctgcacgggcgcggcggcgaagatggcacgctgcaaggccttcttgagctcattcaactgccgtacaccggcagcggcgtaatggcttccgctatttctatggataagctgcgcagtaaattactgtggcagggagcgggattaccggtcgcgccgtgggttgcattgacccgcgcgcagttcaacgcaggactttctgctggcgtttctgagcagattgcggcgctggggctgccggttatcatcaagccgagccgcgaagggtccagcgtcggcatgtcgaaagttagcgaaagttgtgcaatgcaggatgcattggcgctggcttttcagcatgatgatgaagttctgattgagaaatggctcagtggcccggaatttaccgtcgctatcgtcggtgaagaaattttaccgtcaattcgtatccaggcggctggaaccttctatgattatgaggcgaagtatctctctgatgagacgcaatatttctgccctggttttgaggaacccgcccgcgagtcagaaatccagagcctggtgcttaaagcctggaatgttctgggttgcaaaggatggggacgtattgatgtgatgctggacagcgatggccagttttatctgctggaagcgaacacctcaccggggatgaccagccatagtctggtgccgatggcggcccgtcaggcggggatgagcttctcgcagcttgttgtacgaattctggacctggcggggtga

SEQ ID NO: 87422 - DNA, 1476 bp, Enterobacter aerogenes
atgaatacacaagatttggcaaaactgcgttccatagtgcccgagatgcgtcgcgtccggcacattcactttgtcggcatcggcggtgccggtatgggcggtattgccgaagtgttggcgaatgaaggctaccagattagcggctccgatctcgcgccgaatccggtaactcagcaattgtcgcagcttggcgccaccatttatttcaaccatcgcccggaaaacgtgcgcgatgccagcgttgtcgtggtgtccagcgcgatctccgcggataacccggaaatcgtcgccgcgcacgaagcgcgcattccggtaatccgccgcgcggaaatgctggcggaactcatgcgtttccgtcacgggattgcgattgccggtacgcacggcaaaaccacgaccaccgcgatggtatccagcatttacgccgaagccggcctcgatccgaccttcgtcaacggtgggctggtgaaggcggcgggcgtacatgcccgtcttggccatagccgctatctgattgcggaagcggatgagagcgatgcgtcgttcctgcatctgcagccgatggtcgccattgtgaccaacatcgaagctgaccatatggatacctatcatggcgacttcgagaacctgaagcagacctttattaacttcctgcacaacctgccgttctacgggcgcgcggtgatgtgcgtggatgacccggtgattcgtgaactgctgccgcgcgtcggccgccaaatcaccacctatggttttagcgatgacgccgacgtacgcattgaagagtatcgtcaggtgggcgcgcagggccatttccgcctggtacgccaggataaagaggtcatgcaggtgacgctgaacgcgccgggccgccacaacgcgctcaacgctgccgcggccgttgccgtcgcgacggaagagggcattgaagacgaggcgattctgcgcgcgctggaaagtttccagggcaccggccgccgtttcgacttccttggcgaatatccgctggcggaagtcaacggcaagagcggtagcgcgatgctaattgacgattacggccatcatccgacggaagttgacgccactatcaaagctgcgcgtgccggctggccggataaaaatctggtgatggtattccagccgcaccgttatacccgtactcgcgatctgtacgatgatttcgccaacgtgctgacccaggttgatgcgctgctgatgctggatgtgtatccggcgggcgaagcgccgatcccaggcgccgatagccgctcactgtgccgcacgatccgcggtcgcggcaaagttgacccgattctggtttccgatccggcgcaggccgcggagatgctggcatcagtattgaccggcgacgatctggtgctggtgcagggcgccggcaacataggaaaaatcgcacgtcacctggctgaaatcaaactggtaccgcaaaaaacggaggaggaccgacatggctga

SEQ ID NO: 87423 - DNA, 1047 bp, Enterobacter aerogenes
atggtgatggcgggcggcactggcggacacgtgttcccggggctggcggtcgcgcaccatttaatggaccagggctggcaggttcgctggctgggcaccgccgatcgtatggaagcggatttagtgccgaaacacggcattgatatcgattttatccgcatctccggcctgcgtggcaaagggctaaaagcgcaactgttagcgccggtgcggatcttcaacgcctggcggcaggcgcgggcgatcatgaagcgtttccagccggatgtggtgctgggcatgggcggttatgtttccgggcctggcggtctggcggcatggtcgctcgggatccctgtggtgctgcatgaacaaaacggcattgcaggcctgaccaataaatggctggcgaagattgcgaagaaagtgatgcaggcgtttcccggcgccttcccgcatgcagatgtcgtcgggaatccggtgcgtactgacgttctcgcgctaccgctgccgggacagcgtctggtggggcggcaggggccgattcgcgtgctggtggttggcggctcccaaggcgcgcgcgtactgaaccagactatgccgcaggtggccgcgaagcttggcgatgcggtgactatctggcatcagagcgggaaaggcggcatggataccgtgcgccaggcgtacgccgccgccggtcagccgcagcataaagtcactgagtttattgatgatatggcggcagcctatgcctgggccgatgtagttgtttgtcgttccggcgcgctgacggtcagcgaaatcgccgccgcaggtttaccggcattgttcgtcccgttccagcacaaagatcgtcagcagtactggaatgcgctgccgctggaaaaagccggcgcggcgaaaattctcgaacaacccgagttcacggcggatgctgtggcggccaccctggccggttgggatcgggaaaccctgatggatatggcggaacgagcgcgtggcgcttcgattccggatgctaccgagcgggtagcggaagaggtcagcgccgtagctttggcgcgctaa

SEQ ID NO: 87424 - DNA, 1275 bp, Enterobacter aerogenes
atgcgtttctctctcccacgcctgaaaatgccacagctgggcctgccccggttgaagctgccgcgactgccgggaatgtttatttttgcctggctgttcgccgcgctgaaaggttgggtgatgggctcgcgcccgaaagataacgatagcctggtcatgtatgaccggatgctgctgtggctgaccttcggcctggcggcgatcggttttatcatggtgacctcggcatcaatgccggtcggacagcgtctggcgaacgatccgttcctgtttgctaagcgtgatggtctgtacattgtgctggccttcgcgctggcgatgattacgctccgtctgccgatggagttctggcagcgccacagtaccgcgatgctgatcgcctcgattgtgatgctgctgatcgtactggtggtggggagttcggttaacggcgcctcgcgttggattgcgctcgggccgctgcgtattcagccggcggagtttaccaagctatcgctgttttgctacatcgccaactatctggtgcgtaaagcggatgaggtgcgtaacaacctgcgcggcttcttaaaaccgatgggcgtgattttcgtactggcgattctgctgctggcgcagcctgacctcggtacggttgtcgtactgttcgtgaccacgctggcgatgttgttcctggccggcgccaagctctggcagtttatcgccattatcggcatggggatctcggcggtggtgctgctgatcctcgccgaaccgtatcgtattcgccgcgtcacttccttctggaacccgtgggaagacccgtttggcagcggctatcagctgacccaatcgctgatggcctttggccgcggcgagatgtgggggcagggcctcggcaactcggtgcagaaactggagtatttaccggaagcgcacaccgacttcatcttcgccattatcggcgaagaactcggttatatcggtgtggtactcgcgcttttaatggtattcttcgtcgcctttcgcgccatgtcgattggtcgcaaagcgctggagattgaccaccgcttctccggcttcctggcctgtgcaatcggcgtgtggtttagcttccaggcgttggttaacgtcggggcggcggcggggatgctgccgaccaaaggtctgaccctgccattgattagttatggtggttccagtctgctgattatgtcgacggccattatgtttttattgcgaattgattatgaaacgcgcctcgagaaagcgcaggcgtttacacggggtgttcgatga

SEQ ID NO: 87425 - DNA, 1317 bp, Enterobacter aerogenes
atggcagattatcagggtaaaaaagtcgtcattattgggctgggcatgaccggcctgtcatgcgtggactttttcatggcgcgcggcgtaaccccgcgcgtgatggatacccgcgtcgccccagccgggcttgataagctgccggaagccgttgagcgccacgtgggcggtcttaacgacgactggctgctggcggcggatctgattgtcgcaagtccggggattgcccttgcgcacccttcactgagcgccgcggccgacgctggcgtggaaatcgtcggcgatatcgagctgttttgccgcgaggcgcaggcgccgattatcgccattaccggctctaacggaaaaagcaccgtcactaccctggtgggcgagatggcgaaggcggcgggcgtgaacgtcggcgttggcggcaatatcggcctgccggcgctgatgctgctggatccggcgcgcgaactgtacgtgcttgaactttccagcttccagctggagacgacctccagcctgaaagccgtcgcggcaaccatcctcaacgtgactgaggaccatatggaccgctatccgctggggctgcagcagtatcgcgcggcgaaactgcgggtctatgaaaatgctaaaacctgcgtggtgaatgccgatgacgcgctgaccatgccggtacgcggcgctgacgaacgctgcgtcagcttcggcgtcgatgttggcgactatcaccttaaccgccagcagggcgaaacctggctgcgggtgaagggtgagaaagtgctgaacgtgaaggaaatgaccatcagcggccagcacaactacagcaatgccctggcggcgctggcgctggcggatgccgcgggcttgccgcgcgccagtagcctgaaggcgctgaccaccttcaccggcctggcgcaccgtttccagctggcgctggagcataacggcgtgcgttggatcaatgactccaaggcgaccaacgtcggcagtaccgaggcggcgctgaacggcctgcatctcgacggcacgctgtatctgctgttgggcggcgacggtaaatccgccgacttcacgccgctgaaacgctatcttggcggcgataacgttcgtctgtactgcttcggacgcgacggcgctcaactggcggcgctgcgtccggaaatcgcggtacaaaccgaaaccatggaacaggcgatgcggcagatcgcttcgcaggtcaaatcaggcgatatggtcttactgtcgccagcctgcgcgagcctggaccagtttaaaaactttgaacaacggggcgatgtctttacccgtctggcgaaggagttaggttga

SEQ ID NO: 87426 - DNA, 1083 bp, Enterobacter aerogenes
atgttagtatggctggccgaacatttggtcaaatattattccggctttaacgtcttttcctatctgacgtttcgcgccatcgtcagcctgctgaccgcgctgttcatctctctgtggatgggcccgcgcatgatcgcccgtctgcaaaaactgtccttcggtcaggtcgttcgtaacgacggcccggagtcccacttcagcaaacgcgggaccccaaccatgggcgggatcatgatccttaccgcgattaccgtttccgtcctgctgtgggcttatccgtccaatccatacgtctggtgcgtgctgacggtattaatcggctacggcatcatcgggtttgtcgatgattaccgtaaagtcgtgcgcaaagacaccaagggcctgattgcccgctggaagtatttctggatgtcggtgattgcgctgggcgtagcgttcgcgctgtatctggcggggaaagacaccccggcgaccgagctggtagtgccattctttaaagacgtgatgccgcagctgggactgttttacatcctgctggcttacttcgtcatcgtcggtaccggcaatgcggtcaacctgaccgacggcctcgacggcctggcgattatgccgaccgtcttcgtcgccgccggcttcgcgctggtggcgtgggccaccgggaacatgaacttcgccaactatctgcatattccttatctgcgtcacgccggcgagctggttatcgtctgtacggcgattgtcggcgcgggcctgggtttcctgtggttcaacacctacccggcgcaggtctttatgggcgatgtcggttcgctggcgctcggcggcgcgctgggcattatcgccgtactgctgcgccaggaattcctgctggtgattatgggcggcgttttcgtcgtggaaaccctgtcggttatcctgcaggtcggttcgttcaagctgcgcggccagcgcatcttccgtatggcgccgattcaccaccactatgaactgaaaggctggccggaaccgcgcgttatcgtgcgcttctggattatttcgctgatgctggtgctgattggcctggcgacgctgaaggtacgttaa

SEQ ID NO: 87427 - DNA, 1359 bp, Enterobacter aerogenes
atgattcgctttacattaagccagctcgccgagatcgcccgcggcgaactgcagggtagcgatatcgctatcgatgacgtgacgtccgatacccgcaaagtcacggcaggttgcctgtttgtggcgctgaagggcgagcgattcgacgcgcatgattttgccgaacaagcgaaagcggcgggcgcaggcgcgctgctggttagccgcccgctggcctgcgatttaccgcaggtggtggtgaaagatacccgtctggctttcggcgagttagcggcctgggtgcgtcagcaggtgccgacccgcgtcgttgcgctcaccggttcgtccggtaagacctcggtgaaagagatgaccgcggcgatcctcagccagtgcggcaacacgctgtataccgccggtaatctgaacaacgatatcggggttccgatgacgttgctgcgtctgaataaagatcaccagtatgcggtgattgaactcggcgccaaccatcagggcgaaatcgcctggaccgtcagcctgacgcgtccggaagcggcgctggtcaacaacctcgccgccgcacacctcgagggcttcggctcgctggcgggtgtggctaaggcgaagggtgaaatctttaccggcctgccgcaaaacggcaccgcgattttgaatgccgacaacaatgactggctgaactggcagagcgtgattggcgatcgcaaagtgtggcgcttctcgccgaacgcggcgaacagcgacttcacggcgaccaacgtgcatatcaccagtcatggcaccgaatttacgctgcagaccccgtccggcaacgtcgacgtactgctgccgctgccggggcgtcataacatcgctaacgcgctggcggcaacatcgctggcgatggcggtcggcgccgatctggccgcggtgaaaaccgggctggcgcagctgcaagcggtgccgggacgtctgttccctattcagttggcggaaaaccagctgttgctggatgactcctacaacgccaacgtcggttcgatgaccgccgcggtacaggtgctggcggaaatgccgggcttccgggcgatggtggtcggcgatatggcggagctcggcgcggaaagcgcggcctgtcatcgcgaagttggcgaagcggcgaaagcggcggggctggattgcgtcctcagcgtcggttccctgagcgcggatatcagcagcgccagcggcgtgggcgaacattttaacgataaagccgccgtggtagctcgcctgcgcgagctgctggcagagcataaaatcatgaccattttagtgaagggttcacgtagtgccgctatggaagaggtagtacgcgcattacaggagattgcgacatgttag

SEQ ID NO: 87428 - DNA, 1488 bp, Enterobacter aerogenes
gtggcagatcgtaatttgcgcgaccttctcgctccgtgggtgccaaatgcgccggagcgaattctgcgagagatgacgctggacagccgcgtggcggcgtccggcgacctctttgtcgcggtacagggtcatcaggcggacgggcgtcgttatatcccgcaggcgatagcgcaaggtgttgctgccattattgctgaggcacagggcgaggccgcagacggcgaagttcgcgagatgcacggcgtgccggtcatctacctgagccaactgaacgagcggttatccgcgctggccgggcgtttttaccaacaaccttcgcagcagatgcgtctggtgggcgtcaccggtactaacggtaaaaccacgactacgcagctgttggcgcagtgggcaaagctgctcggcgaaaccagcgcggtgatgggcaccgtcggtaatggcctgctggataaagtggtgccgaccgaaaacaccaccggctctgcggtcgatgttcagcacgtgctttccggcctggtagggcagggggcgactttcggcgcgatggaagtctcttctcacgggctggttcagcatcgcgtggcggcgctgcagtttgccgcctcggtgtttaccaacctgagccgtgaccacctcgactaccatggcgacatggaacattacgaagcggcgaaatggctgctctattccacccaccattgcggccaggccattgttaacgctgacgatgaagtcgggcgtcgctggctggcgaaactgccggatgcggtggcggtgtcgatggaagatcatatcaatccgaactgccacggccgctggctgaaggcgaccgcggtcaactatcacgacagcggcgcgaccattcagtttgactcgagctggggcaagggcgaaatcgaaagccgcctgatgggcgcctttaacgtcagcaacctgctgctggcgctggcgacgctgctggcgctgggctatccgctggcggatctgctgaaaacctcttcgcgtttacagccggtgtgcggccgtatggaagtgttcagcgcgccgggcaaaccgaccgtggtggttgattacgcccatacgcctgacgcgctggaaaaagcgctgcaggccgcgcgtctgcactgcagcggcaagctgtggtgcgtcttcggctgcggcggcgaccgcgacaaaggtaaacgcccgctgatgggcgctatcgcggaagagtttgccgatatcgtggtcgtgactgacgataacccacgtaccgaagaaccgcgggcgattatcaatgacattctggctggcatgcttgatgccgggcaggtgaaggtgatggaaggccgcgcggaagcggtgaccggcgcggtgatgcaggcgaaagcgaacgacgttgtgctggtagcgggcaaaggccacgaagactatcagatcgtcggtaaccgccgtctggattattctgaccgcgttaccgttgcgcgtctgctgggagcggtagcatga

SEQ ID NO: 87429 - DNA, 1767 bp, Enterobacter aerogenes
atgaaagcagcgccgaaaacgccaaaagcaaaacgtcaggaagaacaggccaactttattagttggcgttttgcgttgctgtgcggatgtattttaatcgctctcgccttcctgcttggccgcgtcgcgtggctgcaggtggtgagcccggatatgctggtgcgtcagggagatatgcgttcccttcgtgtgcaggaagtgtcaaccgcgcgcggcatgattaccgaccgctccggccgcccgctggcggtcagcgtgccggtaaaagccatctgggccgacccgaaagagctgcatgatgccggaggcgtgacgctcgataaccgctggaaagcgttagccgatgcgctgaacatgccgctggaccagctggcatcgcgcatcaacagcaacccgcggatgcgttttatctatctggcgcgtcaggtgaaccctgacatggctgactacatcaaaaaactgaagctgccggggattcatctgcgtgaggagtctcgccgttactatccgtcaggcgaagtaaccgctcacctcattggcttcaccaacgtcgatagccaggggattgaaggggttgagaaaagctttgataagtggctgaccggccagccgggcgagcgtatcgtgcgtaaagaccgctatggtcgcgtgatcgaagacatttcttccaccgacagccaggcggcgcataacctcgcgctgagcatcgacgagcgcctgcaggcgctggtatatcgcgaactgaataatgcggtggcgttcaacaaagcggaatcaggcaccgccgttttggttgacgtcaacaccggtgaagtgctggcgatggcgaatagcccgtcgtacaacccgaataatttcgcgggtacgtccaaagataccatgcgtaaccgcgccatcaccgacgtattcgaaccgggttcaacggtcaaaccgatggtggtgatgacggcgctgcagcgcggcatcgtcaatgaaaataccgtgctgaacaccattccatatcgaattaacggccacgaaatcaaagacgtggcgcgctatagcgaattaaccctgaccggggtgctacagaagtcgagtaacgtcggcgtttctaagctggcgttagcgatgccgtcctcagcgttagtagatacttactcacgttttgggcttggaaaggcgaccaatttggggttggtcggagaacgcagtggcttatatcctcaaaaacaacggtggtctgacatagagagggccaccttttctttcggctacgggctaatggtaactccgttacagttagcgcgagtctacgcaacgattggcagctacggcatctatcgcccgctgtcgattaccaaagttgatccaccggttccgggcgagcgcgtgttcccggaatcactggttcgtaccgtcgttcatatgatggaaagcgtggcgctgcccggcggcggcggcgtgaaagcggcgatcaaaggctatcgcatcgcgattaaaaccggtacggcgaaaaaagtggggccggatggccgctacatcaacaaatatattgcttacaccgcaggcgttgcgcccgccagccacccgcgtttcgcgctggtggtggtgatcaacgacccgcaggcaggtaaatactacggtggcgccgtttccgcgccggtattcggtgccatcatgggcggcgtattgcgcaccatgaacgtcgaaccggatgcgctggcaacgggcgaaaaaagtgaatttgtgattaatcaaggcgagggaacaggtggcagatcgtaa

SEQ ID NO: 87430 - DNA, 366 bp, Enterobacter aerogenes
atgatcggcagagtgacagtagccttaagcaaagttaaaggatcgttaggaagcaacgagcgccatgccttgcctggcgttatcggggacgatcttctgcggtttgggaagctgccactctgcctgttcatttgcatcatcataacggcagtgaccgtggtgacgacggcgcaccatacccgtctgttaaccgcgcagcgtgaacaattggttctggagcgtgacgctctggatattgaatggcgcaacctgatcctcgaagagaacgcccttggcgatcacagtcgggttgagcggatcgcgacagagaagttgcagatgcaacacgttgatccatcacaagaaaatatagtggtacagaaataa

SEQ ID NO: 87431 - DNA, 942 bp, Enterobacter aerogenes
atgatggaaaattttaaacatactacggtacttctggatgaagccgttaacggcctgaatattcgtccaaatggtatctacattgatggaacctttggccgcggtggtcactcgcgtctgatcctctcccaactgggggcggaagggcgcctgctggcaatcgatcgcgacccgacggctattgccgttgcgcaaaccatcgatgacccacgcttttccatcgtacatggtcctttctcgcagctggctgactacgtcgccgagcgcaatcttaccggcaagatcgacggtattcttctcgatcttggcgtttcttcaccgcagctggacgacgcggaacgcgggttctcctttatgcgcgatggtccgctggacatgcgcatggatccgactcgcggtcagtccgccgccgaatggttacagaccgccgaagaagccgacatcgcctgggtaatcaaaacctttggcgaggagcgtttcggtaaacgtatcgcgcgcgcgatcgttgagcgtaaccgcattgagccgatgacccgtaccaaagagctggcggaagttatcgcggcggcaacgccggtgaaagataagcacaaacatcccgcgacccgtaccttccaggcggtgcgcatctgggtgaacagtgaactggaggagatagagcaggcgctaaaaagctcgctcggcgtgctggcccccggtggtcggctgtcgattatcagtttccattcgctggaagaccgcattgtgaagcgctttatgcgtgagcaaagccgcggtccgcaggttccagcagggatcccgatgactgaagagcagctcaggaaactgggcggccgtcagttgcgagcactaggcaagttgatgccgggcgaagaagaggtggcagagaatccacgcgcccgtagttcagtgctgcgtatcgcagagaggacgaacgcatga

SEQ ID NO: 87432 - DNA, 459 bp, Enterobacter aerogenes
atgttccgtggagcaacgttagtcaatctcgacagtaaaggccgtttggccgtaccgacgcgctaccgcgacgggctgatcgaggatgcttctggtcaaatggtatgcaccattgacattcatcacccgtgcctgctgctttatcctttgcctgaatgggaaatcatcgagcaaaaattgtcgcgtttgtcgagcatgaatcccgttgagcggcgcgtacagcgcctgcttttggggcatgccagcgaatgtcagatggatagcgccggacgattgctaatcgcgccggtgctgcggcaacatgccgggctgacaaaagaagtgatgctggtcggacagtttaataaatttgaactgtgggatgaaacgacctggtatcaacgggtcaaggaagatatcgacgctgagcagtccgctaccggtgaactgtcggagcgcctgcaggatttgtctttataa

SEQ ID NO: 87433 - DNA, 1005 bp, Enterobacter aerogenes
gtgaaactggatgaaatcgcccggctggccggtgtttcaagaaccaccgcgagctatgtgattaatggcaaagcgaagcagtatcgcgtcagcgataaaacggtcgagaaggtgatggcggtggtgcgcgagcacaactaccacccgaatgcggtcgctgctggcctgcgcgcaggacgcacgcgttcaatcggtctggtgatcccggatctcgaaaataccagttatacccgtattgcgaactatctggagcgccaggcgcgtcagcgcggctaccagttgctgatcgcctgctcggaagatcagccggataacgaaatgcgctgtattgagcatctgctgcagcgtcaggtggatgcaattatcgtttcgacttcgctgccgccggagcacccgttctatcagcgctgggcgaacgatcctttcccgattgtcgcgctcgaccgcgcgctcgatcgtgaacactttaccagcgtcgtcggcgccgatcaggacgacgccgagatgcttgccgccgagctgcgcaaattccccggtgaccgagtgctctatctgggagcgctgccggagctgtcggtgagcttcctgcgcgagcagggtttccgttcagcctggaaagacgacccgcgcgaggtgaacttcctctatgccaacagctatgaacgcgaagccgcggcccagctgtttgaaaagtggctggaaacgcatccgatgccgcaactgctgttcaccacctctttcccgctgctgcagggggtgatggatgtcacgctgcgccgtgagggcaaactgccatctgagctggccatcgccaccttcggtgataacgaactgctcgacttcctgcagtgcccggtgctggcggtcgcgcagcgtcatcgcgacgttgccgagcgcgttttagagattgtactggcaagcctggatgaaccacgtaagccgaaaccgggcttaagtcgtatacgtcgtaacctctatcatcgcggaagtttgaatcgtcgctga

SEQ ID NO: 87434 - DNA, 492 bp, Enterobacter aerogenes
atgcgccggatattatctgtattactggagaacgaatcgggagcgttatcccgggtgatcggcctcttttcgcagcgcggctacaatattgaaagcctgacggtagcgccaaccgacgatccgacgttgtcccgcatgaccatccagacggtgggcgacgaaaaagccattgagcagattgaaaagcaattacataagctggtggacgtgctgcgggtcagcgaactgggtcaaggctcccacgtcgaacgtgaaatcatgctggtgaaagtgcaagccagcggttatggccgcgaagaggtgaaacgcaacaccgagatcttccgcgggcagattattgacgtcacgccatctatttataccgtgcagttggccggaaccagcgataagctggatgcgttcctggcttctttacgcgatgtcgcgcgcattgttgaagtggcgcgatccggagtagtcggcctgtcgcgcggcgataaaatcatgcgctaa

SEQ ID NO: 87435 - DNA, 1725 bp, Enterobacter aerogenes
atggagatgttgtcaggagccgagatggtcgtccaatcgcttgtcgatcagggcgtcaagcaagtattcggctatcccggaggcgcggtcctcgatatctatgatgcattacataccctcggcggcattgaccatgtgctggtccgccatgagcaggcggcggtgcatatggccgacggactggcgcgcgcaaccggcgaagtcgggggggtgctggtgacctccggtccgggagcgacaaacgctattaccggtatcgcaacggcttacatggattctattccactggtcattctttccgggcaggtcgccacctcgctgattggctacgatgccttccaggagtgcgatatggtcggtatctcgcggccggtggtcaaacacagctttctcgtgaaacagactgaagatatccccgggattttaaagaaagccttctggctggcggccagcggccgaccggggccggtagtggtcgatttgccgaaggatattctcaatccggcgaaaaagctgccttatgtttggccggatgcggtcagcatgcgttcctataacccgacaaccagcggtcataaagggcagatcaaacgtgcgttgcaaacgctggtggcggcgaaaaaaccggtcgtgtacgttggcggcggggcaatcaattcgcagtgcgaagcacagctgcgtacgctggtcgaaaagctgaagctaccggtggtttcttcattaatgggtttaggcgcttttccggcgactcatcagcaggcgctggggatgttggggatgcacggtacctatgaagccaacatgaccatgcatcattccgacgttatttttgcagtcggcgttcgctttgacgatcgcaccaccaacaatttggctaagtattgcccgaacgccacggtgctgcatattgatatcgatcccacgtcgatctccaaaaccgtcccggcagatgtgccgatcgtcggcgatgcgcgccaggtgcttgaccagatgtttgatctgcttgaacaggaagagagccagcaaccgctggatgagatccgcgactggtggcagcagatcgaacagtggcgttcccgtcactgtctgcaatacgacacgcaaagcggcaagatcaaaccgcaggcggtgattgaggctatctggcgcctgaccaatggtgatgcttacgtgacttccgacgttggccagcatcagatgttcgccgcgctctattatccattcgataaaccaagacgttggattaactccggcggcctcggcacgatgggctttggcctgccagcggcgctgggcgtgaagatggcgctaccgcaagaaaccgtgatctgcgtgaccggcgatggcagcatccagatgaacattcaggagctttccaccgccctgcagtatgaactgccggtgctggtgttgaacctgaataaccgttacctcggaatggtgaagcagtggcaggatatgctctattctggccgccattcgcagtcctatatggaatcgctgccggacttcgttcgcgtcgccgaggcgtatggccacgttggtattcgtatcagcgagccgcaagagctggaagcgaagctggcggaagccctggagcaggtgcgtaataatcgtctggtgttcgttgatgttacggttgatggtagcgagcatgtttatcccatgcagatccgcggcggcggcatggacgaaatgtggttgagcaaaacggagagaacctga

SEQ ID NO: 87436 - DNA, 969 bp, Enterobacter aerogenes
gtgacggtggagttagatatgttaattgaaaatactgaatataaatcagccccgggacaggaagtcgtcaaaccacaactgcggatggtggatctcaacctgctgaccgtgtttgatgcggtgatgcaggaacaaaatattacccgtgcggcccatactctcggcatgtcccaaccggcggtgagtaacgcggtatctcgtctcaaggtgatgtttaatgatgagctgttcgttcgctatgggcgcggcattcagccaacggcgcgggcctatcagctgttcggctcagtacgccaggcattgcaactggtgcaaaatgagttgccgggttccggttttgaaccgctgagcagcgagcgcgtatttaacctctgcgtttgtagcccattggataattacttaacctcgctaatatttaataaagttggtgaaatcgcgccaaatattcatctggtctttaaatcagcgctacatcaaaacaccgaacatcagctgcgttatcaggaaattgaattcgttatcggttatgaagagttccgtcgcccggagtttgcctgcatacctttattcaaagatgaaatggttctggtggccagccgtaaacatccgcgtatttccgggccgctaacggaagcggatatttatcaggaagagcacgcggtcgtcgcattggatcgttatgcgtcatttagccagccgtggtatgactccgtggataaacaatcctgtattgcttatcagggtaatgccatggttagcgtattaaacgtggtgtcacaaacccacatggtggcaatagcgccacgttggttggccaatgaattcgctgataaattagatttgcagatcttaccgttgccgctgaaggtcaacagccgtacctgcttcctctcctggcacgaagcggccggtcgcgataaaggccatcaatggatggaagagttattggcgaatatctgccaacgctaa

SEQ ID NO: 87437 - DNA, 1572 bp, Enterobacter aerogenes
atgagccagcaagtcattattttcgatacgaccttacgtgatggggaacaagcgttacaggccagcctgagcgtgaaagagaagctgcagatcgccatggccctcgaacgtatgggcgtcgatgtaatggaagtcggtttcccggtttcttccccgggcgattttgaatcggtacagaccatcgctcgcaccatcaaaaatagccgcgtttgcgcgctggcgcgctgcgttgagaaagatatcgacgtggcggcggaatccttaaaagtggcggaagcgttccgcatccacaccttcatcgccacgtctccgatgcatatcgccaccaagttgcgcagcacgctggatgaagtcatcgaacgcgctatttatatggtgaaacgtgcgcgtaactataccgacgacgtggaattctcctgtgaagacgcaggccgtacgccgatcgacgatctggctcgcgtcgttgaagcggctatccgcgccggcgccacgaccattaatatcccggataccgtcggctacaccatgccattcgaatacgccaacatcatcagcggcctgtatgaacgcgtaccaaacattgataaagcaattatttcagtccacacccatgatgatttaggtatcgccgtcggcaacgccctcgccgccgtccacgctggcgctcgtcaggtagaaggcgcgatgaacggtatcggcgaacgcgccggtaactgcgcgctggaagaagtcatcatggcgatcaaggtgcgcaaagacatcatgaacgtgcacaccaacatcaatcaccatgaaatctggcgtaccagccagaccgtcagccaaatctgcaatatgccgatcccggctaacaaagctatcgtcggtaccggcgccttcgcccactcttccggtattcatcaggatggcgtgctgaagaaccgcgaaaactacgaaatcatgaccccggaatccatcggcctgaaccaggtacagctgaacctgacttcacgctccggtcgcgcggcggtgaaacaccgtatggaagagatgggctacaaagagagcgactacaacctggatcatctgtatgacgccttcctgaagctggcggataaaaaaggccaggtcttcgactatgacctggaagcgctggcatttatcaataaacagcaggaagagccagagcatttccgtctggactacttcagcgtccagtctggctccagcgatatcgctaccgcctctatcaagctggcctgcggtgatgacattaaaaccgaagccgccaacggcaacggtccggttgacgctatctaccaggcaatcaaccgtgtgacagactacaacatcgacttagtgaagtatggcttaagcgccaaaggccacggcaaagatgcgctgggtcaggtggatattgtcgtggaatacaacggtcgccgcttccacggcgtcggcctggcgaccgatatcgtcgaatcttcagcaaaagcgatggtacatgtgcttaacaacatctggcgcgccgccgaagtcgaaaaagaattgcaacgccaggctcagaataaagagaacaacaaggaaaccgtgtaa

SEQ ID NO: 87438 - DNA, 1092 bp, Enterobacter aerogenes
atgtcgaagaattatcatattgccgttttgccgggtgatggaattggcccggaagtgatgaaccaggcgatgaaagtactggaagccgttcgtaaccgtttttcaatgcgtatcaccaccagccagtacgacgtgggcggcatcgccatcgaccgtcagggcatgccgctgccacaagctaccgttgatggctgcgagcaggctgacgcgattctgttcggatccgtcggcggcccgaagtgggaacatctgccgccggccgaacagccggagcgcggcgcgctgctgccgctgcgtaaacacttcaaattattcagcaacctgcgcccggctaaactgtatcaggggctggaagcattctgcccgctgcgcgccgatatcgccgccaatggcttcgacattctgtgcgtgcgcgaactgaccggcggcatctacttcggtcagccgaaaggtcgtgaaggcagcggccagcacgaaaaagccttcgataccgaggtataccatcgttttgaaattgagcgcatcgcgcgtatcgcctttgaatcggcgcgcaaacgtcgccataaagtgacgtcaatcgataaagccaacgtcctgcagtcttctatcctgtggcgcgaaatcgtcaacgagattggcaaagagtatccggacgtcgaactggcgcatatgtatatcgataatgccaccatgcagcttattaaagatccgtcgcagttcgacgtactgctgtgctccaacctgtttggcgacatcctgtccgacgagtgcgcgatgatcaccggctctatgggcatgttgccgtccgccagcctcaacgagcaaggttttggcctgtatgaaccagcgggcggctcggcgccggacatcgcgggcaaaaatatcgccaatccgattgcgcaaatcctgtcgctggcgctgctgctacgctacagcctggatgcgggcgacgcggcgagcgccattgaacgcgctatcaaccgcgcattagaagaaggcattcgtaccggcgacttagcgcgcggtacggcggcggtcagtacagatgaaatgggcgatatcattgcccgctatgtcgcggaaggggtgtaa

SEQ ID NO: 87439 - DNA, 1401 bp, Enterobacter aerogenes
atggcgaagacgttatacgagaaattatttgatgcgcacgtggtgtacgaagcgcagaacgaaacaccgctgctgtatatcgaccgccatctggtgcacgaagtcacctctccgcaggcgtttgacgggctgcgcgcccatggccgccaggtgcgtcagccgggtaaaacattcgccaccatggatcacaacgtctcgacgcagaccaaagatatcaacgcctccggcgaaatggcccgcatccagatgcaggaactgattaagaactgcaaagaatttggcgttgagctgtatgacttaaatcacccgttccagggcatcgtacacgtgatgggcccggaacagggcgtcaccctgccggggatgaccatcgtgtgcggcgattcccataccgcgacccacggcgcattcggcgcgctggcattcggtatcggcacctctgaagttgaacatgtactggcgactcagaccctgaaacaggggcgcgcgaagaccatgaaaatcgaagtccgtggcaaagcggcgccgggcattaccgcgaaagacattgtgctggcaatcattggtaaaaccggtagcgccggcggtaccggccatgtcgtcgaattctgcggcgaagccattcgcgatctgagcatggaaggccgtatgactctgtgcaatatggcaatcgagatgggcgccaaagcgggtctggtcgcgcctgacgagacgacattcaattacgtgcagggccgcctgcacgcgccgaagggccaggatttcgccgacgcggtggaatactggaaaacgctgaaaaccgatgatgacgccaccttcgataccgtggtgacgctgcaggcggaagagattgcgccgcaggtcacctggggcaccaatccaggccaggtcatctcggttaccgatattatcccggatccggcgtcgttcagcgatccggtcgagcgcgccagcgccgaaaaagcgctggcctatatgggtctgaaatccggcgtaccgttgaccgaggtcgcgatcgacaaagtctttatcggttcctgtactaactcgcgaatcgaagatttacgcgcggcggcggaaatcgccaaaggacgtaaagtggcgccgggcgtacaggcgctggtcgtccccggctccggcccggtgaaagcgcaggcggaagccgaaggtttggataagattttcatcgacgccggttttgagtggcgcttaccgggctgctccatgtgcctggcgatgaacaacgaccgcctgaatcccggcgaacgttgcgcctctaccagcaaccgtaactttgaaggccgtcaaggccgcggcggacgcacccatttagtcagcccggcgatggccgcggcagcagcggttaccggccatttcgccgatatccgtaacttgaaataa

SEQ ID NO: 87440 - DNA, 606 bp, Enterobacter aerogenes
atggcagagaaatttacccaacatactggcctggtggttccgctggatgccgcaaacgttgataccgatgcgatcattccaaagcagttcctgcagaaagtgacgcgtactggctttggcgcgcacctgtttaacgactggcgtttcctcgacgaccaggggcagcaaccgaacccggagttcgtgctgaacttcccgcaatataaaggagcgtctatcctgctggcgcgtgaaaacttcggctgcggctcctcgcgcgagcacgcgccgtgggcgttgaccgattacggtttcaaagtggtgattgcgccaagctttgccgatatcttttacggcaacagctttaataaccaactgctgccggtgacgctcagcgatgagcaggtggacgagctgttcaagctggtacaggcgaacccgggcatcagctttgaagtagaccttgaagcgcaggtggttaaagccggggataaaacctacagctttaaaatcgacgacttccgccgccactgtatgctcaacggcctggatagcatcggcctgacgctgcagcatgaagaggcgatttccgcctacgagcgccaacagcccgcctttatgaactaa

SEQ ID NO: 87441 - DNA, 2034 bp, Enterobacter aerogenes
atgagccactatcctcacctattcagcccgctgaccatcaacgggatgaccataaaaaaccgtattattatgccgccgatgggcaccaatatggctaccctcaacggcgaggtctcgcaggaacagcttgaatactacgagctgcgggcgaaaggcggcaccgggctcattactgtggaaaatatctgcatcgattttcccttcgcctccaatggtacaacgcagttacgcatcgataacgatcaatatatcccacgcctgtttaaattaaccgaaacccttcataaacacggcgcttgcgtagcgattcagctgaaccacgcgggcgcttcggcttatgcttatcgcctgaatggacagacgccgttatccgcttccagcacgccgtcgaaaaagcacggtaatattccgcggccaatgacccatgaggaaatttatcacgcggtcgacaaattcggcgacgccgcggagcgcgtgcgccgcgccggatttgactgcgtagaaattcatggcggccattcctatttaattagccagtttttgtcaccgttatttaataaacgtaccgacgaatttggcggcagtatcgaaaaccgcacccgcatattaagcctgattatcgataaggttcgcgcctgcgtcgggccgcgtttccccatcagcctgcgcatcagcgccgacgatttcttaaagggcggcaacacgctggaagattcgctgcgcatcctcgaactgtgccaggacaaagtcgacatcattaacgtctctgccgcgcagaacgataacctgaacctgcaaatcgaccagatgtcgctggaagacggctggaagcgctacctctctcgcgcggtacgcgacaaattccataagccgacggtgatcgccggcaacattcgttcgccaaaaatcgccgaagatatcctcgctaccggcgatgccgatctgatcgccattggtcgtgggttgattgccgagccagaatgggtgcagaaagtacaaagcggcaatgagcgtctgatgcgcaaatgcatctcctgcaatatcggctgtgcggatcaccgtatcgcccgctctcgcccgctgcgctgctcgatcaatccggacattatccacggcgacgcttacaagcagcagcgtgtctcacgagaaaccaacgtcgtggtgatcggcgccggcacggccggaatggaagccgcctgtaccgccgcggaagtcggctgcaacacctggctgctggaagagaaaagccacgtcggcggcctggccagcaccattgcgctgctgccggagaaaaaacggatcgctgatttcccgcagtttatgaaaaaccgcctttccgggctaagcaatctgatgctgcaggtcggtaaacgcgccgatgtcgcttcagtcgccgcgctgcatccacaactcatcgtcaatgccaccggctcggttcctctgctgccgcctatcgacggcctgcgcgagaacattgacgccgaaggtggtcgcctgttctcgataaccggaatgattaaccatctggacacctttgccgatgccgcaggtaaacgcatcgtggtggttggcggcggcgccgtcggcctggacgtcattgaatacttctccgcgcgcggcgccgagacggtgctaattgaaatgcaagacgccccgggacaggacctcgacattattaccaaaaacgcgatgttgaccatgctggaagaacaccaggtggaacaacacatgcggacccgattaaccgccgtcactccagaccatttcaccgtgagtaccgccagcggcacgttcgatattcccttcgactacggctttgtctgcctgggaatgcgcgctaaccgcgctggtctcgacgacatcgcccagtgggccgccgccaacaacgtaaaaatcatgaatatcggcgacagcctgtcggcccggcgaattatcgacggcgtgcgcgaaggccgcaacgtgctggagatactcgaagacatgggcgtactcggcaatcgcgaagcgcaacagattccatttttaacatattga

SEQ ID NO: 87442 - DNA, 864 bp, Enterobacter aerogenes
atggcagaacgtcttaccggtcataccgaactgattggcttaatcgctaccccgattcgtcatagcatgtcgccgactatgcacaacgaagcctttgcccatcttggcctggattacgcctacctggcgttcgaagtcgataacctggagctaaaagatgtcgtgcagggtttccgcgcgctgaagctgcgcggttacaacgtctcaatgccgaataaaaccgaaatttgccagtatctcgataagctctcgccggcggcgcagctggtcggcgcggtcaataccgtggtcaacgataatggcgtgttaaccggccacattaccgacggcaccggctatatgcgcgcgctgtcggaggctggtatcgatatcatcggcaaaaagatgaccatcctcggcgcaggcggcgcggctaccgccatcagcgtacaggccgcgctcgacggcgtgaaggccatctcgatcttcaaccgcaaagacaagttcttcgccaatgccgagcagaccgtggccaagatccgcgataacaccgactgcgagatccaccttttcgatctcgacgatcatgacaagctgcgcgccgaaatcgacagcagcgtgatcctcaccaacgccaccggcgtcggtatgaagcctttcgaaggccaaatgctgctgccaaacgacagcttcctgcgcccggatctgattgtctccgacgtcgtctataacccgcgtaaaacctatctgctggaagtggcggagaaaaaaggctgccggaccctcaacggcctgggaatgatgctgtggcaaggcgcgcgcgcgttcgaaatctggacgggcaaagagatgccggttgaatacgtcaagagcattctgttctaa

SEQ ID NO: 87443 - DNA, 1215 bp, Enterobacter aerogenes
atgaaaaataaatacatccctactgcggcagggctgtatctcaactacctgatccacggcatgggggtgctgttaatcaccctcaacatggcccatcttcaggaacagtggggaacagacgctgctggcgtatcgatcgttatctcctcattaggtatcggtaagctggcgacgatcgtgaccggctttttgtcggatcgctttggtcgtaagccttttatctatctagggatcctgagttatctgatcttcttcgtcggcattctgctgaccaaaaatatctatctggcctacgtgttcggcatcatggctggtctggcgaacagcttcctcgactccggaacctatccggcgctgatggagtctttcccgcactccgccagccgcgctaacgtgctcatcaaagctttcgtttccgcagggcagttcctgctgccgttcattatcagcctgctaatatgggcaaatctgtggtttggctggtcgtttgtgattgcggcggctctgtttatcttgagcgcaatctatctgctcaagatgccgttccccgatagccaggcggccaaaaaagaagagatcccagcggcgcaggcagcggcttccgctaaaccgcaagccaacaaactggacatggtaatctttaccctgtacggctatatcggcatggcgaccttttacctggtaagccagtggctggcgcaatatggccagttcgtggtcggtatgccttatgcctcggcgatcaagctgctgagtatctataccgtcggttcactggtctgcgtcttcgtgaccgccgccttcgtcaaagaggtgttcagttccgcggtaaccatgatcatctacacctgtctgtcgatggtctcactgctgttagtgtgcttattcccgacaccggtgatggttaccggttttgccttcgtcatcggcttttccgccgccggcggggtactgcagctgggggcgaccatcatggcaatgagctttccgaacggcaaaggcaaggcaacggggatcttctacaccgcaggcagcatcgcgagcttcacgatcccgcttatcaccgcaaagctttcgcagattagcattgccagcattatgtggtttgatttcctgatcgccgtcatcggctttgtgatcgccctgtacatcggctatcgtcaacttcaggctcgcgcggcgcaaagagtgtctcgcaccaccgtcaccgcctga

SEQ ID NO: 87444 - DNA, 756 bp, Enterobacter aerogenes
atgacaactgcagtaaccgtaaagaacatcaccttcaaggaaggcgaaaccttaatttgcgtaccgctgatcggaaaaacgctggatgaactgctgactaatgctcagggcctggttgacgcgggcgctgatattatcgaatggcgcgttgaccattttactcacgtccgggaaatcccccaggtgctggccgcactggcggaaatccgtcataccctgaaagcactcccgctgctgttcaccttccgcagtaagaaagaaggcggcgaaacggaaatcagcgacgaagcgtattttgaacttaaccgccaggcggccctaagcggattagtcgatgttatcgacatcgagttgtttaacgatgaagcgcaaattcgcgcgctggtgaacgacgcccatcaggccggcgtaaaagtgatcatgagcaatcatgatttccataaaacaccggagcaggaagatatcatctatcgactgcgtcgaatgcaggatctgggtgccgatctgccgaagatcgcggtgatgccgcagacgcctcaggacgttctcactctgctttccgcaacgctgaccatgaaagagaagtatgcgacgcgcccgctgatcaccatgtcgatgggcaaatccggcggcgtgagccgggtaaccggtcgcttgttcggttcagcgatgacctttggcaccgtcggccaggcctccgcgccgggccaaatagccatcgctaagctgcgcgaactaatggacattttgtcctga

SEQ ID NO: 87445 - DNA, 897 bp, Enterobacter aerogenes
atgaacctgaagcaactttattattttaagcgattgagcgagacggagcattacaccgaagcagcatccagtctgttcattactcaaccctcgctaagccacgccatatctgagctggagaaggaacttggcgtggcgcttttcgccagaaaaggacgcaacgtcaaaattacgcaaaacggtaaacgttttttgccctatgtggaggatgcgctcgcttctctggagaacgggcgtctgacgctgcaaaacaatgatagtgaaaagaaagagaatattcgtatcgcctttatttatacgatgggtgaatctgttgttccgcagttaattaataaatacactaattcaccttccagtcacaaggtgactttttcctttacgcaaggcacttcgctttcgttattacaagcgttaaaggcaggaaaaaccgatctggcgatttgttcatatattgccgatgaacccgaaatcgactttattcctattattcagcaggagttggtggtggtaaccgcgaaagatcatccgcttgcccggctgtatgataatgaggtcgatttggttgagacgattcactatccctatatctatttttcagagaacagcggtctgcggccttttattgataatgtctttatgcaacaaaaactggtaccggatatcgcctgctacgtcgatgaagatactgcgatggcggggctggttagcatcgactatggcattgcgattatgccgaggatctccgcactggcaaattataacgtgcgcattctgaagattaaaaatgcgatcccacctcgttatatttacctcgcaacaatgaaggaaagggtactttcctcagcgattcaatcgtttaaaaacgtcatcattaacgatagccagagaatcaactga

SEQ ID NO: 87446 - DNA, 1311 bp, Enterobacter aerogenes
atgtgcatacctgacgctcaagggagtctggcatcatcgcccggcacgctaaaaagaagcagaacgcgtatttttattttatcgctgttatcgctgggtacgatgattaattatctcgatcgtaccattcttggaatcgttgctccaaaattaaccactgaaatccatattgatccggcgatgatgggcattgttttttccgcttttgcctggacttatgcgctggcgcaaattcctggcggcatgtttttagaccgattcggtaataaattgacctacgccctctccatcttcttttggtctctgtttacgctgctgcaaagcttctctctggggctgaaatctttgctccttttgcgtctgggcctgggcgtcagtgaagccccctgctttccggccaatagccgcatcgtcagcaaatggtttccccagcatgaacgggccagggctaccgcaacttatacggttggtgaatacattgggttagccgccttctcgccattgttatttttaatcctcgaacaccacggctggcgcaccttattttttctgaccggagggcttggaattttattcactttcgtatggtggcgtttttatcatgagccacatgaatcgaaaacagcaaataaagcagaactggattatattggcgccaaccagattgccaataagagtgaaaacattccatttaactggcgtgatgccaggcggctactgtgctgccgacaaattatcggcgccagcctggggcagtttgccggtaacaccacgctggtctttttcctcacctggtttccaacctatctggccaacgaacgccatctaccgtggcttcatgtaggttttttcgccacctggcccttcctggccgccgcggttggcatcatcttcggcggctggctttccgacaggctacttaagcgtaccggctcggcaaatataagccgaaaacttccaataatttctggattactcctttccagctgcattatcgccgccaattgggtcagcgcgaattcgacggtgattattattatgtcgatcgctttctttggtcagggaatggtcggtctgggctggacgttaatatctgatattgccccggataatatggctggattgaccggcggtatatttaacttctgcgccaacctggcatcaattattgcgccactcatcattggcgtgattatatcagccaccggtaacttcttttacgccctcatttatgttggcgtgaccgcgctgatcggggtgattgcctacatctttattatcggcgacatcaagcgaatcgtactgaagtaa

SEQ ID NO: 87447 - DNA, 1185 bp, Enterobacter aerogenes
atgctgtggttgatgacgatggggcgacggctaaacggcgtctacgccgcctttatgctggtggcttttatgatgggggtggccggggcgctgcaggcgccgacgcttagcctgtttctcagccgcgaagtcggcgcgcagccgttctgggttggcctgttttatacggtgaatgcgattgccggtatcctggtgagcctggcgctggccaaacgatccgatagccgcggcgatcgtcggcggttaattatgttctgctgcctgatggcagtgggtaacgcgctgctgttcgctttcaaccgccattatctgacgcttattacctgcggtgtcatgctggcttcggtcgctaatgcggcgatgccgcagctgtttgccctcgcccgcgaatacgccgatagctctgcccgcgaagtggtgatgttcagctcggtgatgcgcgcccagctgtcgctggcgtgggtcattggcccaccgctggcttttatgctggcgttgaattatggctttacgaccatgttctccattgccgccgggatttttgtcatcagcctggcgctgattgcctttaagctgccttcggtggcgcgagtgacgcaactgcaggaaggcagcagcctgccggagctggaaggcggctggcgcgataaaaacgtgcgcatgctgtttatcgcttctacgctgatgtggacctgcaacacgatgtatatcatcgatatgccgttgtggatcagtagcgatcttggcctgccggatagcctggcggggatactgatgggcacggctgccggtcttgaaattccggcgatgatcctggccggctactacgttaagcgttggggtaaacgcaaaatgatggtggcggcagtcgccgccggcgtgctgttctatgtggggctgattatgttccatggccgcacggcgctgctggcgctgcagctattcaatgctattttcatcggtattatcgccgggatcggcatgttgtggttccaggatctgatgccggggcgcgccggggcggcgaccacgctgtttaccaatagtatctccaccggggttattctggccggagtgattcagggagcgctgtcgcaaagctatggtcacggtagtgtgtactggacaatcgcggcgatttctctgctgacgctgtttttgaccagccgggttaaagatatttaa

SEQ ID NO: 87448 - DNA, 153 bp, Enterobacter aerogenes
atgacgaggtcaaccactaagcagttctatcaacggtacttttctgcgacgcagggagcgtcctggctggcccgccagttagcaggtaggcagcagaaaatgctggaggaattgatgcagtggggagttacgtcgccgacctccgatcgttga

SEQ ID NO: 87449 - DNA, 1656 bp, Enterobacter aerogenes
atgccttccagtcgtctgcaacaacagttcatccgcctgtggcaatgctgcgacggcaggtcgcagcagaccaccctcaacgaactggcggaaatgctcagctgttcgcgccgccatatgcgcaccttgcttaatctgatggaagcgcgcggctggcttgcctgggaatccgaagccgggcgcggcaagcgttcacgactgaccttcctttataccggtctggcgctgcagcagcagcgcgccgaggatctactggagcaggatcgcatcgatcagctggtgcaactggttggcgataaaaccgcggtcagacagatgttgatctcccatcttggccgcagcttccgccaggggcgccacatcctgcgcgtgctctactatcggccgatgaagaatctgctgcccggcagcgcgttgcgccgttcggagacccacatcgcacggcaaatttttagcgcgctgacgcgggtaaatgaggaaaatggggaactggaggccgatatcgcccaccactggcagcaaatttcgcctaaccactggcgctttttcctgcgtcccggcattcatttccatcatggccgggagctggagatggccgacgttatctcctcgctacagcgcagcagcgaactgccgctattttcccatatcgagcgcatcgtctcgccgaccgcctggacgctggatattcaccttagccagccggatcgttggctgccctggctgttaggccaggtcccggcgatggcgctgccgcaggaatggcggacgatggagaacttttccagtatgcctatcggtaccggcccttacgcggtcgcgcgcaataatcaaaatcagttgaaaatccatgccttcgaagagtacttcggctatcgggcgctgatcgatgaggttaacgtctgggtgctgccggaaattagcgaagaacccaacggcggcttaaccctgcagggcaataccgagagcgaaaaagccgtagagagccgcctggaagaggggtgctattacctgctctttgatagtcgaagcccgctgggcggcaatgatgacgtgcgccgctggttaagttatctgttccagcccgccaacctgctgtatcacgccggcgagcactatcaaggcaactggttcccggcctacggcttgctgccgcgctggcaccacgcccgcagtcacgcctgcgaaaaaccagccggcctggagtcagttaccctcacctactatcgcgatcatgtggaacatcgggtcattggcgggatcatgcgggcgctgctggcggaacatcaggtgaggctgaacattcaggagctggagtacgacgactggcatcgcggcgaaacggtgagcgatatctggctcaacagcgtcaatttcacgttgccgatcgatttttccctgttcgcctatttatatgaagtgccgctgatgcatcactgcattcccatcgactgggaggcagacgccaaccgctggcgcgcaggcgagttcaacccggcgacctggagccagcaactgctggagaagcagcatattgtaccgctgatccaccactggctaatgattcagggccagcgcagtatgcgcggcgtgcgcatgaacaccctcggctggttcgactttaaatcggcgtggttcgccccgccggagccctga

SEQ ID NO: 87450 - DNA, 984 bp, Enterobacter aerogenes
gtgttgaaaaaactgtttcccctgctggcgctggtcgccgccccggtctttgctaaaccggtcctgaccgtatacacctacgattcattctctgccgactggggtcctggcccggcggtgaaaaaggcatttgaggccgattgcggctgcgaactgaaatatgtcgccctcgaagatggcgtctcgttgcttaaccggctgcgaatggaaggcaaaaacagcaaagccgatgtcgtgctcggccttgataacaatctgctggcagcggcggcgcagagcaaactgtttgccaaaagcggcgtgccggccagcgcggttagcgtacccggcggctgggataacgatactttcgtgccttacgactacggctacttcgccttcgtgtatgacaaaaacaaacttaaaaacccgccgaaaagcctgaaagagctggtcgagagcccgcagaaatggcgcgtgatttacgaagacccgcgcaccagtacgccggggctcggcctgctgctgtggatgcaaaaggtgtatggcgataaggcgccggaagcctggcagaagctggcggccaaaaccgtcaccgtcaccaagggctggagcgaagcttacggactgttcctgaaaggcgaaagcgacctggtgttgagctacaccacctcgccggcttatcacctcatcgaagagaaaaaagataattatgccgcggcggactttaccgaaggccactatctgcaggttgaagtcgccgcgcgtaccgccgccagcaagcagccggaactggctgagaagttcctgaaatttatggtctcgccaggcttccagaacgccatccccaccggcaactggatgtacccggtgacccaggtggcgctgccggccggcttcaatacgctaaccaaaccgcaaaccacgctgcagttcaccccgcagcaggtcgccgctgaacgtcaaaactggatcggttcatggcaacgcgccgtcagccgctaa

SEQ ID NO: 87451 - DNA, 1611 bp, Enterobacter aerogenes
atggcaacgcgccgtcagccgctaagtttcggctggttgatccccggcgccgcggcggcctgcttactggtcatcgtagcgctggcggcgtttctggcgctgtggctggaggcgccgcaggcgccctggcagacgatcctcagcgatagctatctctggcacgtcgtacgcttctctttctggcaggcgtttttgtcggcgctattttcggtagtgccggcgatattcctcgcccgcgccctgtatcgccgccgctttccggggcgcacgctgctgctgcgcctgtgcgcgatgacgttgatcctgccggtactggtggcggtgttcggcatcctcagcgtctatggccgcccggggtggctcgccgcgctgttccacgcgctcggctggcagtgggatttctcgccgtatggcttacagggcatcctgctggcccatgtgttctttaatatgccaatggcgacccgcctgctgctgcaggcgctggaaaacatccccggcgaacagcggcaaatcgccgctcagctcggcatgcgcggtttcgtcttcttccgtcttgtggaatggccgtggctgcgtcggcagatcccgccggtggccgcgctgatttttatgctgtgcttcgcaagttttgccaccgtgctgtcacttggcggcgggccgcgggccaccaccattgagctggctatctatcaggcgctaagctttgattacgacccggcacgggcggcgctgttagcgattattcaaatgatctgctgccttgggctggtgctgctgagccagcgcctgagcaaagccgtggcgatcggcgccagtcaggtacaaggctggcgcgaccccgacgaccgtctgcatagtcgcctgtgtgattacgcgctaatcgcgctcgctctgctgttgctgcttccgccgctactggcggtgatcgtcgatggtctcaacgtcaatctgccgaaggtgctgggccaagccgcgctatggcaggcgctgtggacctcgctgcgtatcgccctcgccgccggtgtgctcagcgtcattctgaccatgatgctgctgtggagcagccgtgaactgcgcgcccgcaacctgccgctggccgggcagacgctggagctcagcggtatgctcatcctcgccatgccggggattgtgctggcgaccggtttcttcctgctgctcaataacagcgtcggcctgccggaatccgccgacgggattgtcatctttaccaacgcgctgatggctatcccctatgccctgaaagtgctggaaaatccaatgcgcgatattgccgcccgctatggcgctttgtgtcagtcgttggggctacaaggttttaaccggctgcgggtagtggagctgcgtgcgctgaaacggccgctggcgcaggccctggctttcgcctgcgtgctgtcaatcggcgacttcggcgtggtggcgctattcggcaatgaatctttccgcacgctgccgttctatctgtatcagcagatcggctcctaccgcagccaggacggcgcggtcaccgcgctcctgctcctgttgctgtgctttatcctttttactttgatcgagaaactaccgggacgcgatgctaaaactcaatga

SEQ ID NO: 87452 - DNA, 702 bp, Enterobacter aerogenes
atgctaaaactcaatgatgtcacctggctgtatcagcacttgccgatgcgctttacgctcagcgtcgagcgcggagagcgcatcgccgtgctcggtcccagcggcgccggaaagagcacgctgctgaatctgattgccgggtttctgccccccgccagcggtagcctgctgatcgacggcgagaagcataacgccacgccgccggcacagcgtccggtttctatgctgtttcaggagaacaacctgtttaaccatctcaccgtccggcagaatattggcctcggcattcaccccggcctgaagctgaaccgcgagcagcgcgcgcaggtcacggcgatagccggacagatgggaatggatacgctgctggatcgcctgcctggcgagctatccggcggccagcggcagcgggcggcgctggcccgctgtctggtgcgccaacagccggtgctgctgcttgatgaacccttctcggcgcttgatccggcactgcgccaggagatgctaacgctggtcgccgatgtctgtcagcggcagcagttgacgctgttgatggtatcgcacagcgtggaggatgcggcgcgcattgcgcctcgctccatcgtggtcgccgaagggcgcattgcctgggacggcgccactgacgacctgttaagcggcaacagcagcgcctcggcgctgttgggaattagcgcgaaatga

SEQ ID NO: 87453 - DNA, 768 bp, Enterobacter aerogenes
atgcaggcattgctggaacactttatcacccaatccacggtctactcgttgatagccgtgatgctggtggcatttcttgagtcgctggcgctggtggggcttatcttacccggcacggtcatgatggctggtctgggggcgcttatcggcagcggcgaagttaacttctggcaggcgtggctggcggggattgtcggctgcctgttgggagactggatctcattctggctcggctggcgctttaaaaagccgttacaccgctggtcgtttatgaaaaaaaatcgcgcgctgctggagaaaaccgaacacgcgctgcaccagcacagcatggtgacgattctgattggccgctttgtcgggccgacgcggccattggtgccgatggtcgccgggatgctcgacctgccggtagcgaagttcgtgctgccgaatattattggctgcctgctctggccgccgctctatttcctccccggcattctggcgggggcggcgatagatattcctgccgatgaaaacagcgccagcttcaagtggctgctactgggcgcggcgctgctggcgtggctggcgggctggctgtgctggcggctgtggcggagcgcgaaaacttccggcgatcgtctgacccgttggttaccgcgtggacgcctgctgtggctgacgccgttgatggtgacgctggcggtagcggcgctaacgtttgtcttccgccatcccctgatgccggtctaccttgagatactgcataaggtcatttcgcgctaa

SEQ ID NO: 87454 - DNA, 846 bp, Enterobacter aerogenes
atggccgaaacgcaaaacgatccgctgctgccgggctactcctttaacgcccatctggtcactggcctgacgccgattgaggcgcagggatatctcgatttctttatcgaccgcccgctgggcatgaaaggctatattctcaacctgacgatccgcggcgagggggtgatcaacaaccacggcgaacagttcgtctgtcgccccggcgatatgctgctgtttccgccgggggagattcaccactatggccgccatcccgacgccagcgagtggtatcaccagtgggtctatttccgcccacgcgcctactggcatgaatggctcaactggccaacgatcttcgcccataccggtttcttccgcccggatgagcaatggcaggcgcggtttggcgaactgttcgggcagatcgttgacgccgggcagggggcggggcgctattccgaactgctggcgattaacctgctggaacagttgctactgcggcgcatggaggcgattaacgaatcgctgcatccgccgctggataaccgggtgcgcgacgcctgtcagtacatcagcgaccatctggcggacagccatttcgatatcgccagcgtcgcccagcacgtctgtttgtcgccttctcgtttgtcgcatctgtttcgccagcagttggggataagcgtacttggctggcgggaagaccagcgaattagccaggccaaactgctgttgagtaccacccggatgccgattgccagcgtcggccgcaacgttggcttcgaagatcagctctatttttcgcgagtctttaaaaaatgcaccggcgccagccccagtgaattccgcgcaggatgtgaataa

SEQ ID NO: 87455 - DNA, 1710 bp, Enterobacter aerogenes
atggcaattgcgattggcctcgattttggtagtgactcagtacgcgcgttggcggtggaatgcgctaccggcgcggaactggccgcgagcgtagagtggtatccacgctggcaggaagggctgttctgcgatgggccgaataaccgcttccgccatcacccgcgtgattacattgaatccatggaatcagcgctgaaaagcgtactggcggcattaagcgctgaacaacgggcgacggtggtcggtatcggcgtcgacagcaccggctcaaccccggcgccgattgatgcagacggaaacgtgctggcgctgcgcgaagaattcgctgacaacccgaacgccatgttcgtgctgtggaaagatcacaccgcggtggaagaggcggaggccatcacccgcctgtgccacgcgccgggtaaagaagactactcgcgctatatcggcggcatctactccagcgaatggttctgggccaagatccttcacgtcactcgcgaagatagcgccgtcgcgcaggccgcggcgtcgtggattgagctttgtgactgggtacccgccctgctttccggcaccacccgtccgcaggatatccgtcgcggtcgctgtagcgccgggcacaaatcgttgtggcacgaaagctggggtggactgccgcccgccagtttcttcgacgaactcgacccgattattaaccgccaccttacctggccactattccgcgacacctggaccgcggatctccccgtcggcaacctgaccgccgaatgggcgcagcgcctcggtctgccggaaacggtggtcatttccggcggcgccttcgattgccatatgggcgcggtcggcgccggcgcgcagcctaacgcgttggttaaagtgatcggcacctccacctgcgacattctgatcgccgataaacagagcgtgggcaaccgcacggtgaaaggtatctgcggccaggtggacggcagcgtggtgccggatttcatcggtatggaggccggtcagtcggcattcggcgatatctatgcctggtttggccgcattctcggctggccgctggaacagctggcccaacagcaccctgaattgcgcgagccaatcaaagccagtcaaaaacagctgctgcctgcgctcaccgaagcctgggccaataatccctccctcgatcacctgccggtggtgctggactggttcaacggccgccgcacgccgaacgccaaccagcggctgaaaggcgttattaccgatttaaatctggccaccgacgccccggcattgttcggcggattgattgccgccaccgccttcggcgcccgcgccattatggagtgcttcaccgggcagggcattccggtgaataacgtgatggcgctcggcggcatcgcgcgcaagaaccaggtcatcatgcaggcctgctgcgacgtcctgaaccgcccgctgcaaatcgtcgcctccgatcaatgctgcgcgttgggcgccgccatcttcgccgccgtcgccgcgggcgtctatccggatatccctgccgcgcagcgcaacatggcaagcgaggtggaaaacaccctgcagccgcgcgcgcaacaggcgcaacgtttcgaacaactgtatcagcgctaccagcagtggtcggctagcgcggaacaacactatctcccttcggctgcaaaggcggaaaacgccccgcaatctccggcagcgctcacccattaa

SEQ ID NO: 87456 - DNA, 1503 bp, Enterobacter aerogenes
atgacgatttttgataactatgaagtatggttcgtaattggcagccagcacctgtatggccaggagaccctacgccaggtgacgaaacatgccgaacatgtggtgaatagcctgaatgcggaagcaaaactgccgtgcaagctggtgctgaaaccactcggcaccacgccggatgaaatcacgcatatttgccgcgacgccaactacgatgataaatgcgccggattagtggtctggctgcacaccttctcaccggcgaaaatgtggattaacggcctgacgctcctcaacaaaccgctgctgcaattccatacccaattcaacgcctccctgccatgggacagcattgatatggactttatgaacctcaaccagaccgcgcacggcggccgcgaattcggctttatcggcgcgcgcatgcgccagcagcacagcgtcgtcaccggccactggcaggataaagaagcgcaccagcgcatcggcgcgtggatgcgtcaggcggtttctaagcaggatacccgccatctgaaagtgtgccgcttcggcgataacatgcgagaagtggcggtaaccgacggtgataaagtggcggcgcagattaagttcggcttctcggtcaacacctgggcggtcggcgatctggtgcaggtggtgaatagcatcagcgacggcgatatcaacgcgctggtcgatgaatacgaaagcagctaccgcctgacgccagcagcgcaggtgcacggcgataagcgccagaatgtgctggacgccgcgcgcatcgaactggggatgaaacgcttccttgagcaaggcggtttccacgcctttaccaccacctttgaagaccttcacggcctgaaacagctgccgggtctcgccgtacagcgcctgatgcagcagggctacggctttgccggcgaaggcgactggaaaaccgccgctctgctacgcatcatgaaagtgatgtcgaccggtctgcagggcggcacctcctttatggaggattacacctatcacttcgacaacggcaacgatctggtgctgggctcgcacatgctggaagtgtgcccgactatcgctaccgccgagaagccgatcctcgacgtccagccgctgggaattggcggtaaggccgatccggcccgtctgatcttcaacacccaaaccggcccggcgatcgtcgccagcctgattgatttaggcgatcgcttccgcctgctggtcaacaccatcgaaaccgtcgcgacgccgcacgatctgccgaagctgccggtggccaacgcgttgtggcaggcgcaaccggatctacgtaccgcctcggaagcctggatcatcgccggcggcgcgcaccataccgtcttcagccatgcgctaaccctcgacgatatgcgccagtttgccgagctgcaggatattgagctgaccgtcatcgacaacgacacccgcctgccgtcgttcaaagacgcgctgcgctggaatgaagtctattacggtagcaaacgctaa

SEQ ID NO: 87457 - DNA, 696 bp, Enterobacter aerogenes
atgttagaagatctcaaacgccaggtgctggaggccaacttagcgctaccgcagcataatctggtgaccttaacctggggtaacgtcagcgccgtcgatcgtgacaaaggggtattggttattaaaccctccggcgtagattacggcctgatgaccgctgacgacatggtcgtcgtcagcctggaaaccggtgaagtggtggaaggcaacaaaaagccctcttccgatacgccgacccatcgcctgctgtatcaggcgtttccgacgcttggcgggattgtgcatacccattcgcgccacgccaccatctgggcgcaggccggacaatctattccggcgaccggcaccacccacgcagactatttttatggcccggtcccctgcacccggttgatgaccgatgcggagatcaacggcgaatatgagtgggaaaccggcaatgtgattgtcgaaaccttccgtcagcagggaatcgatccggcgcaaatgcccggcgtgctggtgcattcccacggcccatttgcctggggtaaaaacgccgaagacgcggtacacaatgccatcgtgctggaggagatcgcctatatggggatcttctgccgccagctggcgccgcagttgccggatatgcagcagacgctgctcgataagcactatctgcgtaagcacggggccaaagcctactacggccagtaa

SEQ ID NO: 87458 - DNA, 2358 bp, Enterobacter aerogenes
gtgacgcagccgcaagcaggatttttactcacccgtcactggcgggataccccgcagggaacggaactggccttctggctggcgaccgataacggcccgctgcaggtcacgctgccgccgcaggaatccgtggcgtttatccccgaaacgcagcggcggcaggctgaaagcctgttgcagggtgaaaacggctaccgtctggccccgcttgcgctaaaagatttccaccgccagccggttttcggcctgtactgccgcgcgcatcgccagctgatgcggctggaaaaaaagctgcgtgaaaacggcgtcaccgtttacgaaggcgatatccgcccgccggagcgctacctgatggagcgctttatcaccgccccggtgtgggtagaaggcgaaacgcgcggttcgcagctggttaacgcgcgcatgaaacctaatccggattaccgcccgccgctgaaatgggtctcgctggatatcgaaaccagccgccacggcgagctctactgcatcggcctggaaggctgcggccagcgggtggtctacatgttaggccccgagcccgccacgccgccggatgtgggcttcagcctggtctatgtcgccagccgcccgctgctgctggaaaagctcaacgcctggtttgccgaacacgatcccgacgtgctgatcggctggaatgtggtgcagttcgatctgcgggtcctgcaaaaacacgccgagcgctaccgcatcccgctgctgctcggccgcggcaatagcgagctggagtggcgcgagcacggttttaagaacggcgtctttttcgcccaagccaacggccggctgattatcgacggtatcgaagcgctaaaatcggcgttctggaacttctcctcattttcactcgaggccgtcgcccgtgagctgttgggcgaaggcaaagctatcgacaatccgtgggatcggatggacgaaatcgatcgccgcttccatgaagataaaccggcgctggcgacctataacctacaggattgcgagctggtgacacggatctttcacaagacggagatcatgccgtttctgctcgaacgggcgacggtcaacggtctgcccgccgatcgccacggcggatcggtcgccgccttcagccatctctatttcccacgcatgcaccggctgggctacgtggcgccgaatctcggcgaaattcccccgcaggccagtcccggcggctacgtcatggactcccgccccggcctgtatgactcggtactggtgctggactacaaaagcctgtatccgtcgatcatccgcacctttttaatcgatccggtcggcctggttgaagggctggcgcagcccgatgaccgccacagcaccgaaggatttctcggcgcccgcttctcgcgcgaaaagcactgcctgccaggcatcgtcgggcagatctggcacggccgcgatgaagccaagcgtcagcataataagccgctgtcgcaggcgctgaagatcatcatgaacgccttttacggcgtgctggggaccagcgcctgccgctttttcgatccacggctggcgtcgtcgatcaccatgcgcggccacgcgatcatgcgccagaccaaagcgctgattgaagcccagggctatgacgttatctacggcgataccgactccaccttcgtctggctcaaacgcccgcatagcgaagcgcaggcagcggaaatcggccgcaagctggttgcctatgtcaacgactggtgggcgcaggaattgggtaaaagccaactgaccagcgcgctggagctggagtatgaaacccacttttgccgctttttaatgccgacgatccgcggcgccgataccggcagtaaaaaacgttatgccgggatgattcaggaaggcgatgcccagcgcatggtgttcaaggggctggagacggtacgcaccgactggacgccgctggcccagcagtttcaacaggagctgtatctacgcatcttccgccatcagccgtatcaggattatgtgcgggagactatcgccagactgatgagcggcgagctcgatgagcagctggtttatcgcaagcgcctgcgccgaccgctggcggagtatcaacgcaacgtgccgccgcacgtgcgcgccgcgagactggcggatgaacacaacgtgaagcttggacgggcgcagcagtatcagcagcgcggcaccattaaatatgtctggactaccggcggcccggagccggtggattaccagcagtcgccgctcgattacgatcactatctgtcaaagcaattgcagccggtggcggaaggaatccttcccttcgtcaacgacgactttgctacaatagtgacagggcaactggggctattttga

SEQ ID NO: 87459 - DNA, 2907 bp, Enterobacter aerogenes
atgccttttacacttggtcaacgctggattagcgatacagagagcgaactaggactagggacagtggtagcgctggatgcgcgcatggtcactctccttttccccgccatcggcgaaaaccgtctgtactctcgcaacgattccccgattacccgcgtgatgtttaacccgggtgataccattaccagccacgaaggctggcagctccacgttgacgaagtaaatgaagaaaatgggctgctgtcctacaccggcacccgcctggatacgcaagaagaacatgttaccctgcgcgaagtcctgctcgatagtaagctcgccttcagcaagccgcaggaccgcctgttcgccgggcaaatcgaccggatggaccgctttgccctgcgctaccgcgcgcgtaagttccagagcgaacagtaccgcatgccgtggagcggcctgcgcggccagcgcaccagcctgatcccgcaccagttaaatattgcccacgacgtaggccgtcgtcacgcgccgcgcgttctgctggccgatgaagtgggcttaggtaaaaccatcgaagccgggatgatcctccaccagcagctgctctccggcgccgccgagcgcgtgctgatcgtggtcccggaaaccctccagcaccagtggctggtggaaatgctgcgccgcttcaacctgcgcttctcgctgtttgacgacgaacgctatgccgaagcgcagcacgacgcctacaacccgttcgaaaccgaacagctggtgatctgttccttagacttcgtacgccgcagcaagcagcgcctggagcacctgtgcgacgccgagtgggacctgatggtggtcgatgaagcgcaccacctggtgtggagcgaagaggcgccgagccgtgaatatcaggccattgaacagctggccgaacgcgtaccgggcatcctgttgttgaccgcgacgccggaacagctgggcatggagagccactttgcgcgcctgcgtctgctggatccaaaccgcttccacgattttgaacagtttgttgaagaacaacaaaactatcgcccggtcgccgacgccgtcgccctgctgctggcgggcaacaagctcaacgataatgaactcaatacccttggcgatctgatcggcgagcaggatatcgagccgctgctgcaggccgctaacagcgatcgtgaagatgctcaggccgcgcgccaggagctggtttcgatgctgatggaccgccacggcaccagccgcgtgctgttccgtaacacccgtaacggcgtgaaaggtttcccgaaacgcgagctgcacactattcgcctgccgctgccgacccagtaccagacggccatcaaggtctccggtattatgggcgcgcgcaaaaccgcggaagagcgcgcgcgcgatatgctctatccggagcagatctatcaggaatttgaaggcgataccggcacctggtggaacttcgacccgcgcgtcgaatggctgatgggttacctgaccagccaccgttcgcagaaggtactggtgatttgcgccaaagccgccaccgcgctgcagctggagcaggtactgcgcgagcgcgaaggtattcgcgccgcggtattccatgaagggatgtcgattatcgaacgcgaccgcgccgcggcgtggtttgccgaagaagacaccggcgcgcaggtgttgctgtgttccgaaatcggctccgaagggcgtaacttccagttcgccagcaacctggtgatgttcgacctgccgtttaacccggatctgctggagcagcgtattggccgtctcgaccgtatcggccaggcgcacgatatccagatccacgtgccgtatctggaaaaaaccgcgcagtcggtgctggtgcgctggtatcacgaagggctcgacgccttcgaacatacctgcccgaccggccgtaccgtctacgacagcgtccatgatgagctgataaactaccttgccgcgccagaatccaccgatggcttcgacgatctgatcaaatcctgccgccagcagcatgaagcgctgaaagcgcagctggaacagggccgcgaccgtctgctggagatccactccaacggcggtgaaaaagcgcaggctctggcggagagcatcgaagagcaggatgacgataccagcctgatcgccttctcgatgaacctgttcgatatcgtcggcatcaaccaggatgaccgcggcgaaaacctgatcgtcctgaccccatccgatcatatgctggtgccggatttcccgggcctgccggaagatggctgcaccattaccttcgagcgtgacgtggcgctgtcgcgtgaagacgcgcagttcatcacctgggaacacccgctgattcgcaacggtctggatctgatcctctccggcgataccggcagcagcaccatttcgctgctgaagaacaaggcgctgccggtcggcacgctgctgctggagctgatctacgtcgtcgaagcgcaggcgccgaaacaattacagcttaaccgcttcctgccggcgaccccggttcgcatgctgctggataaaaacggcaacaacctcgccgcgcaggtggagttcgaaagcttcaaccgccagctgagcgcggtcaaccgccataccggtagcaaactggtcaacgcggtgcagcaggacgttcacgcgattctgcagcagggcgaagcgcagatagccaaagcggcgcaggcgctgatcgacgcggcacgtaacgaagccgatgataaactgacggcggaactgtcgcgtctcgaagcgctgaaggcggtgaacccgaacatccgtgacgacgaactggcggctatcgaaagcaaccgccagcaggtgatggatgcactggcgcaggccggatggcgtctggacgcgctgcgtctgatcgtcgtcactcaccagtaa

SEQ ID NO: 87460 - DNA, 660 bp, Enterobacter aerogenes
atggcgatggaaaactacaatccgccgcaggatccctggctggtgattctgtatcaggatgagcacattatggtggtcaacaagccgagcggcttgttgtccgtgcccggcaggctggaggagcataaggatagcgtgatgacgcgtatccagcgcgatttcccgcaggccgaatcggtgcatcgcctggatatggctaccagcggcgtgattgtggtggcgctgaataaggccgccgagcgtgaactcaagcgtcagttccgcgagcgcgagccgaaaaagcagtacgtcgcccgcgtctggggtcatccgcagcctgcggaaggtctggtggatttaccgctaatttgcgactggccgaaccggccaaagcagaaggtgtgttatgaaaccggcaaagcggcgcaaaccgaatatgaagtgctggagtacgcggaggacaacaccgcccgcgtgcgcctgaagccgattaccgggcgctcgcatcagcttcgcgtgcatatgctggcgttagggcatccgatcctcggcgaccgcttttacgccacgccggaggcgctggcgatggccccgcgcctgctactgcatgcagaaacgttaaccatcacccatcccgcctacggcaacgcgatgaccttccgcgcgccgatcgacttttaa

SEQ ID NO: 87461 - DNA, 540 bp, Enterobacter aerogenes
atgtcagtgcatactcccgcccgggcgggcgtcagcatggaaaatctgctggcggcgaaagagcagcgcgcagcccgtcaacaagactggctcaaccattatcaacaaccggtcatttctctcaccctggtaacgccaggggcggtaaaagacagtattcgctatcgcaatatgatgggtgttgcgctgcaggcctgtgaccaacttctgtggcagcagcgttggaaaacgctcgaccgccaggtgttgtggctgcctaccggcccggaagcgatgtggtgcgttgagcactccgcggaagagatcaaagcgctatgcagcgaactggaacagaatcatccgctgggtcgcctgtgggatatcgatgtcatttgtccgcaagcggggctgattagccgccaggcgcagggcgaagcgatgcgccgctgcctgctgtgcgatgaaccggcccacgcctgcgcgcgcagccgtcgtcacgacaccgggctggtggtcgctcgcgttgaacagatgattgatgcgtggtttgcccgcgattaa

SEQ ID NO: 87462 - DNA, 1365 bp, Enterobacter aerogenes
atgagcaccacagacaacgcattctctgcaacccttgaacctattaacaaaccgaaagcctcgttgaagcagcgctggtggcatgtcatggatagctggaaagtggggattatcccgctgccgctatttttgctggccggcggtcttatcgcgctggactgccttggcggcaagctgccgagcgatatcgtggtaatggtggcgacgctggccttcttcggttttgcctgcggcgagttcggcaagcgcctgccggtacttggtaagcttggcgcggcggcgatttgcgccacctttattccttccgcgctggtccattacggcctgctgccggatgtggtggttgaatccaccaccaaattctataaatcgaccaatattctttatctctacatctgctgcattatcgttggcagcattatgagcatgaaccgcaccacgttgattcaggggttcctgaagatcttcctgccgatgctgtgcggcgaagttgtcggtatgttggtcggcgtgggagttggcagtctgttggggatggatccgttccaggtcttcttctttatcgtgctgccgattatggccggcggcgtgggcgagggggcgatcccgctgtcgattggctatgcggcgctgatgcatatggatcagggcgttgcgctgggacgcgtgctgccgatggtgatgctgggcagcctgacggcgattgtcatcgccggctgtctgaaccagcttggtaaacgcttcccgcatctgaccggcgaaggccagctaatgccgaaccgcagtaatgaaacccgcagcctgagcgaaagcgaaggatttggcggtaaaacggatgtggcgacgctggcctctggcgcgctgctggcggtgctgctgtatatgatgggcatgctgggacacaaattgattggcctgccggcgccggttggcatgttgttcctcgcggtgctgttgaagctggcgaatgtcgtttcgccgcgtctgcaggagggctcgcaggtggtgtataaattcttccgtaccgcggtgacttacccgattctgtttgccgttggcgtggcgattaccccgtggcaggagctggtaaacgccttcacgctgaccaacctgctggtcattgtttgcaccgtgtcggcgctggtggccaccgggttcttcgtcggcaaaaaaatggggatgcatccggtcgacgtggcgattgtctcctgttgccagagcgggcagggcggcaccggcgacgtcgccatcctgacttccggcaaccgtatgaacctgatgcccttcgcccagatagccacccgtatcggcggcgcgattaatgtgtcgttagggctgctgttcttaagtcatttcttatcgtga

SEQ ID NO: 87463 - DNA, 1626 bp, Enterobacter aerogenes
atgaaagtttcatttcaatttaagctgttcatctccctggtggcctttttctccatcttattcgctctgcttggggtctattattatctcgacgccagccgccagctgtatcaggaaatgagcgccagggcgaaaattcaggccgaagagattgcgctgatgcccaatctgcgccagcaggttagcctgcacgacccgcaggctatcggcgctttcatgaagcaaatcgccgtccacagcgacgccagctttatcgtcatcggtgatgataaaggcgtgcacctgtttcattccgtacacccggaatgggtcggcacccgcttagtgggcggcgataaccaggcagtgctggaaggcaaaactatcaccaccatccgtaaaggtggtttaggcgtctcgctacgcagtaaaacgcccattgtcgatgataacggacgggtgatcggcatcgtctccgttggctatctgaccagctatctcgacagcattaccgtgcaaaaggtggtgaatatttttgtcgccgccattctgttgctgatcgccctgtttatcttctcctggtattttacccgcagtattaaaaaacagattttttcgctggaaccgcgcgaaattggcctgctggtacgccagcaaaaagcgatgatggaatcgattttcgaaggagttatcgttatcgacagccagcgaagaattgaagtgattaaccacgccgcccgcagcctgctggggcttaagcagcccgcgcatctgctgcgcggcaaatcgattgatagcgtgatcgccccgcagccgttcttcgccagcgacgcaatgctggcgaatgatactcacgatgaactgtgtcgctttaaccagttgacggtactcgccagccgggtgcgcatcatgctggaaaactcgctgcagggctgggtgatcaccttccgcgaccgcgatgaaattaatgccctcaccgctcagctaagccaggtgaaacgctatgtcgataacctgcgcattatgcgccacgaacagctcaaccgcatgaccacgctctccggcctgctgcatatgggccactacgacgaagccattcgctatatacaggcgcaatcggagcatgcccaagaactattggacttcatctcctcgcgtttccgatcgccgacgctatgcggcctgctgctgggtaaagccacccgcgcctatgaaaaaggcgttgaactgagctttgatccggcctgccgtatcgatcgcccgctgtcgtcgctgatggagtctgaacttatttcgatcatcggcaatctgctggataacgccattgaagccacgcaacgcgccgaactaccgcacgagccggtcgaggtactgattcaactcaacgcccgcgagctgatgattgaggtggccgaccgcggtgtcggtatccgcccggatatccgcgagcgtatttttgaacgtggagtgacgacgaaaacccgtggcgatcacggtattggtctgtatcttattgaacattatgtgactcaggctggcggcacgattgaagtcgccgataatgcgccgcgcggaacaatatttactctgtttattcccgccgacccgccagcccatccgcaaccggagaccaacgatgcatcatga

SEQ ID NO: 87464 - DNA, 699 bp, Enterobacter aerogenes
atgcatcatgatctggtcgatgtgctgatcatcgaagatgaaaacgagctggcccgcctgcacgccgagctcattcagaaacacccgcgcatgcggctggcgggaacggccgcctcgctttcccaggcacggcagatgctgaacgccagaccgccgcagttggtcctgctggataattatctgccggacggcaaaggcgttacgctgatgaccgacccgcttctggccaacgccaattgttcggtcattttcatcaccgccgccagcgatatggaaacctgcagccaggcgatacgcaatggcgccttcgactacattctcaagccggtctcatggaaacgactgagccagtcgctggagcgctttattcagttttatgaccagcagcgggaatggaaaatcgtcgatcagcaaaacgttgattccctgtatcagctgcaggccaaaaattttcgcgccgataacggcagcaagggcatcgaggaaaagaccctggcgctggtgcaaaatttatttcatggccgcgaaacgcactgcttttcagtggacgaagtggtcagcgaaaccggactgagcaagaccacagcccgtcgttatctcgagcactgcgtagaagtgagttttctggaagtggaaatgctgtacggtaagattggccacccgcggcggatgtatcgccgcgcgcggggcgcgaactaa

SEQ ID NO: 87465 - DNA, 828 bp, Enterobacter aerogenes
atgcagtatttgggtaaagtgattggtgtagcggttgcattattgatgggtggcggcttctggggcgtggtgcttggctttttagtcggccatatgtttgaccgggcccgtagccgtcgcctgaatttatttgccaaccagcaggagcggcagtcgctgttcttttccaccacttttgaagtgatggggcatctgaccaaatcgaaaggtcgcgtcacggaagccgatattcatgtggcgaatgtgctgatggatcgaatgaacctgcacggcgagtcgcgcaccgcggcgcagcaggcttttcgcgccggtaaggccgataattatccgctgcgcgagaaaatgcgtcagctgcgcagcgtctgctttggtcgcttcgatttaattaggatgtttctggaaattcagctgcaggcggccttcgccgacggcgaattacatcccaatgagcgcgaagtattgtttgttatcgccgacgagctcggtatctcgcgtgcgcagttcgagcagttcctgcgtatgatgcagggcggcgcgcagttcggcggcggctcgcagcagcaatcctatggtcagcgcggcggcaatggcggctggcaacaggcgcagcgcggcccgacccttgaagacgcttgtaacgtgctcggcgtgaaaccgaccgatgatgccacaaccgtcaagcgcgcctatcgtaaattaatgagcgaacatcatccggacaagctggtggccaaagggctgccgccggagatgatggaaatggcgaagcagaaagcgcaggagatccagaaagcctgggagctcatcaaagagcagcgcggcttctga

SEQ ID NO: 87466 - DNA, 2373 bp, Enterobacter aerogenes
atgacggaacaacaaataaaacgtatgaaaaaacgtatccccagcctcctggccaccatgatcgccagcgccttgtatagccaacagggcatggccgccgatctcgccacgcaatgtatgcttggcgtgccaagctataatcgccctctcgttgaagggaagcctaacgatcagccggtgacgattaacgccgatcatgcgaaaggcaactaccctgataatgccgtatttaccggcaacgttgatattaatcaggggaatagtcgcctgcaggccgacgaggtgcagttgcatcagcagcagccggcgggacaaccgcagccggtgcgtaccgttgatgcgcttggcaacgttcattacgacgataaccaggttattctgaaaggcccgaaggcgtggtcgaacctgaataccaaggataccaacgtctggaaaggcgactatcagatggttggccgtcaggggcgcggtactgccgacctgatgaagcagcgcggcgaaaaccgctataccatacttgaaaacggcagcttcacctcctgtctgccgggctctgatacctggagcgtcgtcggcagcgaagttatccatgaccgcgaagagcaggttgccgaaatctggaacgcgcgctttaagcttggttccgtccctattttttatagcccgtatttgcagctaccggtcggcgataagcgccgttccggttttctgatccctaacgccaaatacagcaccaaaaatggcgttgaattctcactgccttattactggaatatcgcgccgaacttcgacgccacgattacgccgcactacatgaataaacgcggcggcgtgatgtgggaaaacgaattccgctatctgactcaggcgggcgcaggtttatttgaattcgattatctgccgtctgataaagtgtacgaagacgatcattctaacgacagcaacagccgccgctggatgttctactggaaccacaacgcggttatcgatcaggtctggcgcctgaacgccgactacaccaaagtcagcgacccggattactttaacgatttcagctccaagtacggctccagtaccgacggctacgcgacgcaaaaattcagcgccggctacgttaaccagcattttgacgccaccgtgtcgaccaaacagttccaggtcttcgaccgtagctcaagcaactcctacggcgccgaaccgcagctggatattaacgcctaccagaatgacgtcggtccattcgatactcatctgtatgcgcaggcggtgcacttcgtcaacaccaacggcgatatgccggaagcgacgcgtctgcacgtagagccgacgatcaacctgccgctgtctaacggctggggaagcatcaataccgaggcgaagctgctggcgacgcattaccagcagagcaatctcgataagtacaacgcggccaacggtaccgattacaaagattccgttaaccgcgtgatgccagagttcaaaattgacggcaaattggtcttcgagcgcgatatgcaggagggttatacccaaaccctggaaccgcgcatgcagtatctgtatatcccgtatcgcgaccagagccacatcggcgcctacgactcgaccctgctgcagtccgactatagcggcctgttccgcgaccgctcctacagcggtttggaccgtatcgcatcagccaatcaggtcaccaccggcgtcacatctcgcgtatatgatgacgcggccgttgaacgttttaatatttccgttggtcaaatctactatttcaccgagtcccggaccggtgcggacaacatcaactgggagaataacgacaccacgggttcactggtgtgggccggcgacacttactggcgcatctccgatgactggggtttacgcggggggatccagtatgatacgcgtctggataacgtcgcaaccggcaacggaaccattgaataccgccgcgacgaaaaccgcttagtgcaactgaactaccgttatgcgagtccggaatatattcaggcgacgctgccttcgtattccaccgctcagcagtataaagaaggtatttctcaggtaggtatgaccgccagttggccgattgtcgatcgttggtcagtggtcggcgcatactacttcgataccaataccaaaaaagcggctaaccagatgttaggggtgcagtacaactcttgctgctacgctatccgccttggctacgaacgtaagctcaacggctgggataacaacagcaacggcggcgagagcaaatacgataacaccttcggtatcaacatcgaactgcgtggtctgagctccaactacggacttggcacccagcagatgctgcgctcgaacattttgccgtaccagagctccctgtaa

SEQ ID NO: 87467 - DNA, 1287 bp, Enterobacter aerogenes
atgaagaactggaaaacgctgcttctcggtatcgccatgatcgcgaataccagtttcgccgccccgcaggtggtcgataaagtagcggctgtcgtcaataatggcgttgttctggaaagcgacgtcgatggtctgatgcagtcggtgaagctcaacgctggtcaggcgggacagcagctgccggatgacgcgaccctgcgtcatcagatcctcgaaagattgatcatggaccagatcgttctgcaaatggggcagaaaatgggcgtaaaagtcagcgacgatcagcttgatcaggccatcgctaacatcgccaaacagaacaacatgtcgatggatcagatgcgtagccgtctggcctatgaaggcatcaactacaacacctaccgtaaccagatccgtaaagagatgctgatttcggaagtgcgtaacaacgaagtgcgccgccgcatcaccgtgctgccgcaggaagttgaagcgctggccaagcagattggcgatcagaacgatgccagcaccgagctgaacctgagccacatcctgatcgcgctgccggaaaacccgacctccgatcaggttgcggctgcggaagaacaggcgaagtccgtcgttgaacaggcccgtagcggcgctaacttcggcaaactggctatcacctattccgctgaccagcaggcgctgaaaggcggccagatgggttggggccgtattcaggagctgccgggtatcttcgcgcaggcgctgagtaccgcgaagaaaggcgatgttgtcggtccgattcgttccggcgtcggcttccacatcctgaaagtgaacgatatgcgcggcggcagccagaatatctccgtcaccgaagttcatgcccgtcacatcctgctgaagccgtcgccgatcatgaatgacgcccaggcccaggcgaagctggagcagattgcggcagacattaagagcggtaaaacgactttcgataaagcagcgaaagagttttctcaggacccgggctccgccaaccagggcggcgacttaggctgggcgacgccggatatcttcgatcctgcgttccgcgatgcgctgatgcgcctcaacaaaggccagactagcggtccggttcactcctccttcggctggcatctaatccaactgatggatacccgcaacgtcgacagaaccgacgccgcgcagaaagaccgcgcttaccgcatgctgatgaaccgcaaattctctgaagaagcggcaacctggatgcaggaacagcgcgccagcgcttacgtcaaaattctgagcaactaa

SEQ ID NO: 87468 - DNA, 981 bp, Enterobacter aerogenes
atgcaacgtgttgttatcactcccggcgaacccgcggggattggtcccgaccttgtcgccgagcttgcgcagcgcgactggccggttgaactggttatttgcgccgatggcgccctgttaactgaccgagcctgccagctcggtcttcctttatcgctcctcccctacgatccaacgcgccctccgcagcctcagcgggcaggaacgctcacgctgctttccgtccccctcaacgcgccggtgcagccgggcgtgctcaatgtcgagaatggcggctatgtggtggaaacgctggcgcgcgcctgcgatggctgccttaatggcgaattcgcggcgctgattaccgggccggtgcacaaaggcaacatcaacgacgccggcatcgcctttaccggccataccgagttcttcgaagagcgcgctcacgccagtaaagtggtcatgatgctggcgaccgaggagctgcgggtcgcgctggccacgacccatcttccgctaaaggcaataagcgaggcgattacgccggagctgctgcgcgaagtgattaccatcctggatgccgatctgcggcataaatttggcatcgctcaaccgcacgtgctggtttgcggcctgaatccccacgccggcgaaggtggccacatggggacggaagagatcgataccatcattccggtgctggaagagatgcgggcgaagggcatgaatcttagcggtccattgcctgcggataccctttttcagccaaaatatctcgataatgccgatgcggtactcgcgatgtaccacgatcagggcctgcccgtgctaaaataccagggctttggccgtggcgtgaatattacgctcggtttaccttttattcgtacctccgttgaccacggtaccgcgctggaattagccggtcagggaaaagcggacgtcggcagttttatcacggcgcttaatctcgccatcaaaatgattgttaatacccaatga

SEQ ID NO: 87469 - DNA, 822 bp, Enterobacter aerogenes
atgaataatcgagtccatcagggccatttagcccgtaaacgcttcgggcaaaactttctcaacgatcagttcgtgatcgacagcattgtctcggccatcaatccacagaaaggccaggcgatggtcgaaatcggcccgggtctcgccgcgctgaccgaaccggtcggcgaacgcctcgatcaattaaccgttatcgagctggaccgcgatctggcggcccgcctacagacgcatccgttcctcggacctaagctgaccatttaccagcaggatgcgatgaccatgaatttcggcgaactgtcggagaaaatgggccaaccgctgcgcgtcttcggcaacctgccgtacaacatctcaacgccgctgatgttccacctcttcagctatactgatgccattgccgatatgcattttatgctgcagaaggaagtggttaatcgtctggttgccgggccgaacagtaaagcgtatggtcgtttaagcgtaatggcgcagtactactgccaggtgatcccggtacttgaagttccgccgaccgcctttacgccgccgccaaaagtggattctgccgtcgtgcgtctggtgccgcaccgcaccatgccgtacccggtgaaggatgtccgcgtgctgagccgtatcactactgaagccttcaaccagcgccgtaagaccattcgtaatagtctcggcaatctgtttagcgttgaagtgctggcggagctgggcgtcgacccggcggtacgtgcggaaaatatttctgtagagcagtactgtaagatggccaactggttatccaacaatctgccttcgaaggagagctaa

SEQ ID NO: 87470 - DNA, 378 bp, Enterobacter aerogenes
atgattaattcgcctcgtgtttgcgtccaggtgcaaagcgtctatatcgaatcgcaatcttctccggaagaagagcgctacgtcttcgcttacaccgtcaccattcgcaacctggggcggagtcaggttcagcttctcggccgctactggcttatcaccaatggacacggtcgcgagacggaagtccagggtgaaggggtggtcggcgaacagccgcacatccctgccggcgaagagtatcaatataccagcggcgcggttatcgaaacgccgctgggcaccatgcagggtcactatgagatgattgatagcaacggcgtgccgttcaatatcgagatccctgtcttccgtctcgcagttccaacgcttatacattaa

SEQ ID NO: 87471 - DNA, 849 bp, Enterobacter aerogenes
atggctacataccttattggcgacgttcatggttgctacgatgaactgatcgcattgctggagcaggtggagtttaaccctgatacggacacactgtggctcactggcgatctggtcgcacgcggccccggctctctggaagtgctgcggttcgtgaaagcgctcggcgatagcgtgcgcatcgtgctgggcaaccatgacctgcatctgctggcggtatttgccggcattagccgcaacaagcccaaagaccgtctgacgccgctgctggaagcgcccgacgctgacgaactgctcaactggctgcgtcgccagccgctgatgcaggtcgatgaagagaagaagctggtgatggctcatgccggcatcacgccgcagtgggatctggaaaccgccaaacagtgcgcgcgcgatgtcgaagccgtgctggcgagcgactcctatccgttcttcctcgacgcgatgtatggcgatatgccgaaccactggagcaatgagctcagcggcctggcgcgcctgcgctttatcaccaacgccttcacccgcatgcgctattgcttcccgaacggccagttggatatgtacagcaaagaggcgccggaagacgcgccagccccgcttaagccatggtttgccattccgggcccggtcgcccgcgagtacagtatcgcctttggccattgggcgtcgctggaaggccgcggtacgccggaaggtatctatgcgctggataccggctgctgctgggggggcgatctgacctgcctgcgctgggaagataaaacgtatttcacccagcgttccaaccgccagaaaagcctcgacgaaggcgaagcggtcgcctcctga

SEQ ID NO: 87472 - DNA, 480 bp, Enterobacter aerogenes
atgattagtctgattgcggcgttagctgtagatcgcgtaattggcatggagaacgctatgccatgggacttgcctgccgatctcgcctggtttaaacgtaataccttaaacaagccggtggttatggggcgtttgacctgggaatccatcggtcgcccgttgccaggacgtaaaaatatcgttatcagcagcaagccgggcagcgacgatcgcgtgcagtgggtgaagtctgttgatgaagcgattgccgcctgcggtgacgcggaagagattatggtgatcggcggtggccgcgtttacgagcagttcctgccaaaagcgcacaaactctacctgacccatattgatgcggaagtggaaggggatactcatttcccggattacgatccggacgaatgggaatcggtattcagcgagttccatgatgccgatgcgcaaaactcccatagctactgcttcgagatcctcgagcgccgttaa

SEQ ID NO: 87473 - DNA, 1866 bp, Enterobacter aerogenes
atggatagccatacgctaatacaggcgctgatctacctcggatccgctgcgcttatcgtgccgatcgccgtgcgtctggggctggggtcggtactggggtatttgatcgccggctgcgttataggcccgtgggggctgcgcttggtcactgacgctgaggcgattctgcatttcgccgaaatcggcgtcgtactgatgctgtttgtcatcggtcttgagctggatccgcagcgcttatggaagctgcgcgcctcggtatttggcggcggcgcgctgcaaatggtggtgtgcggcgcgtttatcgggctgttctgcatgctgcttggattgcgctggcaggttgcggagctcatcgggatgacgctggcgctgtcgtcgacggcgattgcgatgcaggcgatgaatgaacgtaacctgacggtgacgcaactggggcgtagcgcctttgccgtgctgttgttccaggatatcgctgctattcctttggttgcgatgattccactgctggcggccagcggcggctcaacgaccctggccgcgtttgcgctgtcggcgttgaaagtcgccggcgcgctggcgctggtggtgctattagggcgctatctgacccgcccggtgctgcgcttcgttgcccgctccggtctgcgcgaagtattcagcgccgtggctctgttcctggtcttcggcttcggattgctgctggaggaagtcgggctgtcgatggcgatgggcgcgtttcttgccggggtgcttctggcaagttcggaataccgccatgcgctggaaagcgatatcgaaccgtttaaagggttgctgttggggctgttctttatcggcgtcggcatgtctattgactttggtaccctcgtcacccatccgctacgtatcctgatcctgctggtgggtttcctggcgatcaaagccctgatgctgtggctgattgctaaaccgctgggcgtaccgcgcgcgcagcgccgctggtttgctgtgctgctggggcaggggagtgagttcgctttcgtggtcttcggcgccgcgcagatggccgatgtgctggatagtgaatgggcgaaggcgctgacgctggcggtggcgttatccatggcggcaacgcccatcctgctggtgctgctgacgcggatggagaaatccgccagcggccaggagcgcgaagcggacgagattgatgaagagcagccgcgagtgattatcgccggttttggccgctatgggcagattgccgggcgcgtgctgctttccagtggcgtgaaaatggttatcctcgatcacgatccggatcacgttgataccctgcgcaagttcgatatgaaggtgttttacggtgatgccacgcgagtggatctgctggaatcggcaggggcggcaaaggcagaagtgctgattaacgccatcgacgacccgcaggccagcctgcagctggtggagctggcgaaagagcacttcccgcatctgcagatcatttcgcgtgcccgcgatgtcgatcactacattcagctgcgccaggccggtgtggaagcgccggagcgtgagaccttcgaatcggcgctgaaaagcggtcgcatgacgctggaagccctgggccttggcgcttatgaggcccgcgagcgcgccgatctgttccgtcgtttcaaccaacagatggtagaagagatggtggcgatggcggaaaatgatgccgcctcgcgggtggcggtgtttaaacggaccagcgatatgcttaccggcattatcaacgaggaccgtaatcatctgtcgctggtgcagcgccacggctggcaaggtactgaagaaggacggcacaccggagacgttcgcgatgagccggagaataagccttcaacctga

SEQ ID NO: 87474 - DNA, 534 bp, Enterobacter aerogenes
atgattctgataatttactcgcatccttatccgcatcactcgcatgcgaataaacggatgcttgagcaagcagggacgcttgatggcgtagagatacgctccctctatgagctatatcccgacttcaatatcgatatcgctgccgagcaggcggcgctggcgcgcgccgatctggttatctggcagcatccaatgcagtggtacagcgtaccgccgctgctaaaactgtggatggataaagtgctgtctcacggctgggcgtacggccacaatggtattgcgttgcatggtaaatcgctgatgtgggcggttactaccggcggcggcgaaagccatttcgatattggttcattccccggctttgacgtgctggcgcagcctctgcaggcgacggcgctgtactgtggcatgaaatggctgccgccgtttgccatgcactgtacctttatctgcgatgacgaaacgctgcaggcgcaggcccgtcattatcgtcaacgcttaatcgaatggcaggaggcgcataacaatggatag

SEQ ID NO: 87475 - DNA, 2841 bp, Enterobacter aerogenes
atgagcaataaacactttgaactaaacagaacaaccaaaatgctggcaaggatatttcccgccttattaatgttaacgccaatagttgtcggcgcggcaaccattgaccagtcaacctccgcgccgcaagacttctcggctgatagcgaatacgttattaatagagacgttaccgtctcctccgcagataacaccccagcagtatccgttagcgggatgaacgtagaaaaagtcaccaacgaaggtaatatttccggagcgggtatcggtctggatattaatatcgatgcgcaatcagtcgaaattaataataatgaaaatgcaattatttcatctgcaactgataatgccgttaacgtgcaatcaatggcgggtacgtttaataatagcggaatcattactggcgctaacaacggtattttcgttagcgaagagtcatcggcaattagtatcaccaataccgataccggcgtgattaccggcaaaaacggcctgagttcgcaaattggcgtcgggttagataacagcggcgccatcaccggtaccgctggcgatggtattgcgttaagcgacggcaacagcaaaatcaacaacagcggcaccgtgcagggcagcgagaacgggatcaacgttgttgatagcgcgaaagccgatatcatcaacagcggtttactcggcggcggcggtacggccgtcatgttcgccagcagcaaaaataacagcctggtgctcaataccggttcctcgctcatcggcgatgtcatctccacgggctcaacgggtaatacactctcgctggtgggctctggtacggaagacagcaattttgtcggccttcatgatggcgacggttttgcctccgtgaaaatgaacggcgaggcctggacgctcaccggcaacctggacatcatcggcagcggcgattccctccaggttaatagcggtcagttaacgctggcgggcgctgtcgctaatagcggcaacacgctggtcgcggaagcggccacgctacagttgggcaacgggcagaaaaccgcgaccctcaccggcagcatgaccaacaatggcacagtgatcttcaatcagggaagcgactctacgtttgccaccagcatcatcggtagcggcaacgtggaaaaagtcgatgccaataccctgaccttaaccggcaccaatagctataccggtaatacccttctgaaaagcggcaccactctggtcgcggaaggcgccactctcggtgtagcagacagcgacgccaccatcaccatcgaaaatggcgcgcaatttgccagcgccggcgaagtgaataacaacattgatatcctcagcggcggtatcctcgcggcgtggaatgcggttgaaggtaacgcaacgctaagaacatccggcgtcgatacgattaacggcaatgtgaccaacagcggtacgctgttactcagcgccgccgataatagcgttggcaacaattttaccattaacggcgactataccggttccgccggcagccagatcgtaatgaacagcaccctcggcgaagacagctcgccgaccgaccatttatcaattaccggaagcagctacggccagtctggcgtcagcatcgccaatatcggcgggctgggcgcgcaaaccgttaatggtatggagattgtcagcgtcagcggcagctcagaagcacagttaaccttatccaaaccggttgtcgccggggcttatgagtatggtctgtatcaacacgacaacggcaactggtatctggaatccaaagcgaccccgtctgacgatccgtcggatgatactgacgatggtgacagcggcagcgatagcggcactgatggcggcagtggcactgatatcgacagcgataacggcagcaataccgataatggcggtcaatccgcgccagaagtgatggcgccggaagtcggcgcttatctgggtaactaccttgctgcgcagagtatgttcctgcataaacgtgacgatcgcgaccagctcacgttccgcaacgaagacaatctgaacacctggatgtacgttaagggccgctatcatgaaaacgatgccggcggcgataaagtcagctatgacaccactaccaccgtgcttcaggtcggcagtgatttcatgagcaagccgatggacaaagggatactgcgtgccggcggcatgtttggcgcgggccaggcgaaaacagactcggatgcgaaacacaacgtgcgtgacgcgcagggtaaagtcgacggtttcaacgttggcctgtacgcgacctggcaggaagatccaaaattacgtctgggcagctacatcgatacctgggcgtcctacagctggtataacaacacggtcaccagcaatcgcaacaatgaaaagtatgatagcaaaggctttgccgcctctgtcgaagtcggccatgcatgggtgatcccttcagacaatgcgcgtacctggaagattgaacctcaggcgcagatgatctacagctatctcgatcaggaaaatcataccgatccggatggcgtgcgggtaacgaccgtggataacaatagcctgtttggccgtctcggcgtgaagagcagctatttcgagcaacacgatgttaaagcgtggcagccttatgtcgccgtaaactggctgaaaggcgcgggtcaaaacgatctggcattcaatggcgaaaaagtcagcaacgatacgcctgacgatcgcggtcagttagagctgggcgtaaccggtaatgtgaacgagacgaccaccatctcgctgcgcgccagcggcgaatggggtgaaaacagctacgccgcgtatggcggccacattctgctgaatcaccgttggtaa

SEQ ID NO: 87476 - DNA, 234 bp, Enterobacter aerogenes
atgcggaacaaaattctggtggcatccgcgctggcggcaacggcgatggtatttgtggcaggttgctcatcaaatcagtcgctcaaaacgacagatggcaaaacaattgtgaccagcggtaagccgcaggtcgatgatgatacaggcctggtatcctacaaaaatgcggaaaccggtcgcgtggagcagattaatcgcgaccaggtgaagtcaatggacgagctggataactaa

SEQ ID NO: 87477 - DNA, 3225 bp, Enterobacter aerogenes
atgccaaaacgtacagacataaaaagtatcctgattctgggcgcgggcccgattgttatcggtcaggcgtgtgagtttgactactctggcgcccaggcctgtaaagccctgcgcgaagagggttaccgcgttattctggtgaactctaacccggcgaccatcatgaccgacccggaaatggccgatgcgacctatatcgagccgattcactgggaagtggtgcgtaaaattatcgaaaaagagcgtccggacgcggtgctgccgaccatgggcggccagaccgcgctgaactgcgcgctggagctggagcgtcagggcgtgctggcagagttcggcgtgaccatgattggtgcgaccgccgatgcgatcgataaagcggaagaccgccgtcgcttcgacgtggcgatgaaaaaaatcggtctcgacaccgcgcgttccggcattgcgcacaccatggaagaagcgctggcggtggccgctgaagttggcttcccatgcatcatccgtccgtcctttactatgggcggcaccggcggcggtatcgcctataaccgcgaagagttcgaagaaatctgcgaacgcggcctggatctctctccgaccaacgaactgctgattgatgaatcgctgatcggctggaaagagtacgagatggaagtggtgcgcgataagaacgataactgcatcatcgtctgctcgattgaaaacttcgatgccatggggattcacaccggcgactccatcaccgttgccccggcgcagaccctgaccgacaaagaataccaaatcatgcgtaacgcctcgatggcggtactgcgtgaaatcggcgtggaaaccggcggttctaacgtacagttctcggtgaacccgaaagatggtcgccttatcgttatcgaaatgaacccgcgcgtatcccgctcttcggcgctggcctcgaaagcgaccggcttcccgattgccaaagtggcggcgaaactggcggtgggttacaccctcgacgagctgatgaacgacatcaccggcggccgtactccagcctccttcgaaccgtccatcgactatgtcgtgaccaaaattccacgctttaacttcgaaaaattcgctggcgctaacgaccgtctgaccacgcagatgaaatccgtcggcgaagtgatggcgattggtcgcacgcagcaggaatctctgcagaaagcgctgcgcggcctggaagtgggcgccaccggcttcgacccgaaagtcagcctcgacgatccggaagcgctgaccaaaatccgccgcgagctgaaagacgcgggcgccgagcgtatctggtacatcgctgatgccttccgcgccggcctctccgtcgacggcgtcttcaacctgaccaatatcgaccgctggttcctggtacaaatcgaagaactggtgcgcctggaagagaaagtggcggcagtgggcatcaacggcctcgacgctgacttcctgcgccacctgaagcgtaaaggctttgccgatgcgcgtctggcgaaactggcaggcgtacgcgaagcggaaatccgcaagctgcgcgatcactacaacctgcacccggtttacaagcgcgtggatacctgcgcggcggaattcgccaccgataccgcctacatgtactccacttatgaagacgagtgcgaatctaatccgtccgttgaccgcgataaaatcatggttctcggcggcggtccgaaccgtatcggccagggtatcgagtttgactactgctgcgtacacgcctcgctggcgctgcgcgaagacggttacgagaccatcatggtcaactgtaacccggaaaccgtttcgaccgactacgacacctccgaccgtctgtacttcgagccggtaacgctggaggacgtactggaaatcgtgcgcatcgagaagccgaaaggcgtcatcgtgcagtacggcggccagaccccactgaagctggcgcgtgaactggaagccgcaggcgtgccggttatcggcaccagcccggacgccatcgaccgcgctgaagaccgcgagcgcttccagcatgcggttgaccgtctgaaactgaagcagccggcgaatgccaccgtgaccgcgattgagcaagcggttgagaaggcaaaagagatcggctatccgctggtggtgcgcccgtcttacgtgctcggcggccgcgcgatggaaatcgtctacgacgaagctgacctgcgccgttacttccagacggcggtgagcgtctccaacgatgcgccggtactgctggaccgtttcctcgacgacgcggttgaagtcgacgtcgacgctatctgcgatggcgaaatggtgctgattggcggcatcatggaacatatcgaacaagcgggcgtgcactccggcgactctgcctgttctctgccagcctacactctgagcaaagagattcaggatgtgatgcgcgagcaggtacagaagctggccttcgaactgcaggttcgcggcctgatgaacgtacagttcgcggtgaagaacaacgaagtgtacctgattgaagtcaacccgcgcgcggcgcgtaccgtaccgttcgtctcgaaagccaccggcgtaccgctggcgaaagtggcggcacgcgtaatggccggtaaaacgctggcgcagcagggtgtcaccaaagaaatcatcccgccgtactattcggtcaaagaagtggtactgccgttcaacaaattcccgggcgttgacccgctgttagggccggaaatgcgctctaccggggaagtgatgggcgtgggccgcaccttcgcggaagcgttcgccaaagcgcagctgggcagcaactccacgatgaagaaacaggggcgcgcgctgctctccgttcgcgaaggcgacaaagagcgcgttgtcgacctggcggcaaaactgctgaaacagggcttcgagctggatgcaacccacggtaccgcgattgttctgggtgaagccggtatcaatccgcgtctggtgaacaaggtgcatgaaggtcgtccgcacattcaggaccgtatcaagaatggcgaatatacctacatcatcaacaccaccgcaggacgtcaggcgattgaagactccaagctgattcgccgcagcgcgctgcaatacaaggtgcattacgacaccaccctgaacggcggcttcgccaccgcgatggcgctgaatgccgatgcgaccgagaaggtgatttcggtgcaggaaatgcacgcgcaaatcactaaataa

SEQ ID NO: 87478 - DNA, 1149 bp, Enterobacter aerogenes
ttgattaagtcagcgcttttggttctggaagacggaacccagtttcacggtcgggccatcggggcaaccggcacggcggttggggaagtcgttttcaatacttcaatgaccggttatcaagaaatcctcactgatccttcctattcccgccaaatcgtcactcttacttatccccatattggaaatgtcggcaccaacgccgccgatgaagaatcttctcaggtacatgcacaaggtctggtgattcgcgacctgccgctgattgccagcaacttccgcaataccgaagacctttcttcttacctgaagcgccataacattgtggcccttgccgatatcgatacccgtaagctgacgcgtttactgcgtgagaaaggggcgcagaatggctgcatcatcgccggcgataatcttgatgcccaactggcgctggaaaaagcccaggcattccctggtctgaacggcatggacctggcgaaagaggtcacaaccgcagagacttacgcctggacccaggggagctggacactggcgggcgacctgccggaagcgaaggcggaaagcgagctgccgttccacgtcgtggcttatgacttcggcgccaagcgcaatatcctgcggatgctggttgaccgcggctgccgcctgactatcgttccggcgcaaacgtcggcagaagacgtgcttaagctgaatccggacggtattttcctgtctaacggccctggcgacccggcgccgtgcgattacgccatcgcggcgattgaaaaattcctcaccaccgatattccggtctttggcatctgtctcggccatcagctgctggcgctggcgagcggcgcgaagaccattaagatgaaattcggccaccacggcggtaaccacccggttaaagatatcgataacaatgtagtgatgattaccgctcagaaccacggctttgccgttgacgaagcgacgctgcctgccaacctgcgcgtgacccacaagtcactgttcgacggcaccctgcaggggatccatcgtaccgacaagccggcgtttagcttccaggggcaccctgaagcgagcccgggcccgcacgatgccgcgccgctgttcgaccactttatcgagttaattgagcaataccgtcagtccgcgaaataa

SEQ ID NO: 87479 - DNA, 822 bp, Enterobacter aerogenes
atgcaagatgcacaaatccgcgtggccatcgccggcgcgggcggccggatgggacgccagttaattcaggctgcgctgcaaatggacggagtggcgcttggcgcggcgctggagcgcgaaggttcaagcctggtgggcagcgatgcgggcgagctggcaggcgcaggcaaatcaggcgttacggtacaaagcagcctggcggcggtaaacgatgatttcgatgtattgatcgattttactcgcccggaaggcacgctcaaccatttggctttctgccgtcagcacggcaaagggatggtgatcggcaccaccggttttgatgatgccggaaagcaggcgattagcgatgccgcgcaggacattgccatcgtctttgccgctaactttagcgttggcgtcaacgtgctgttaaagctgctggagaaggcggcgaaggtgatgggcgattataccgatatcgaaattatcgaagcgcaccacaggcataaagtggatgcgccatcaggtaccgcgctggcgatgggcgaggcgatcgccggtgcattgaacaaagatctgaaggactgcgccgtctacagtcgtgaaggtcataccggcgaacgcgttccgggtaccattggctttgctaccgttcgcgcgggcgacatcgtcggcgaacatacggcgatgttcgccgatatcggggaacgtatcgaaattacccataaggcttccagtcggatgacttttgccaatggcgccgttcgttctgctttgtggttgaaagacaaaaaaagtggtcttttcgacatgaaagatgtgcttgatctgaatgatttataa

SEQ ID NO: 87480 - DNA, 909 bp, Enterobacter aerogenes
atgagcgaagtgttaatcaatccgcagcgttcgctgcgcgtgaaaccgctgaacgctgaagaggtggtcagcgcggtagagcgcgcgctgttgaccgaagttcgcctgaccccaaagcccgggttggtggatattcgtaacgctggcgcccatcacgatatggacctggcctcgtttgaggccagtaccgcggtggtggcgccgtggatggagaaatttttcatcatgggccacgataccgcggcgatcgtgccggaacaggtgttaatgatgctgcgtccagtgggaatggcctgtgagaacgatatgctggaggtcaccggcggggtgaatacccatcgcggggcgatcttcgctttcggtttgctgagcgcggcggcgggaaggctggtatcgaaaggcgagccgattgaacagcatcggctgtgcgaccaggtggcgcgattctgtcgcggcatggttatgcaagaactctccgcttccagcggcgaaccgttaagcaaaggcgaagcccattttctacgttatggtctctccggcgcccgcggcgaggctgagagcggctttcgtaccgtgcgtacccaggcgctaccggtgttcaaccgcatgatggaagagactggcgatagcaacctggcgttgctgcaaaccttgctgcatctgatggcgtggaatgatgacaccaatctggtctcacgcggcgggcttgccggcttgaactttgtgcagcaggaggcgcagcggctgttgtggcagggcggcgtcatggctgacggcgggctggaggcgttgcgtcaattcgatgacgaactgattgcccgccaccttagccccggcggcagcgccgatttgttggcggtaacctggtttttgtccgcttttcccgccggtgagcttttccctctttga

SEQ ID NO: 87481 - DNA, 1509 bp, Enterobacter aerogenes
atgcttaatcagcagtacgtgatgccggaagggttagcgccttatgcgggcgtgacggcgaaaagcccgtggttggccagcgaaagcgaaaaacgtcagcgtaaaatctgcgattcgctggaaacggcgattcgtcgttccggtttgcaaaacggcatgaccatttcgttccaccacgcgtttcgcggcggtgacaaagtcgtcaatatggtagtggcgaagctggcggaaatgggttttcgcgatctgacgctggcatccagttcgctgatcgacgcccactggccgctgatcgagcatattaaaaatggcgtgatccgccagatctacacctccggcctgcgcggcaagttgggcgaggagatctccgccggtttgatggaaaacccggtgcagatccactcccacggcggtcgcgtacagctgattcaaagcggcgagctgtcgattgatgtcgcgtttctcggcgttccttgctgcgatgagtttggcaacgccaacggctttagcggtaaatcacgctgcggttcgctgggctacgcgcgcgttgatgcggaacatgccaaatgcgtagtgctgctgaccgaagagtgggtggattatcctaactatccggccagtatcgcccaggatcaggtcgatctgatagtccaggtggacgaagtcggcgatccggaaaaaatcaccgctggcgcgatccgtctgaccagcaacccgcatgagttgctgatcgcccgccaggcggcgaaagtcgttgagcattccgggtactttaaagacggtttctcgctgcagaccggtaccggcggcgcctcgctggcggtgagccgcttcctcgaagataaaatgcgccgtaacggtattaccgccagcttcggccttggcggcatcaccgggacgatggttgacctgcacgaaaaagggttgattaaaacgctgctcgatacccaatcgttcgatggcgacgcggcgcgttcattggcgcagaacccaaaccacgttgagatctccaccaatcagtatgccagcccgggctctaaaggcgcctcctgcgagcgcttaaacgtggtgatgctcagcgcgctggaaatcgataccgactttaacgttaacgtgatgaccggctctaacggcgtgctgcgcggcgcgtccggcggccatagcgataccgccgccggtgcggatttgaccatcattaccgcgccattagttcgcggccgtattccctgcgtcgtggaaaaagtgctgacccgcgtcacgccgggagccagcgtagatgtgctggtcaccgaccacggcatagcggtaaacccggcgcgccaggatctgatcgacaatttgcgcaacgcgggcattccgctgatgactattgaggaactgcagcagcgtgcggaactgctaaccggcaagccgcagccgatcgagtttaccgatcgggtggtggcggtggtgcgctatcgcgatggctccgtgcttgatgttattcgtcaggtgaaaaacagcgactaa

SEQ ID NO: 87482 - DNA, 870 bp, Enterobacter aerogenes
atgaaaccacgtcgcagtatgctgttcatccctggcgccaatgccgccatgttaagcacttcattcgtttacggcgccgatgcggtgatgttcgaccttgaagatgccgtttcgctacgcgaaaaagataccgcccgcctgctggtgcatcaggcgctgcagcatccgctgtatcaggatatcgaaaccgtggtgcgcattaacccgctgaatacgccgttcggtcttgccgaccttgaagcggtagtccgcgcgggcgtggatatggtgcgtctgccgaaaaccgacagcaaagaagatatccatgagctggaagcgcatgttgagcggattgaacgcgagtgcggccgggaagtgggcagcaccaagttaatggcggcgatcgagtcggcgctgggcgtggtgaacgcggtggagatcgcccgcgccagcccgcgtctggcggcgatcgcgctggcggccttcgattacgtcatggatatgggcacctcccgcggcgacggtactgaactgttctacgcccgctgcgctgtactgcatgccgcgcgcgttgccggcatcgccgcctatgacgtggtgtggtcggatatcaataacgaagagggcttcctggcggaagcgaatctggccaaaaacctcggttttaacggcaaatcgttggttaacccacgacaaattgaactcctgcatcaggtctatgccccgacgcgcaaagaggtcgatcacgcgctggaagtgattgccgcggcggaagaagccgaaacgcgaggtcttggcgtggtatcgctgaacggcaagatgatcgatggaccgattatcgaccatgctcgcaaagtggtggcgctctcggcttccggtattcgtgattaa

SEQ ID NO: 87483 - DNA, 294 bp, Enterobacter aerogenes
atggaaatgaagattgacgccctggccggcacgctggagtccagcgatgtgatggtcaggattggaccggcggcgcagccgggcattcagctggaaatcgacagcattgtgaaacagcagtttggcgccgcaattgagcaggtagtcagagaaacgctggcgcagcttggcgtgaagcaggccaacgtggtggtcgatgataaaggcgcgctggagtgcgtactgcgggcccgcgtacaggccgcggcgctgcgcgcggcgcaacagtcccaattacaatggagccagctatga

SEQ ID NO: 87484 - DNA, 1029 bp, Enterobacter aerogenes
atgactctgatattaaaacgcgttcagctattaaaagataaaccgcgcagagatgtgatcgatcggtttcttcgccagcatcagctgtcgttagaagccgattgtgaaatggcgatcgtcgccgagtatcaacagcggctggtcggctgcggtgctatcgccggcaatgtgctgaaatgtattgccatcgatccctcgctgcagggggaagggctgagccttaaattactgaccgagctcctgacgctggcctatgaactggggcgcagcgaactgtttttgttcactaaaccttgcaatgccgcgctattttccggcgccggcttctggccgatagcccaggcgggcgaccgcgccgtgctaatggaaaatagccgcgaacgactgactcgttactgccgacagctggcgatgtatcgtcagccgggaagaaaaatcggcgctatcgtgatgaacgccaaccccttcacccttggccaccgctggttggtggaacaggcggccagccagtgcgactggctacatctgtttgtggtcaaagaagatgcgtcctgcttttcctatcacgatcgcttcaaactcattgaacaggggattgccggcatcgataacgtgacgctgcaccccggttcggcgtatctgatctcgcgggcgacgttccccggctatttcctgaaagagcagggggtggttgatgactgccacagccagattgacctgcagctcttccgcgagcgcctggccccggcgctgcagatcacccatcgctttgttggcaccgagccgctgtgtcccctgactcgtaattacaaccagcgcatgaagtcactactggaagcgccaggcgaggcgccgcccattgaagtggttgagctggcgcgaatcgaaaaaaatggcgggcccgtgtcggcctcccgagtacgcgaactctatcgacagcgcaactggcaggcggtcgcggcgctggtaccgtcggggaccctctcttttctgatgcaactggcggaaagcgaacatcaaaccgcctga

SEQ ID NO: 87485 - DNA, 1341 bp, Enterobacter aerogenes
atgactaacatgagtcaggctccggcgacggagaagaagggcgttagcgacctgctgggatttaaaatcttcggcatgccgcttcccctttacgcgtttgcgttaattacgctattactttcacatttttataacgctttacccaccgacatcgtcggcggttttgccatcatgtttatcatcggcgctatattcggtgaaattggcaaacgcctgccaatattcaacaaatatataggtggtgctccagtaatgattttcctggtagccgcttattttgtttacgccggtatttttacgcagaaagaaatcgatgctatcagcaacgttatggataagagtaacttccttaacttattcatcgcggtattaattaccggagcaattctgtcggtgaaccgccgcctgctgctgaaatcactgctcggctatattccaaccatcctgatgggcattgtcggcgcgtctattttcggcatcgctatcggcctggtgttcggcattccggtggatcgcatcatgatgctgtacgtcctgccgatcatgggcggcggcaacggcgcgggcgcggttccgctgtcggagatctatcactccgtcaccggtcgttctcgcgaagagtactactcaaccgctatcgctattctgaccatcgctaacatcttcgccatcgtctttgccgccgtcctcgatatcatcggcaaaaaacacacctggatgagcggcgaaggcgaactggtgcgtaaagcctcgttcaaagtcgaagatgacgagaaagcgggacaaatcacgcatcgtgaaaccgccgtcggtctggtgcttgccacgacctgtttcctgctggcgtatgtcgtcgcgaagaaaatcctgccaagcattggcggcgtttcgattcactacttcgcgtggatggtgctgatcgttgcagcgctgaacgcctccggcctgtgttcaccggaaatcaaagccggcgccaagcgtctgtctgatttcttctctaaacagctgctgtgggtactgatggtcggcgtcggcgtctgctacaccgacctgcaggaaatcatcaacgccatcaccttcgctaacgtcgttatcgccgccattatcgttatcggcgcagtgctcggcgcggcgattggcggctggattatgggcttcttcccaattgaatcagcgatcaccgctggcctgtgtatggctaaccgcggcggatccggggacctggaagttctgtccgcctgtaaccgtatgagccttatctcttatgcgcaaatctcctcccgtttgggcggcggtattgtgctggtcatcgccagcatcgtgttcggcatgatgatttaa

SEQ ID NO: 87486 - DNA, 249 bp, Enterobacter aerogenes
atgactgatgccgttctgttaggcgaaggcttcaccctgatgttcctcggcatgggcttcgtgctggcgtttctgctgctgctcattttcgccatccggggaatgtctctcgccgttacccgtctgttccctgagccgcctgccgcgcccaaaccggcgcctgcggccgtcgcgcccgccgacgacttcgcccgtttaaagccggcgattgtcgccgccattcaccaccatcgccgccttaattcttaa

SEQ ID NO: 87487 - DNA, 1767 bp, Enterobacter aerogenes
atgaccgttgccattaccgatgtcgtcctgcgcgacgcccaccagtccctgttcgccacccgtctgcgcctcgacgatatgctgcctattgcagctgcgctcgacgacgtcggctaccgctccctcgaatgctggggcggcgccacctttgacgcctgcatccgcttcctcggcgaggacccgtgggtccgcctgcgcgagctgaaaaaggcgatgcccaagaccccgctgcagatgctgctgcgcggccagaacctgctcggctaccgccactacgccgatgacgtggtggagcgctttgtggagcgcgccgtcaaaaacggtatggacgtcttccgcgtctttgatgccatgaacgacccgcgcaacatgcaggccgccctgcaggcggtccgccgccacggcgcccacgcccagggcaccctcagctacaccaccagcccggcgcacaccctgcagacctggctcgacctcaccgaacagctgctggagaccggcgttgattccatcgccatcaaggacatgtccggcatcctcaccccgcatgccgcctttgagctggtcagcgaaatcaaaaaacgctatgacgtcaccctgcacctgcactgccacgccaccaccggcatggcggagatggcgctgctgaaggccattgaagccggcgtcgacggcgtcgataccgccatctcctcgatgagcgccacctatggccacccggccaccgaagcgctggtggccaccctcgccggcacgccgtacgacaccggcctcgatatccacaagctggagagcatcgccgcctacttccgcgaggtgcgcaaaaaataccacgccttcgaaggccagctgaaaggcaccgacagccgtatcctggtcgcccaggtgccgggcggcatgctcaccaacctcgaaggccagctgaagcagcagagcgccgcccaccgtctggatgaagtgctggcggaaatcccccgcgtgcgcgaggacctcggcttcatcccgctggtgaccccgacctcgcagattgtcggcacccaggcggtgctcaacgtgctgggcggcgaacgctacaaaaccattgcgaaggagaccgccggtattctgaaaggcgaatacggccacaccccggcgccggttaacgccgccctgcaggcgcgggtgctcgacggcgccgacgccgtcacctgccgcccggcggatttactcaagccggagctggcggagcttgaagccgacgtcaaacgccaggcgcaggagaagggcatcacgcttgctgaaaacgccatcgacgacgtgctcaccgtggcgctgttcccgcaaatcggcctgaagttcctcgaaaaccgccacaacccggcggcctttgagccggtgccgcaggtggaagatgccacctctgccgcgccggcaaaagccgccgcctccggtatctacaccgtcgaagtggaaggcaaagccttcgtggtcaaggtcagcgacggcggcgacgtcagccagctcagcgccgctgcgccggtagccgctgctgccccggccccggccccgactggcgccggcaccccggtgaccgcgccgctggcgggcaccatctggaaggtgctggccagcgaaggccaggcggtggcggaaggcgaggtgctgctgattctggaagccatgaagatggaaaccgaaatccgcgccgcgcaggccggtaccgtacgcggtatcgcagtgaaatccggcgatgcggtggcggtcggcgacaccctgctgcagctggcgtaa

SEQ ID NO: 87488 - DNA, 1302 bp, Enterobacter aerogenes
atggaaagtctgaacgccctgattcagggcatggggctgatgcacctgcaggccggccaggccgcgatgctgctggtcagcctgctgctgctgtggctggcgattgctaaaaagttcgagccgttactgctgctgccgattggcttcggcggcctgctctccaatatcccggaggccgggctggcgctgagcgcgctggaaaacctgctggcccatcacgacccggtccagctggcggtgattgccgcgaagctcaactgcgcgccggacgtccacgccatcaaggaagcgctggcgctggccctgccgtcggtacaggggcagatggagacgctggcggtggatatgggctactcctccggagtgctggccatcttctataaggtggcgattggctcgggtatcgcgccgctggtgatctttatgggcgtcggggcgatgaccgatttcggcccgctgctggccaacccgcgcaccctgctgctgggggcggcggcgcagttcgggatcttcgccaccgtgctcggggcgctgacgctgaactacttcggcttcatccacttcaccctgccgcaggcggcggccatcggcatcatcggcggcgccgacggcccgacggccatctacctgtcgagcaagctggcgccggagctgctgggggccatcgcggtggccgcctactcctacatggcgctggtgccgctgatccagccgccgatcatgaaggcgctgaccagcgacaaagagcggaagatccgcatggtgcagctgcgtacggtgagcaaacgcgagaagatcctcttcccggcggtgctgttgctgctggtggcgctgctgctgccggacgccgcgccgctgctggggatgttctgcttcggcaacctgatgcgcgaaagcggggtggtggatcggctgagcgatacggtgcagaacgcgctgatcaatatcgtcaccatcttcctcggactgtcggtgggggccaagctggtggcggataagttcctgcagccgcagacgctgggcatcctgctactgggggtgatcgccttctgcgtgggcaccgccgccggggtgatcatggcgaagctgatgaatgtcttcagtaaacacaagatcaacccgctgattggctcggccggggtgtcggcggtgccgatggcagcaagggtgtccaacaaggtgggtctggaagcggacgggcagaacttcctgctgatgcacgcgatgggcccgaacgtggctggggtgatcggctcggcgatcgccgccggggggatgctcaagtacgtgctggcgatgtaa

SEQ ID NO: 87489 - DNA, 1326 bp, Enterobacter aerogenes
atgagttctctgtatcagtcgatgattgccgtgatcgagcaatctattactccgctggcaggacgccttgggcaacagaaatatgttatcgccatccgcgatggctttaccgccgcattgccgttcatgatcatcggctctttcatgctggtatttatctttccgcctttctcgccggagaccactaacggctttgcccgcggctggctggacttttcccagcagtaccgtgaacagctgatgctgccgtttaatctcagcatgggcgtcatgaccttctttatctcggtcggcatcggcgccagcctcggacgccagttccagctcgatccggtcatgtccggcctgctggcgtttatggccttcctgctggtcgccgcgccctatgctgatggcaaaatttctactcagtatttatccggccagggcattttcaccgcgctgatcaccgccatctactccacccgcgtttacgcctggcttaagcaaaacaacgtgaccattcgcctgccgaaagaggtgccgaccggcgtcgcccgttcgtttgagatcctcattccggtactggtggtcatcggtactctgcatccgctcaacctgttcattgaggcgcaaaccggcatgatcctgccgcaggcgattatgcatctgctggaaccgctggtctccgcctccgattcgctgccggcgattctgctgtcggtgctgatgtgccagattttctggttcgccggtattcacggctcacttatcgttaccggcattatgaacccgttctggatggccaacctgtcagcaaaccaggcggcgctggcggccggcgcggcgctgccgcacgtctacctgcagggcttctgggatcactatttgctgattggcggcgtcggttcgaccctaccgctggccttcctgctgctgcgtagccgggtcacgcatctgcggactatcggcaaaatgggcatcgtgccgagtttctttaatattaacgaaccgatactgttcggcgcgccgatcatcatgaatccaatgatgtttatccccttcgtctgcgtgccgatggtcaacgcggtgctggcttacggcgcaacccgccttggctggctgagccaggtggtgtcgctgacgccgtggacgacgcccgcgccgattggcgcctcgtgggcggctaactggactttaagcccggtggtgatgtgcgttatctgcatggtgatgtcggcggtgatttatctgccattcctgcgtgcctatgagcgttcattaataaaaaatgaagtcgaaaaggcgaaaagcgttgcaccggtcgccggagccgttagccagtaa

SEQ ID NO: 87490 - DNA, 315 bp, Enterobacter aerogenes
atgtacaagattatgctgtgttgctccgccgggatgtccaccagcctgctggtgaggaaaatggtggatgccgcaaaggaacgcgacctgccggtgcagattgacgcctatggcgttgccgaatttgatatgcagtttccacaataccaggtggtgctgcttggcccccaggtcaaatacatgctgaaaatgcttagcgagaaagccgctcccctgaatattcccgtccagcctatcgatacgatggattacggaatgcagcggggagataacgttctgaattatgccctgtcgctgatcgccgcggcgcactaa

SEQ ID NO: 87491 - DNA, 936 bp, Enterobacter aerogenes
atgtcgacaatcaatgatgtatcacggttagccggggtatcgaaagccacggtttcgcgcgtgctgagcggttcgcgcggggtaaaagaggccagccgccaggcggtgcttcaggcggcggaaacgctgaactaccggcccaatatgattgcccaatccttactgagccagtcgacgggctgtatcggcgtgatttgcgcgcaggacaacatcaatcagaccaccagctatctctacgccctggaaaaacagctcagccagcatcagaagcatctactgctgcgcttcgccaataaccgcggcgacgtattaagcgcgctggatgaactcacctgtggcctgtgcgatgacgtgctgatcatcggcgcgcgctttccgctgcagatcgagcgccccgatgtggtgctgattgattgtctggaaagcgatggcgagaacagtattcagtttgatcacgccttcgccgcggaaaccgcctgtcattatctgattaatcaggggcggcggcagattgcgctgatccatccgcaggggagcggctttgccgatcaggtgctgctgggctataagcatgcgctggagaagaacttcctgccgtttaatcgcaacctggtcttcctggactgcgcctcgtcgtcggtggcggtacaggagttgatgaataacgccactaccctgaactttaatgcgctgttggtgagcgatgaactgcaggcgcagcgggtagtgccgcagctgcaggcgtttaaccgcgcggtgccggaaaaagtaatggtcttcagtctcgcgggttcgctgcagatgccgggtattccgaccatcccggcgattgagtattcgatggatgcgatggcttcgcggatcgtcaactggctgatcgggaaaagcccgcagcccggcggcagcctgctgcgcggcgacttaattattccctaa

SEQ ID NO: 87492 - DNA, 570 bp, Enterobacter aerogenes
atgtttaaagtactaccccaccgcctgcagcactgtcacgacgtggcgctcagcatgagcaaagccagcactatgcagttgcaacagttgaaggcacagcttgccgcagaaatgggggcgcctgtaggaatccataccatggggatcccggcagcatttagcacgctcggaataactatcagtcttgctattccgcagttgtggttaggctactgcatcctgagcgtactccatcagcctgccgaaagcgtgtttgcgtgggtagtgctgatttcgttgctgatcgctggtatcaacggcatcacgatgtttatgatcggcaaaggcagcatgcacgccgtgcgagtgcatattatgttagcggtgatgagtctggtattaacggtggtctacctgctttacgcactgagtgacgcctcttacccgggagttaatctaacagcggcactggtgggcgtcattatgttgctgctcagcggcgtctgtatccattccaccgccttttataagatgctgttgttcacgctgcataaccgcgcgtggcgccagttaatcaaactcacgcgctaa

SEQ ID NO: 87493 - DNA, 291 bp, Enterobacter aerogenes
atgaaagcgtgttggatgttgtgtctggttactgcccttagcgccagcgcggcgtgggccgaatcgccgctgcaaagcctgcagtttgagcagcaaaaacagcaggtgttgaaagcggtgaaggaaaaatgcgccccggcgagtaccctcagcgataccgatttcgccaataaaatcctcgcctcgaaagacaaccagagttacgttcgcgaagcgacgctggcgaaagagcgcaataatcaaaaaggctatctggccgccattgataaaattcgctgcccgggtaaataa

SEQ ID NO: 87494 - DNA, 903 bp, Enterobacter aerogenes
atgggttccagcaaaagagggatgttgaacgtattgatcgccgccgtcctgtggggcagttccggggtctgcgcgcagtacattatgcagcaaagtcagatgtcatcgccctatctgaccatgatccgcctgctgttcgccgggctgattttgctgatgctcgccttcgttcacggcgacaaaattttccgcgttatgcaaaaccgcaaagatgcccttagcctgctgtttttctcgctggtcggcgcgttaaccgtgcagtacaccttcctgatgactatcgagaagtcgaacgccgccaccgccacggtgctacagtttttgtcgccgacgattatcgtcgcctggttcgcgctggcgcgtaaggcgcggcccagtccctttgtgctactggcgattggcacctcgcttgccggcaccttcctgctggtcacccacggcaacccaacctcgctctccatctcgccggcggcgctgttctgggggatcgcctcagccttcgcggcggcgttttataccacctatccctcaacgcttatcgcccgctacggcacgctgccgatcgtcggctggagcatgctgattggcggggcgatgctgttgccgttttatggcagccagagcgcgaactttgtagtgaacggccgtcttctgctggcgtttttctatctcgtggtgatcggcacctcgctgaccttcagcctgtatctcaacggcgctcagaaaattggcggcgcgaaagccgggatcctcagttgcgccgagccgctgagcagcgccctgctctctctattgctgttgggcattacctttactctgccggactggctggggacgctgttgattctctcttcggtcattcttatcgcggtggattcccggcggcgggtacgcgcggcgtaa

SEQ ID NO: 87495 - DNA, 411 bp, Enterobacter aerogenes
atggacttaacatatcgaacggggcgacattgcgttttcatgctgcactgtcatttaatcttcataacgaagtatcgcgggcgtgtctttaatgaagcgcacctggaaacgcttgaggggatttgtcgcaacgtttgcgagctgtttgaatgcgaactggtggagtttaacggtgagtcggatcacgttcacatgctgcttaacttcccgccgaaggtgtcaatcagcaagctagttaacagcctaaaaggggttagcagccgcaagatgaagttgcatcatccagacctgcataaacccgcctggaagtcagacgctctatggtcgccgtcttatttcgctggcagcgtgggcggtgcgccccttgaagtgattaagaaatacattgaggatcagaaccggcctcattag

SEQ ID NO: 87496 - DNA, 1092 bp, Enterobacter aerogenes
atgagcattcagaccaaaactttatcagtcagagttaaagaccgccacgccgccgttttgcggcagatggcctttgaggtcaatcaggtctttaatctggcaaacgagataaccagcgaggcatacagcaacgctggcgtttttggtgcgcaggttccaaagtggttaaccgcgtttgatgttcagaagatgacaaccggcatacagcgtgagcgcggctattccatcggcagcgctacagtgcaggaagtgatcgctcaccacggcaaggcgcggaaacagttcaagcgttcccgccttcgctggcgcgtcagtggcggcgctcgccgttcgctgggctgggtgccgttcaaatcaaagcaggcgcagtggcaaaacggctgcgttaagttcgccgggcactactttaaagtttgggatagctacggtcttgcgggctacaaattccgcgcaggcagtttttcagaagatagccgggggcgatggtacttcaatatctgcgtagaggttgcgaccgtccataccacgggcgcgaccgctgtcggcatagacctcgggttaaaggataccgccacggtatccgatggcagcaaactgatcgccggtcgtttttatcgcgacctgcaaccagcattaggcaaggcgcaacaggcaggcaaaaaagcccgtgtacgcgccatctacgccaaaattaagaatcgccgcaaagatgccctgcacaagttcagcacggcgctggtaaacagccatgcggcgatattcgtaggcgatgtgagcagcagcaagttagccaaaaccaaaatggctaaaagcgtcctggacgctggctgggcgatgctcaaaacacaactggaatataaagcgattgcgcgctcagtggtgttcgaagtggtcaacgaaaggtattccacccaggcttgttcgtgttgcggggctatctccaacaacagtccgaaaggtagagcaggtttgcgaataagagaatggacttgttgtgagtgcggaaccgctcatgatcgcgacgttaacgccgcaaagaatattctcgcggcaggacattgccgtctagctgtaggaatccccgtcctttag

SEQ ID NO: 87497 - DNA, 906 bp, Enterobacter aerogenes
atggatagtttgagccatctgttgacgctgctggccccgcgttgcgaagtgaatctgcattgccgtttcggcggccgctggcaggccggacacgatcaaatgcgagcgggcgtggtgccgtggcactttgtgttgcgcggcgaagggcgcctaaccgtcggtcatcaaacccgccacatgcgcgccggcgacgtgatcctgctgccgcacggttcgccgcatctgatggagagcctggtggagtggggtcaggtactgcccgtcgcccaccgctttaacggcacgctgacggaagtccgcaccgccgaagagagcgatgcgctggagatgctgtgcggcgagttttacttcggcccgcacgtcaactggctgttcgccgaagagtcggcgctgatccatttacataccgatgagcgcgaagattgcccggaactggatattttgcttaacgtgctggtacgcgaaagcctggcggaacatcccggcggcagcgctatcgtacgcagtcttggcgatacgctgctggtactgctgttacgtaccctgctcggcgcgcaggagccgccgggcggcctgttgcgcctgatgagcgatgcgcggctgatgccggccgttctcgcggtgctggccgcgccggaacagccttggactatcgagagcatggcggcgcgggcgtttttatcgcgcgccaccttcgcccgccattttgcccgcgtctatcatctgacgccgcaggcgtggctgtcgcaactgcggatggcgatggccgctcgcctgctgcatctcgatcgccaggcgcggctggaagtgattgccgaacgctgcggttttcaatcacaggcttcgtttgcgaaaacctttaaaaaacactacggcatgacgccgggcgagtggcgtcggcattga

SEQ ID NO: 87498 - DNA, 537 bp, Enterobacter aerogenes
atgagccgtttagccgatatccgtgaacaagatgccaccggtaaagccgccgatattttcgccggaattaaaaaagcgatgggtaaagtgccgaatgcctatctgaccatcggcggccactcgccggcggcgctgcagcaggcgctggcgcacaacgcgatgctgcataaaagcagccttagcgcgcaggagctggaagcgattaatttatcggtcagcgaagcgaccggctgtgattactgcctggccgcccataccctgatggccaaaaaaacgggcttcagcggcgagcaaatccacgccctgcgccgcggcgagtatacggaagatgcgcgcctggacgcgctggtgaaattcgcccaaaccctggtgaccaccaccggtacgctgccggaagcggatgtcgccgcgctgcgtcacgccggttttagcgaccagcaggtgattgagatcatcagtgccgtcagcgccatcctgttcaccaacatggtgaaccgggttaacgacacggtagtggacttcccgaaagccgattaa

SEQ ID NO: 87499 - DNA, 471 bp, Enterobacter aerogenes
atgagcgaacaacgtcccccgttaccgccgtttacccgcgacagcgccgcgcagaaggtgcgcgccgccgaagatggctggaacagccgcgatgcgcaaaaagtcgcactggcttataccgtggatagcgaatggcgcaaccgcagcgaatttgtccacggacgggggcaaatcgtggcgtttctgcagcgaaaatggcgtaaagagctgcaataccggctgattaaggagctttgggcgtggcaggataatcgcatcgccgtacgctttgcctacgagtggtgcgacgacagcggcaactggtttcgttcatacggcaatgaaaactggcagtttgatgagcacgggctaatgtccacgcgctacgcctgcatcaacgatttgccgatcgcggaaagcgagcgcctgttccactggccccagggtcgccgccctgacgatcatccggggctaagcgaattgggactgtaa

SEQ ID NO: 87500 - DNA, 630 bp, Enterobacter aerogenes
atggcagcaacctttctcgatatcgctatcaccccggatgtcatggatgtgcaacatgaaatgggcagcgaccagctgtggcaaacgccgcacagccgccgtcaggcggatcgcttcggcgccagcgaagaggggatgatcgctacccgcgacagtttttatctggcgacggtgtcgcaaagcggctggccctacattcagcatcgcggcggcccgccgggttttctgcgcctgctggatgacaccacgctggccatggccgatttcggcggtaatcgccagtacatcaccaccggcaacctgcgcggcagcgaccgggcctgcctctttttgatggattatccgcgccgtgccaggctgaaaatctacgccaccgtcgaggtgctggcggcggaagagcagcctgagctgctggcattagtgacgccgacaaactatcgcgcccgcatcgaacgcctgtttcgttttcatctgcaggcttttgactggaactgcccgcagcacattacgccgcgctacagcgcacagcaggtcgcggaatacagccagagcctgcaagagcgtattcatgaactggagcaggagaatcagcgcctgcagcaacaattatccccaaaaggagagttttga

SEQ ID NO: 87501 - DNA, 915 bp, Enterobacter aerogenes
atggaccgattaagcgctatggcgctgctggtgaaagtcactgaactgggcagtatgtcggcggcggcgcgggcgctgaatacgccgttgactaccgtgagccgtaatatcggcgagctggagagcgcgctgggagtccgtttattgacgcgcaccacccgtaaactcaccctcaccgatgccggcgtcgattatgtcgccgccgcgcggcgaatcctcgaagaggtggaaaacgccgaacgccgggcaacgggtgaataccaggagccgaagggcgagctggtgatcttcgcgccgacgatgtttggtcgccagcacgttctgccagtcattagtgaatttatcgcccgttatccgcaaattcgcgtacgtttgttacttagcgacagtaatgccgatctggtcgacgaccatatcgatctggcggtacggattggcgaactggctgatagcagcatggtggcgacccggcttggcgcgatgcgcattgtcgcctgcgcccatcccgcgctgttggcgaaatacggcgaaccgcagcgtccgcgcgatctggcggcgctgccgatcatccgtattgaatcgccgatgccctatcgcggctggcgctttcgcgccgttgagcgcgaggaccagctcattcatctgccgccggtgttagccgtcaccacgccggagagcgccgccgatgccgcgcggctgggcgttggcgtggcccgcttgctacactaccaggcgctggatggcctgcgctgcggggaactgcgtctgctgctggaaagcgtcgagccggagcccgcgccggttcatttgttatataccgcgcgggagctggctccgcttaagctgcggaaatttatcgattttgccgcgccggcgctgcgccagtccttgctacgcattgccggggccgcttaa

SEQ ID NO: 87502 - DNA, 1494 bp, Enterobacter aerogenes
atgacatctgaagtcgcaaaccaaccggcgccctcaatccgcctgctgttcagcgccctgctgctggtgatgctgctgtcggcgctggaccagaccattgtctccaccgccttgcctactatcgttggcgagctcggcggactggataaactctcgtgggtggttaccgcctatatcctcagctcgaccatcgtggtgccgctgtacggtaaattcggcgatctgttcgggcgtaaaatcgtgctgcaggtggcgatcgtgctgtttcttgccggttccgcgctctgcgggctggcgcaaaacatgacgcaattggtactgatgcgcgcgctacaggggctcggcggcggcggcctgatggtgatcagcatggcggcggtcgccgacgtcatcccacctgccaaccgcggacgctatcagggactgttcggcggcgtcttcggtctggcgacggttatcggcccgctgatcggcggtttcctggtacagcacgcctcatggcgctggattttctatatcaacctaccgctgggcctgttcgcgttgctggtcatcggcgcggtattccacagcagcaacaaacgtagccagcatcagattgactggctgggggcgatttacctcagcatggcgctgttgtgcatcatcctgtttacctcggaaggcggcagcgtccatgcgtggaatgacccgcagctgtggtgcattctggctttcggcatcgtggggatcatcggctttatctacgaagaacggatcgccgccgagccgattattccgctgtcgctattccgcaaccgcagcttcctgctgtgtagtctgattggctttgttatcggcatgtcgctgttcggttcggtcactttcctgccgctctatctgcaggtggtgaaagaggcgacgccaaccgaggccgggttacagttaatcccgctgatgggcggcctgttgctgacctcgatcatcagcggccgggtgattagccacaccgggaaataccggattttcccgattatcggtaccctgctcggcgtgaccggcatggtgctgctgacccgcatcaccatacattcgccaatgtggcagttatacctgtttaccggcgtgctcggcgcgggcctggggctggtgatgcaggtactggtgctggcggtacagaatgcgatgccggcgcagatgtacggcgtcgccacttccggcgtgactctgttccgctcgattggcggctccatcggcgtggcattgttcggcgcggtctttacccatgtgctgcaaaataacctgcagaaactgctgccggagggcgcggtgctgccgccagccatgaacccggtggcggtacagcatctgccagcggcgatccgtctcgattatctcgacgccttcggcgcggcgatccatgcggcattcctgatggcggcctgcattatggccgtcgcgtttgtcctttcctggctattgaaggaggcgccgctgaaaaccgcggcgcattaa

SEQ ID NO: 87503 - DNA, 648 bp, Enterobacter aerogenes
atgccagcacaaaaagctaatgaagcgccgcgccgccccggtcggccacgcggtaaaaaaccgggaaccgctaaccgcgagcagttgatagatatcgccctggcgctgtttgctcgtcacggcgcggcccgcgtgtcgctcaatgccattgccaaagaggccggggtgacgccggcgatgctgaattactattttacgtcgcgggaagcgctgattgagaatttgctggaagagcgctttatgccgctgcgcaacgatatcagccgcatttttgtcgaccatccgcaggatccggtaacggcgttgacgatgatggttgagacgctggcggacatggcggagcaaaatgcctggttcgcgccgctgtggatgcaggagatcatcggcgagatgccgatgctgcgccagcacatggatgcgcgcttcggcgaggagcgttttcaggtgatgctggagacggttcgccgctggcagcaggaggggaaaattaacccggcgctggcgccggaactgctgtttaccacggtgattagcctggtgctggtgccgttctcgcgcatccatagcgacccgcgtttacaggcggtaacccggcagaccattgttagccacgcgctggcgttaatgggccacggggtcggcggttaa

SEQ ID NO: 87504 - DNA, 417 bp, Enterobacter aerogenes
atggctctaataattacaaaaagcattaatcccgacgatcaacaagaattgtttgccggcctacggcagtataatcagcagtatctcgacgcagatcagtttggcgatctgggcatttactcccgcgatgagcaagcggtgatgcgcggcgggcttatcgccaaacgcaaaggcaactggctgtgtatcgaatacctgtgggtgagcgaagcgacgcgcggcaacggtctgggccgtgagcttatgcaggaagcggaacggcaggcgcaggcgttgggctgcagccatctcctggtcgataccttcagcttccaggcgctgccgttttatcagaaattaggctatcagttgcagatgtcgctgtccgatttcccgcacgcgggtatgcaacgccactacttgtcgaaagcgctgtaa

SEQ ID NO: 87505 - DNA, 1125 bp, Enterobacter aerogenes
atgaaacacatcatagcccccatcgcgacagcattatttctcctgagcggatgcgataatgcgcagacaactgcgccgcaacaacccacgccggaggtgggaattgttacgctgcaagcccagccggtgccggtggtcagccaactgactggccgcactaccgcctcgctcagcgccgaagtgcgcccgcaggtcggcggtatcattcagaagcgcctgtttaccgaaggcgatatggtgaaggccgggcaggccctttaccagatcgatcccttcagttatcgcgccacctggaacgaagcggcggccgcgttgaagcaggcgcaggcgctggtggtctctgattgccagaaagcccagcgctacgcgtcgttggtcagagataacggcgtctctcgccaggatgccgacgacgctgcctccgcctgcgcccaggacaaggccagtgtggagtcgaaaaaagcggcgctcgagagcgcgcgcatcaacctgaactggaccaccgtcaccgcgccgattgccgggcgcatcggcatctcctcggttacgccgggagcgctggtctctgccgaccaggataccgcgctggcgacgatccgcggcctcgacaccatgtatgtcgatctgacgcgatccagtgtcgatctcctgcgtttacgcaggcagagcctggccagcaacagcgataccctcagcgtgacgttaacccttgaagatggcagtacctatcccgaaaaagggcgtctggcgctcaccgaagtcgccgtcgatgaatccactggctcggtgactctgcgcgccatcttccccaacccgcagcacgtcctgctgccgggaatgtttgtccgcgcgcgtatcgatgaaggcatcatgaacgacgcgatcctcgcgccgcagcagggtatcacccgcgatgccaaaggcgacgccacggcgctggttgtcgatgccgacaacaacgttgagcagcgtaccgtgcaaaccggcgatacctacggcgataaatggctggtgctgagcggtctgaaagcgggcgacaagctgattgtcgaaggcaccggtaaagtgtcccccggacaagcggtgaaggccgttgccgtcaaaaataacggaggcaatgcctga

SEQ ID NO: 87506 - DNA, 3108 bp, Enterobacter aerogenes
atgttctcccgtttcttcgtgcgtcgcccggtctttgcctgggtgatcgctatccttaccatgcttgccggggcgctggcgatccgcacgctgccggtgggacaatatccggacgtcgccccgccagcagtaaaaatatccgcgacctatactggagcttccgcagaaaccctggaaaacagcgtcacccaggttatcgagcagcagctcaccgggctggataacttactttatttcacctccaccagcagttcggatggtacggtaagtattaccgtcacctttgagcagggaaccgatccggataccgctcaggtacaggtgcaaaacaaagtgcagcaggcggaatcgcgtctgccgagtgaagtacagcaatctggcgtaacggtagaaaaatcgcaaagcagcttcctgttaatcctcgcggtgtatgacaaaaccaaccgtgccaccagttccgatatctccgactggctggtcagcaatatgcaggacccgctggcgcgcgtggagggcgtcggcagcctgcaggtattcggcgccgaatacgcgatgcgcatctggatggatccgaccaaactcgcctcttactcgttgatgccttccgacgtacagtcggcgattgaggcgcagaacgtgcaggtctccgcgggtaaaatcggcgcgctaccgtcgtccaatgcccagcaattgactgctaccgtgcgcgcgcagtcgcggctgcaaactcctgaccagttcaaagcgatcattgtaaagagccagtccgacggttcagtggtgcgcctgagcgatgtcgcgcgggtggaaatgggcagcgaggattacaccgccaccgctaatctgaacggccaccccgccgccgggattgcggtgatgatggcgcccggcgccaacgcgctggataccgcgacgctggtgaaaagcaaaatcgctgaattccagcgtcagatgccgcagggctacgatatcgcctacccgaaagacagcaccgagttcatcaaaatctcggtcgaggatgttatccagacgctgtttgaggcgattatcctcgtggtctgcgtaatgtatctgttcctgcagaacttccgcgcgacgctcattccggcggtagcggtaccggtcgtgttacttggcacctttggggtgctggcgctgtttggctactccattaataccctgacgctgtttgccatggtgctggcgatcggcctgctggtggatgatgccattgtggtggtggaaaacgtcgaacggattatgcgcgacgaagggctgcccgcccgcgaagccaccgaaaaatcgatgggcgaaatctccggcgcgctggtggcgatcgccctggtgctgtcggcggtattcctgccaatggcctttttcggcggttcgaccggggtaatctatcgccagttctcggtgacgattatctcggcgatgatgctgtcggtggtcgtagcgttaaccctcactccggcgctgtgcggcgcgctgctaagccactccaaacctcatgacaaaggtttcttcggcacctttaatcgcctgtgggggcgtacggaagatggctaccagcgtcgcgtactcggcggcttacgccgcggcgcggtgatgatgggcgcttacgccttgatttgcggggcgatggcgttggcgatgtggaaactgccgggcagctttctgccggtggaggatcagggcgaaatcatggtccagtacaccttgcctgccggggcgacggcggtgcgtaccgccgaggtgcgccgtcaggtgaccgactggttcctcaccaaagagaaagccaataccgaggttatcttcaccgtcgacggcttcagtttcagcggcagcggtcagaacgccggaatggccttcgtctcattgaaaaactggtcgcagcgcaaaggcgacgaaaataccgcgcaagccattgcgctgcgcgccaacaaagagctgggcgcgatccgcgacgccaccctgttcgccatgacgccgccatcggtggacggccttgggcaaagtaacggcttcactttcgagctgatggccagcgggggtaccgatcgcgatagcctgatgaagctgcgcagccaactgctggccgcagccaatcagagcggcgaactgcagtcggttcgcgccaacgatttgccacagatgccacagctgcaggtggatatcgataacaataaagccgtctcgctggggctgtcgctcagcgacgtgaccgatacgctctccagcgcctggggcggcacgtacgtcaacgactttatcgatcgcggccgggtgaaaaaggtctatatccagggcgagagcgacgcgcgcgccgtgccgtccgatcttggtaaatggtttgtccgcggcagcgataacagcatgacgccgttcaccgcgttcgccaccacccattgggaatacggcccggaaagcctggtacgctacaacggctcggccgcctttgagatccagggggaaaacgccgcgggcttcagctcaggtgcggcaatggacaaaatggaaaaactggccgatagcctgccggcgggttccacctgggcatggagcggtatttcgctacaggaaaaactggccagcggccaggcgatgagcctgtacgccatttcgattctggtggtgttcctgtgcctggcggcgctgtatgaaagctggtcggtgccgttctcggtgatcatggtcatcccgttaggcctgcttggcgcggcgctggcggccacgctgcgcggcttaagtaacgacgtctatttccaggtggcgctgttgacgactattggcctgtcgtcgaagaacgccatccttatcgttgaattcgctgaatccgcggtggatgagggctattcgctcacgcgggcggcgatccgcgccgcgcagacccgtctgcgcccgattgtcatgacctcgctggcatttatcgccggagtactgccgctggccattgctaccggcgccggggccaacagccgcgtggcgattggtaccgggattatcggcggcaccctgacggcgacgctgctggcggtgttcttcgtcccgctgttctttgtgctggtgaagcgtctctttacccgcccacgtccttctcaggagtaa

SEQ ID NO: 87507 - DNA, 1365 bp, Enterobacter aerogenes
atgtttcgtttgagtttaatgtttatcgcgctcctgaccgcgggctgtgtctctcttgacccgcactacgagcgcccggccgcgccggtgccggcgacccttcccggcgcgcacggcgaatcaacggcggtggtcggcgactggcaaaaagtggtcaatgatgcgcggttaaaaaaagtggtcagcattgcgcttaatagcaaccgcgatgtgcaaaaggcattggccgatattgaagccgctcgcgcccagtatggcgaaacgcgcgcatcgttgtttcccaccgtcgatgccgagctgagccatacccgcagcaaaacgatcgccagcggcctaagttctacctcgcaggctgacggcgcggtctcgagcttcgaactggacttgttcggcaagaaccagagcctgtcgcgcgcggcgcgagaaagctggcttgccagcgaattcaccgcgcaaaatacccgactgacgatgattgccgatttgaccaccgcatgggtgacgctggcgacggataatagcaatctggcgctggcgcagcagacgatggaaagcgcggagaactcgcgtaaaatcgtcgctcgccagatggcggtgggcaccgcctccgccggtgatttaagttcggcggaaagcgtctatcagcaggcgcgagccagcgtcgccagctatcgtacgctggtggcgcaggataaaaacgccattaacctactggcgggggaaaccgtaccggagagcctgctgcccggtacgctggagagcctgggggataacagcatcgcgctggtgccggcgggggtatcatcatcggtactgttgcgccggccggatattcaagaggcggaacataatctcaagagcgctaatgccgatatcggtgcggcgcgagcgaactttttcccgtccatttcgctgaccgccagcgccggggtcggcagcgactcgctatcgtcgctgtttagccatggcatgcaggtgtggtcgttcgccccgtccatcagcctgccgctgttcaccggcggcagtaatctggcgcagctacgctatgcgcaggctgagaaaaaggggctgattgccacctacgagaaatccattcagagcgcctttaaggacgttgccgatgcgctggcgcgccgggaaacgctgggtgaacagctcgatgcccagcagcagtatgttgccgccgagcagaagtcgctggatatcgcgatgaagagttatcaggccggggtcggcgactatctgtcggtgctgaccgcccagcggacgctgtggtcggcgaaggcgacgctgctgtcgctgcagcagaccgacctcaataaccgcattacgctctggcaatcgctgggcggcggcgccagttaa

SEQ ID NO: 87508 - DNA, 903 bp, Enterobacter aerogenes
atgagtatcgacctgagcaaactgctgaccgagcgacgcaacgccaacagcgccaacattgacaccctctccactgtcgacatgctgacggtgataaaccaggaagatcagcaagtggcgcaggcgataacgccttacttgccgcagatagcggaagtcgtggataaagtggcggcggcgctgcgggccgggggacggctgatttacatcggtgccggcacgtcggggcgtttgggtattctggacgccagcgaatgcccgccgacctttggcacccgtccggagcaggtggtggggattatcgccggcggacataaagcgattctgagcgccgtggaaaacgtggaagacaataaagcgcaaggggcgatggacctgcagaaccttaacttcagcaaccgtgatgtgctggtggggctggcggccagcgggcgtacgccgtacgtcattggtgcgatggaatacgcccatagccagaatgcgtttgtcgctatcgtcagctgtaacccgcacggtgaaatggcgcagctggcggacgtggcgattaccccggtggtcggcccggaagtggttaccggatcgacccgcctgaaagccggcaccgcgcagaagctggtgctaaacatgatctccaccggggcgatgatccgcatcggcaaggtctacagcaacctgatggtggatgtcgaagcgaccaacgccaagctgattgagcgccaggtgtctatcgtgatggaagcgacagactgcgatcgcgccaccgcgcagaatgcgctggatgcctgtggccgccactgtaagacggcgattgtgatggtgttggcagacttaagcgccgcagaagcgcagtcgctgctggcgaaaaacaacggttatatccgcaaggcgctaagcaacacctga

SEQ ID NO: 87509 - DNA, 1434 bp, Enterobacter aerogenes
atggcaaaaataactaaagagatgatagcgcggatcctggcccacgtcggcggggcagcaaacgtggcgcaggcgggtaactgcatgacgcgcctgcgcttgaccctgcgtgatgaaagcctggccgatagcgccgccattcgccagattgacggcgtgatgggggttatcgtcagcgatgaacagttccaggtggtattagggcccggcaaggcgcagaccgccgcggaaatgatgaacggcctgatggaagcggcgccgcaggcggccgcctcgctggcggatgtggcagcggagaaaaagcaggcgttaaagagcaagcagaccagcggggtacagaaatttctcgcgaagttcgccactatttttacgccgctgatccccggctttatcgccgtcgggctgttgttaggcttcgccacgctggcggaacaaatcttcgtgctggagaacgcgcatcctaacgccagcctggtggcgctgattggttatatgaaggtattcagcaaagggatgtttaccttcctgagtatcctgattggctataacgctcagaaagccttcggcggttcgggcgtgaacggcgcgattatcgcctcgctgttcgtgctgggctacaacccggaagcgaccagcggattctacgccggaatttcgaccttcttcggtcatggtatcgacccgcgcggcaatattatcggcgtgctaatcgcctcgattcttggcgcgtgggtggagcgtcaggtgcggcggataatgcccgctaacctcgatatgatccttacctcggcggtgacgctgctgattatgggcgcggtgacctttacggtgattatgccgattggcggctggctgtttaccggtatgtcgtggctgttcctgcatcttaacggcaatccgtttggctcggcggtgctggccgggctgttcctgctggcggtgatgttcggtgtgcatcaggggtttgtgccggtctattttgcgctggtggatgcgcagggctttaactcgctattcccgatcctggcgatggccggggccgggcaggtgggtgcggcgctggcgctgttctggcgcgcgaagcgcgattcgctgctgcgaacccaaatcaaaggggcgattattccgggcttcctcggtattggcgaaccgctgatttacggcgtgaccttgccgcgcatgaaaccgtttatcaccgcctgtatcggcggcgcctgcggcggtttcttcgtgggcctgattgcctggctggggctgccggttggcctgaacacggtgtttggcccgtccgggctggtggcgctgccgctgatgacctccggtagcggaatttatgccgggatggcggtgtacgccggcggtctggcggtttcgtatttatgcggttttgtcctcacctggctgttcgccagtaaaaacgttgacctgagttaa

SEQ ID NO: 87510 - DNA, 813 bp, Enterobacter aerogenes
atgatgaaattgcgtttacgcacggcggcggcagtgatgctggctggcctgctgttagcgggctgtgaccagaagaatgacaatgccaaacacataaaagtcggcgtgattaacggcgcggaacaggatgtggcggaagtggcgaagaaggtggcgaaagaaaagtatggcctcgacgtcgagctggtaggctttagcggctcgctgttgccgaacgatgctaccaacgccggggagctggatgccaacgtcttccagcatcgtccctatctggaacaagacaacaaagcgcacggctaccacctggtggccatcggcaatactttcgtctttcccatggccggctattcgcgcaagattaaatccgttgccgatattaaagatggcgcgaccatcgccattcccaatgacccgaccaacctcggccgcgcgctattgttattgcaaaaagagcagctgattaccctcaaagcgggtaccggcctgctgccgacggcggtggatatcaccagcaacccgcgaaacctgaaaattatggagctggagggcgcgcagctgccgcgggtgctggacgatccgaaggttgatgtcgccattatcagtaccacctacctgcagcaaaccgggttatcgccggtgcgcgacggcatctttattgaagacaaaaactcgccgtacgtgaacatcattgtggcgcgtgaagacaataaagacgccgaaagcgtgaaagagtttatgcagtcgtaccagtcgccggaagtggcgaaggcggcagaaaccatcttcaacggcggcgcggtaccgggctggtaa

SEQ ID NO: 87511 - DNA, 543 bp, Enterobacter aerogenes
atgaagaagaaactaaccgccgccgatatgcacaatccacaggtcatcgccgaaacgccatggttcagcatgcgcaaggtaggtattgatgtcgcccccggcgagcggcgcgacttttattccattcactacccacgcccggcggtcgggattgtggcgctccaggatgacaaagtgctgctgattcgccactaccgctatctgatcgataaggtggtgtgggctatcccgtcaggcggcgtcgatgaaggcgaagaacccgccgtcgccgcgctgcgcgaactacgcgaagagaccggctggcaagcgcaacacgctgaggaaatcatccgctacaacccgtcatacggcagcagcgaccagctgtttatcacctggctcgccaccgatttaagctgggttggcatggacgcagatcaggatgaagtgatggaaaccggctggtttaccttcgaggagataaaccagctgatcgcccgcggcgaaatgccggacgggctgtctctggtgccgctgctgcacctgatggcgcagcatagatga

SEQ ID NO: 87512 - DNA, 780 bp, Enterobacter aerogenes
atgaacatcactcatatccgtaatgctacacagattattgaatacgcaggtaaaaaattcctgatcgacccgatgctggcggacaaaggcgcctggccgggatttccaggaaccgcgcgcagcgagctgcgcaatccgctggtggcgctgccgtttccccgcgaaaaaattatcgacgtcgatgcggtaatcgtcacccatacccatgacgatcattgggacgaggcggcgatcgcggcgatcccgaaaatccttccggttttcgtccagcatgaggccgacgccgcgctgctgcgcagccagggatttcaggatatccgcctgctgtcggcagacagtgaatttgccggagtaggcctgcagaaaaccacttccgggcaacatggcagcgaccgtacctacgcggtaccggcgatggctgaacgtctgggcgaggcctgcggcgtggtgttccgtcatccgcaggagaagacgctgtggctggttggcgataccatctggcgcgatgagattgaagccgacatgctgaagctgcgcccggatgtggtggtgctgaacgccggctacgctcacgttatcggctttggcccgatcatcatgggcaaagaggacctgctgaaggcgcatttcgccctgccggaagcgaaaatcatggccatccacctggaggcggtcaaccattgtctggtgagccgcgaagagatgcgccagtacgtcgcggataatcagattgccggggtagtcagtattccacaggatggggaaaccgttgtttattaa

SEQ ID NO: 87513 - DNA, 957 bp, Enterobacter aerogenes
atgatgacattaaccgacgtggcgattgtcgccgtagagggctttagcccgtttcattattccgtcccctgtatgctgtttggcgatacggtctcggaaaccaaacgttttaatctgcagatttgcgccgaacagccgggattactcagcgcccgcgacggcttcgcgctatacgccagcggtgattttaccgcgatggaacaggcggatatcgtggtggtgccctactggggcgaggtcaaccagcgcccgccgcaggcgctgatcgcgagtctgattcgggcgcgcgataacggcgcggaaatcgtcggcctgtgcctcggcgcgtttgtccttggctacgccgggctgctcgacggtaagcgggcggcgacccactgggagttcgagcaggatttccagcgcctgtttccgcaggttcagcttgatatcaacgccctgtacgtcgatgaccagaaggtgattacctcggcggggaccgccgcggcgctagattgctgcctgtatatcattcgccagcgttttggcagcctcgccgccaaccagatcgcccggcggatgatcgtgccgccgcaccgcgagggcggccaggcgcagtttatcgcccagccggtgccgcgcaacacccgcgatgcgcggattaattgtctgctggattatctgcagcagcacattgccgagccgcataatcttgattcgctggccgaggtggtggcgatgagccgccgtaccctgacccgccacttcgccagggcgaccgggatgagcattgccgattggttgaccgctgaacgtctgcgccgcagccagagcctgctcgaagcgggggatttgccggtcgagcaggtggcggaagcggtgggctatctctccgccgtgacctggcgccagcagtttaaagcgcgttttggcgttagcccgacggagtggcggcggactttccgccgcggcgtttag

SEQ ID NO: 87514 - DNA, 1050 bp, Enterobacter aerogenes
atgcagatcaacgctataggtacgtactccgccagccagccgctcgaatcgatgtctatcacccgccgcgaacccggcccacaagatgtgcagatcgctattgcatactgcggcgtctgccattccgatctccatcaggcgcgagcggaatgggccgggacgctgtatccctgcgtgccgggccatgaaatcgttggccgggtgacggcggtcggcgatgccgtctcaggttacgccgtcggcgatctggtgggcgtcggctgtatggtggatagctgtaaacagtgcgaggagtgcgctgaagggctggagaactactgtgaccatatggtgctgacctataacgggccgacccaggacgcgccagggcatacgctgggcggttattcacagcagatcgtggtcaatgaacgctacgtactgcggataaaccatcccgaagcgcagctcgccgccgtcgcgccgctgttgtgcgccgggatcacgacctattcgccgctacgccactggcacgccgggccgggcaaaaaagtcggcatcgtcggcatcggcggcctgggacatatggggatcaagttggcccacgccatgggggcccacgtggtggcctttaccacctcggaatccaagcgcgacgcggccagagcgttgggcgcggatgaggtcgtggtgtcgcgcaacgaagacgaaatggcggcccacgtcaaaagtttcgatttcatcctcaacaccgtggcggcgccgcacaatctcgatgccttcaccacgttgctgaaacgtgatggcactatgaccctggttggcgccccggccacgccgcatccatcgccggaagtgttcaatctgatcttccgccgccgctcgattgccggctcgatgatcggcggtatcccggaaacccaggagatgctcgacttctgcgccgaacacggcatcgtcgccgatatcgagctgattcgcgccgatcagatcaacgaagcctgggaaagaatggtcaagggcgacgtgaaatatcgcttcgtgatcgacagttcgactctcgccggctaa

SEQ ID NO: 87515 - DNA, 303 bp, Enterobacter aerogenes
atgcgcgacgacactattgcgcttatcgcggttctgaaggcgaaagccgggcaaaccgaggccctgcgcgacgcgctgcaggcgctgctgctgccaacccgcgaggagcagggtaatctcgactacgcgctgtttcagctgcgcgacgcgccggataccttctacatgcgtgagtcctggcgcgaccagcaggcgctggatgagcatatcgcccagccctacttccaggcctttatcggccagatggagagcctgctcgccgagccgctgcggctggattatctgaaacccatcgcgccttga

SEQ ID NO: 87516 - DNA, 1008 bp, Enterobacter aerogenes
atgaaagccattgctattacccaggccgccgccgacggcaacaacatcccctttttacgcgatatcgatctgccggatccgcaggcgcaggggcacgatctgctggtcgaggtcaaagccatttcggtgaacccggtcgacaccaaagtgcgcgccgggtttaatgccgataccccgcgggtgctgggctgggatgcggttggcgtggtgaaagccgttggcgatgcggtgaccctattcacgccgggcgatgaagtgtggtacgccggcgcgctgggccgtcccggcagtaacagcgaactgcagctggttgatgaacgcatcgtggcgctgaagccgcgctcgctggagaatgccgccgccgccgcgctgcctctgaccgctatcaccgcctgggaattgctgttccaccgccttggcgtgcaggaaggcggtaacgccggcgatacgctgctgattgtcggcgcggcgggcggcgttggctctatcctcacccagttggccagcaaactcaccaacatgacggtaattggtaccgcatcgcgcccggaaagccagaagtgggtacgcgaggccggggcgcatcacgtcatcgaccacagcaaaccgctcggtgaagaactggcgaaaatcggcattcatgccgtgacccacgtcgccagcttgaccaataccgatcagcactttaacgaactgatcgccgcgctcgccccgcagggtaagctggcgctgattgatgacccggagagcctggacgtggtgccgctgaaagcgaaaagcatttcgctgcactgggaatttatgttcacccgctcaatgtttgagacgcatgacatgatcgcccaacatcagctactgacccgcgtcgccgcgttgattgacgataacacgctgcgcaccacccttggcgaacactacggaaccatcaacgccgccaatctgcaaaaagcccacgctaagttggaaaccgggcgctcggtcggcaaaatcgtgctggagggtttctaa

SEQ ID NO: 87517 - DNA, 1197 bp, Enterobacter aerogenes
atgcgtaaaatactcctttcgctgctgctggctgccgcgaccagtgggctggcgctggcggacgacggcaagccgttcccgcatatcggctggcgcagcgcggataatcttgccgggctggatttcggcggcgcgctgcgggcaaactatcgctatgaagactggaaaggcagtaattatcgcaacccgccgcatctgcgttttgataccttccgtatcgacagcagtggcttctatgataattatttctttgatgtcgggttctggtttcaggatcaccgtaaatacgccatcgaccgcgcttacgtagggtatcgcttcgacaataataataatatccaactggggatccccggcaaaccatttggccttgaaccttatccgcaatttggctggtcctacggtattccgttttatttaggctttggcgtgagcgccggtagcggcgtgaactatcaatatcatgataataactggtcgctggatgtggcctatttcccgtggatggagccggagaatttgcgctatgcgccggacgttggcgattacgatcggctgaaaaacactatctatccgactcagcatcagcagcataatgaaaagcgggaccaggtgaacgtgcgaatagcgcgggattttcacggcggcggctggaataacgagctgggcggctcactggcgctggcgcggttgcacaaccgcgagaccgacgacgatggcaccttctgggcggcaggcgtgcacggcatgttacataacgggccgtggcagctgacctcacagctgattcgctaccaatacgatccaaagaacccggcgggcgtcagcgacgatacgattctgatgggcggcaacggcctgacgccggcctacctgatcccggcgaaagcgacgaccgcgtcgctgaacgtcgcccgcgatgtcgacgtgaagtggggcggcgtgtcgaagctgcgtttttacaatgactacagcgtgctgtggaaagataaaagcggctggagcgattcgcagatgaacacccttggcgtacaggtcttcgctctgccggtgatgttctgggtcgatctcagctgggcgaagaacgttaatccgtggggcggcgcgctgaacgccaccggctggaccagcacccagtccgagggcagcggcaaatggtacttccgcaccaacgttaatattggttattacttctga

SEQ ID NO: 87518 - DNA, 1038 bp, Enterobacter aerogenes
atggcaaaggaaaatataacgtcgtccccagcaggggaattcattatgtttgccagcgaggacggggaagtgcgcgttgaatgccgctttgagcaagaaacactatggctccctcaagcaactatcgccagcctttatcaagtcaccccacaagcagttacacagcatattaaagcgatctatgaggaaggtgagcttgaacaaaacgcaacctgtaagtcttacttacaagttcaacaggaaggtagccgtcaggtaagccgaaaccggcttcactacagcctgcctgtcatactcgctgttggctatcgcgttcgctcctctcgcggcacacagttccgccagtgggcgacccagacgctccaggaatacctgatcaaaggttttgtgatggacgatgagcggctgaagaatccgcctgtgggttcatcggcagtacccgactatttcgatgagatgctggagcgtatccgcgatattcgcgccagcgaacgccgcgtttatttgcgggtgcgagagatttttgcattagcggctgactatcaaccgtcgttaaaagaaaccactcagttttttcaaacaatccagaacaagttacattttgcctgtaccgggcataccgccgctgaactcattcatcaacgtgctgacgccagtcagccgcatatggggctgaccaactataaaggtgaagaggtgcataagtgtgatgtgacggtggcaaaaaattatctcactcaggatgaagtcaatgagcttaaccgcgtagttaacatgtggctggattttgccgaggatcaggcccgtcgtcgtcagcaggtctttttacgcgactggcaggataagctggatcagttcctgcaatttaacgaccgcgaggttttgcaaggcgcaggtaaagtcagtaagaaaatggccgatgaaaaagcgcaggcggaatatagtcagtttgctgaacaacagcggcgcttaaaggaagccgaaggtgaaaaggatatcgccggtttgctacagtggaaaacagagcctaaaaagtag

SEQ ID NO: 87519 - DNA, 288 bp, Enterobacter aerogenes
atggctgatttgcattctaccccagatatcaccgctagcggaaccgaacgtcagttgctggttggctatcggcccaatggccgggataccagtacaccaagtcttaccctttccggcaagtggctacgcgaagcgggattcgataccgggaagccggtcacggttaaggtgatgaatggctgcattgtattgctgccgctcagcgataaagcagagaagctaacagccgaattacggcatattcaacaatcgctgaaaagcgtcaacggcacgctgcaacatacctga

SEQ ID NO: 87520 - DNA, 195 bp, Enterobacter aerogenes
atgtcaacagccaaacgtgataccaatcagtcaaaatgcggcaaagctcccacttttcagatgcggataacgccggagctgaaagcgcagtttgaggccgctgcagcagacgcagggatgagtttgggaaactggctcaagaccctgggaagaaaggagctggagaggctaagcattgagactgctgataagtaa

SEQ ID NO: 87521 - DNA, 567 bp, Enterobacter aerogenes
atgagtttagtgctatcgatcacaacggtgatagtgactttaatcagcccagtcattgccgttcaagttcagaaatttattgaaagatacactgataaaaagacacttaaaatagatatttttaaacaattgatggccaccagatcgcagaacgctaggttatcaaatgaacatgtcagagcgctcaatatgatcgatattgctttctatggtcgggtgagaaaaggacaagctaaaagaagtaaaactgaaaatcaggtcatatcttcctggaagttgtatttctcacatctaaatacaacatatccaaacaacgataacgccagcggcattatctggaatcaaaccagcaataatttatttgttgaccttctttcagccattgccaaagacattggttatgattttgagcgcgttcagttgcaaaccgctatctactcaccgattgcacacggtgaaattgaaaacgatcaattaaaaataagaaagggcctggcatcaatattctctgatgatggcgctataaaaatggagatcgttggtattcctggtcgaacagaaagttaa

SEQ ID NO: 87522 - DNA, 1395 bp, Enterobacter aerogenes
atgaaagatcatattctgtccgtcaaagagaaaattggctacggtatgggtgacgccgccagccacatcatttttgataacgtcatgttatacatgatgtttttctacaccgatattttcggtatccccgccggctttgtcggcaccatgttcctgctggcgcgggcgctggatgcgatttccgacccgtgcatgggcctgcttgccgaccgtacccgcagccgttggggtaagttccgcccgtggatcctcttcggcgctatcccgttcggcctcgtctgcgtgctggcatacagctcgccggatttaagccacaacggcaagctgatctacgccgccgtgacctacacgctgctgaccctgctctacaccgtagtgaatatcccctactgcgcgctcggcggcgtgatcaccgacaacccgacgcagcgcatctcgctgcagtcctggcgcttcgtgctggcgacggcggggggcatgctctccaccgtgctgatgatgccgctggtcaactttatcggcggcgaaaataaagcgctgggcttccagggcggcattgcggtgctctcggtggtcgccttcctgatgctggccttctgttttttcaccaccaaagagcgtgtcgaagcgccgccgagcagtacctcgatgcgtgaagacctgcgcgatatctggcgtaatgaccagtggcgggtggtcggcgtgctcaccatcctcaatatcctcgcggtctgcgttcgcggtggcgcgatgatgtactacaccacctggatcatgggctcggcggcgttgttcaccgtcttcctcaccacctactgcgtcggcaacctgattggctcggcgctggcgaagccgctgaccgactggaaatgtaaagtcagcgtcttctggtggaccaacgccctcctggcggtgctcagcgtggcgatgttcttcgtaccgatggacgccgaaatcaccatgttcgtctttatcttcatcattggcgtactgcaccagctggtgacgccaatccagtgggtgatgatgtccgacaccgtcgactacggcgaatggtgtaacggcaaacgcctgaccggcatcagcttcgccggcaccctgtttgtgcttaagttggggctggcgctgggcggcgcgctgatcggctggatgctggccggcggcggctatgacgccgccgctaaaacccagaacagcgccaccctcaccatcattatcgccttgttcaccctcgttccggcggtgtgctacctgctgagcgcggtaatcgccaaacgctactacacgctgaaaacgccgttcctgaaaaaaatgatggccgagctggccgagggcgcgcgtcgcaacgaacaagaatttacggcagccccgatcgaaaaagaatggcaaaactaa

SEQ ID NO: 87523 - DNA, 2319 bp, Enterobacter aerogenes
atgaaaatcagtgatggaaactggctcattcaaccagggctcaacctgatccaacccgtacaggtttacgaggtggagcagcaggggaatgaaatggtggtttatgccgcgccgcgcgatgtctgcgaacgcgcctggcagctggatacgccattgttcactctgcgctttttctcgcctcaggaagggataatcggcgtgcgcatggagcacttccagggcgcgctggataacggcccgcactatccgctgaacgtgcagaaagacgtccatgtcgaaatagaaaatacggccgagttcgccgagctgaaaagcggcagcctcagcgtgcgggtgactaaaggtgaattttgggcgctggattttctgcgcgacggtgtgcgtatcaccggtagccaactgaaaaacaacggctacgtgcaggatagtaagacccagcgcaactacatgtttgagcgcctcgacctcggcgtcggcgaaaccgtctacggcctcggcgagcgctttaccgcgctggtgcgcaacggccagacggtagaaacctggaacgaagacggcggcaccagcactgagcaatcctacaaaaacattccgttctacctgaccaaccgcggctacggcgtgctggtgaatcacccgcagcgcgtctccttcgaggtgggctcggagaaagtctctaaagtccagttcagcgttgaaggcgaatatctcgagtacttcgtgatcgacggcccgacgccgaaagcggtgcttaaccgctatacgcagttcaccggccgcccggcgctgccgccggcatggtcgttcggtctgtggctgacgacctcgttcactaccaactatgacgaagcgacggtaaatagctttatcgacggcatggccgagcgccatctgccgctgcacgtcttccacttcgactgcttctggatgaaggccttccagtggtgcgattttgaatgggatccgctaactttcccggacccggaagggatgatcaagcgcctgaaggcgaaagggctgaaggtctgcgtgtggatcaacccgtacatcggccagcgctcgccggtgttcaaggagctgaaagagaagggctatctgcttaagcgcccggacggttcgctgtggcagtgggataagtggcagccggggctggcgatttatgacttcaccaacccggaagcctgccagtggtacgccagcaagttaaaaggtctggtagcgatgggggtcgattgcttcaagaccgacttcggcgagcgtatcccgaccgacgtgcagtggtttgacggttccgatccgcagaaaatgcacaaccactacgcattcatctataacgagctggtgtggaaggtgctgaaagagaccgtcggcgagcaggaggcggtgctgttcgcccgttccgcctcggtgggcgcgcagcagttcccggtgcactggggcggcgactgctacgccaactacgaatcgatggcggaaagcctgcgcggcgggctgtcgatcggcatgtccggcttcggtttctggagccacgatatcggcggtttcgaaaacaccgcgccggcccacgtttataagcgctggtgtgcctttggcctgctctccagccacagccgcctgcacggcagcaaatcctatcgtgtgccgtgggcctacgacgaagagtcctgtgacgtggtgcgccacttcacgcacctgaaatgccgcatgatgccgtatctctatcgccaggcggcgctggccaacgagttcggcactccgatgttgcgtgcgatgatgctcgaattcccggacgatccggcctgcgactatctcgaccgtcagtatatgctcggcgattcggtcctggtggcgccggtgttctccgaagcgggcgaggtgcagttttatctgccggaggggcgctggacgcacctgtggcataacgatgaattgccgggtagccgctggcataagcagcgtcacgatgcactgagcctgccggtctacgttcgtgacaacaccctgctggcgctgggcaacaacgaccagaaacccgattatgcctggcatgaaggcaccgccttccagctgttccagctgggcgatggcaatgaaacggtctgtcaggttccggcggccgacggttccgcgatcttcactctgaaggcgaagcgccagggtaacaccatcaccgtgagcggcgaaggcgaagcccgcggctggacgctgtgtctgcgcaatatcccgcagatagcgggcgtggagggcgggacgcaggcgggcagcgaactgggcgtggtggtgagcgcccagggcaatgtgctgacgattacgctgtaa

SEQ ID NO: 87524 - DNA, 1572 bp, Enterobacter aerogenes
atgcaaatggttacctcgcgacagaacagattattaaaatttctcttgcctaaacgagaatacgttacgttattaaaaatggctgaatacttaaatgtttcagaaaaaacagttcagcgtgacttacgttttcttgaacaatggctctctgactggaaaatcagtattgataaacgtgccggcgcgggcgtcatgctattggctgataacgtcgccgatctgttgcaattagaccagttgctcagtagcgaaagcgatgatacagatgccatgatgaataattcccggcgtgtgaaaattgcttctcagttattaagtgaaacgccgcgcgaaacatcgatcagtaaattgtctgaacgttattttattagcagcgcctcaattgtgaatgatttaaaagtgatcgaatcatggattaggccactaggtctgatgctcattcgtagccagagcggcactcatattgaggggagtgaatcccatgttcgccaggctatggccttattaattaatggtgttattaaccataatgaaccaggaaatattattcactcccgtctggatagcggtagctataaagccctggtgcattatttcggtgaagaagatgtcatctttgtgcagtcgcttcttcaggatatggaacgaaaattaagttggtcgctgggcgagccgtattacgtcaatatcttcacccatatcctgattatgatgtatcgcatcacccgcggcaatgcactaccgcgccgggagcagggacatccattatttgatgagtccatctttcgtatcgcgcagaatatgctgcaaaaaattgaggcccgcattgcccatcctttaccagaggacgaaagctggtttatttatcaatacattatttcgtccggcatgctggtggaagagcgtgatgatgtcagcgtgctgcgcaatatacgttccagcgatgaggcccggcaaatcacctcccggctgatcgccctgttttcctcggtggttgatatcgatctgacgcatgacaccgcgttatatgaagggttgctcattcatatcaagccgctgctcaaccggctgaattatcgtatctatatccgtaatccgctgctggaagatatcaagggcgaattaacagaggtgtggccattaactctgcgggtggtgaatcaggtatttgccgcctggggcgagaacgcggtttcggaagatgaagtgggttatttaaccgtgcatttccaggccgcgatggagaggcaggtggccagaaagcgggtactgctggtgtgttcgaccgggattggtacctcgcatctgttgaaaagccgggtcctcagggcctttcctgactggaccatcgtcggcgtactgcctgcgggtagtctacatacgctacagcgacaggatgatattgaactggtcatttcaaccattcatctgccggagattgcgttaccggtagtctatgtcacggctttttttaacgatgccgatattaagcgggtaacagaaaaagttatcaccgagaaattacaccatgctgcaacgtcaactgccagcaatgaaattttatatccatga

SEQ ID NO: 87525 - DNA, 471 bp, Enterobacter aerogenes
atggacatcagccggattttaaatactaagcgtgtattgctggatatgaaggccacgactaaagcggaagttattgaagaattaaccgacctgctgcagaaagatggggccataagctgtcgcgaaacgtttattcaggacgtttggcagcgtgagtcggaaggttcgaccggatttgaaaaccacatcgctattcctcatggaaaatcatccgcggtgctgaatactacgctcgccattggccgtactcgtcaggatattgcctgggaaacgctcgatggaagccaggttcgttgcattattttatttgccgtccgtctggaagatcaaaataccacccatatccgcttactctcccaggtcgctggagcgttggccgatgatgacattattgcgcaattgctcgaagaaaccagtccgcagaagattattgatctctttagtcaatatgctgaatcggacgtttactaa

SEQ ID NO: 87526 - DNA, 315 bp, Enterobacter aerogenes
atgaatattgtctgtgttgccgcctgtacggcaggtattgctcatacttatatcgcacgtgagaagttaatgaaaggcgcgaaagcgctgggccataatgtcaaagttgaaactcagggaacaataggtactgagaatgaactgacaaccgaagatatcgctgccgccgatgtcgttattcttgccgttgatgtgaaaattaaaggcgaagagcgttttaaaaacaaacgaattgtccgcgtgaaaacggaggtcgttattaagtcaccgattcagtttatcgaaaaggtcgagaaatccttagctaatgcctga

SEQ ID NO: 87527 - DNA, 1092 bp, Enterobacter aerogenes
atgagtgagaataaaccacctgtctcgcaggaaattaaaaagcatttgttaacgggtatttcatggatgataccgctgattgttgccgccgggatctgcattgccctcggtcaggttctgggcggtaccaatgtcgccgagaaagtcggcactattccatggatgttgaatcaaatcggcggctgggggatggggctcatcgtcccgctcatctgtgcggcgattgcctattccattgccgacagacctggttttgcccctggactgattgttgggtttgtctgcgggcaaatccacaccggtttcatcggcggaatgctgggcggtttcctggtgggctatacggtgctgctgttaaagcattacgtgcggttgccaaaatcgatgcaagggctgatgcccattatggtgctgccggtattaagcaccattatcagcggtctgttgatgatgaccctgataggcaagccgattgcctggctgcaggaggccttgattcatctgttggagtcgatgcagggtggttcacgattcctgttgggggccattcttggcgcgatggccacctttgattttggcgggccggtgaataaaaccatgtcgttattcgccgatggcttgctggtgagcggggtctatggtccggaggcggtcaagtttgtcggctccatgatcccgccgttcggtattacgttgtccttcctgctgacccgccataaatatacccgtgctgaaagtgaagcgttaaaggccgccttcccgatgggtatttgcatgatcaccgaaggggtgatccctatcgcggcccgcgatctgctgcgggtggtgggatcctgcgtcgtggcttcagcggtggcaggcggcttgattatgacatggggtgtggaaagcccggtgccacatggcggtatgtttgtggtgccgctattcacccatccactgctgttttgtctggcgctggcgattgggacggttatctgcggcgtgatgttgtcgctatggaaaaaaccggtcacggagcgtgatgaagagtttgatgaactgagcgaccaaaaagtcgccgatgatgaaatcacctttacccttgagtaa

SEQ ID NO: 87528 - DNA, 852 bp, Enterobacter aerogenes
atgtttgccgatatgaagcagatggttgagaaagcctggcgtgaacagtatgccctgctggcgattaactgtatgaatctggagagcgcccgcgccgcggtacgcgtggcggaaaaataccgcgcgccgattattctcaatctctatcagggccatctggcgcattttccgccagcgacggcgatggcggtggccaggacccttgccgaagaggccagcgttcccgtgaccttgagtctcgatcatgggaaagaaccggtgaagatccgccaggcttttcgcgctggattcagcgggttgatgattgatgcttctgcatttccacttgcggaaaatatccgccagacccgagaggtcaccactctggctgccagcatcgggctgtgtgttgaaggggaattggggcatctggctgatgctccgcgctatgactctgcgacgaacgccgacctgatgacgcaacctgaggacgtcgccccgtttatcgagcaaaccggtatcgacttactggcggtctccgtcggcacggcccacggcatgtatgcgtctggggtcacgcccgcgctggactttgaccgtctggcgcaggtgcagcgagcctcttcggtgcccctggccctgcacggcggcagcggcacgccatttgatcagcttgcctgctgcccggcatttggcgtggcgaagattaatgtcggcgcggcggtgtttgaggcaggtaaagccgcactactccataccctttgccatgacagctctattgaactggccgatgccatggcggtgatggaacacgccagcgctgaagctatcgtcccttacctacaagcatccggcgcgataaaccgcgcctga

SEQ ID NO: 87529 - DNA, 861 bp, Enterobacter aerogenes
atgttagtttccatgcaagaaatacttaaaccgactcgtgaacacggctttgctatcggcgcatttaacgttgcggacagctgctttattcgcgccgttgtggaagaggcggaagcgaccaatacccccgccatcatttcaattcaccccagcgagcacgactttgtcggcgattccttttttagctacgtgcgggatatcacccagcgtagccgggtgccgtttacattacatctcgatcatggcgcctcggtggagcatgtgctgcgtgcgatccagtgtggttttacctcggtgatgatcgatgggtcgctgctgccctatgaagaaaacgtcgctctaactcgggaagtggtcaggttggcgcatgcggttggcgtctctgtcgaaggtgaactggggaccatcggccagacgggaacgtcggtagagggcggagtgtcgaaagtgacttataccgacccggcgcaggcgcaggattttgtcactcgtaccggcgtcgataccctggcggtggcgattggtaccgcgcacggcatctatccaaaagggatgcaacctgaattgcagatgcacattctgcgcgatattgccggacgagtgtcgatcccgctggtactgcacggcggctccgccaatccggatgcggaaattgccgagtctgtcacgctcggagtcgggaaaatcaatatctccagcgatatgaaacacgcttacttcctgaaagtacgtgaaattttgagtaaagagagctggtgggatccgaatgtgatttatccggaaccgattaatgccgcacgtgaagttattcgccacaaaatgaagttgtttggttccaccggcaaagcaagcttgtattga

SEQ ID NO: 87530 - DNA, 918 bp, Enterobacter aerogenes
atgaattacctcggactggatgttggtgggacgaaaatcgccgccgtcgtgatggatgagcagggacgggagcgggggcgttaccgccgcgcaacacggaaagaaaaccgtcaggcatttatatcgtgcatcgtggatttcgttgccgatattcgcgcgcggacgggaacgccgatggctattggcatcgcgttgccgggtagcgtttcgccacagcatggcgccattcgtaacgccaacattcaggtaattaacggctatcggttacaggatgcgcttgaacaggcgctcggtcagccggtggtgttagccaacgatggcaattgtttcgctttatcagaagcatgcgatggcgctggagaagggttttcatcggttttcggcatgacgttagggaccggctgcggaggtggtattactctggagcggcagcctttcgtcggcgcctcaggtattgccgcagagtgcgggcatatcgccttgcccggctattctcctgaggaggatgggccgccgacacgttgttattgcggcagatttaactgtgtggagtcttttatttccgcaacggggctacgtgaacgctatcgactgctcagcggagagcgtttgtcgagcgagcagattctcgcccgcgcgcaggcgggagaatccgccgcttgccatcagatccaccgctttcgtcaacagctggcgcggacgctggcgactattgtcaatatcatcgaccccggcgtgattgtgttgggcggcggtttatccaacgcgccgcagctggtagcggatttaccatcggcggttgcaccgcttgtcttcaccgaccatttttccacccctatcatttctgcgcggcatggcgacagtagcggtatgcgcggcgccgcctggcttgccgtgcgaagcggagttaaaccatga

SEQ ID NO: 87531 - DNA, 675 bp, Enterobacter aerogenes
atgaaacgttcccagattaactatgcgatagataaagcgctggcgatggccgaaacttttcgcatcagcctgccggaatttgcccactttacggcgtcaagctggccgcagaagcggcatgaaggttggcatgaagtccaggatctacagcttggatgggatgtgacggatttcgccagcggttgctttcgcgaaacgggccttacgctgttgacgttacgcaacggttctttatccgacccgcattataccaaaccctacgcggaaaaaatgttgcagattcagcaagatcagcaaaccccctggcatttccattaccacaaaatggaggacatcattaaccgcggcggcggcgacctctgcatgcaactggcctgggcgacacaggacgaacagttagaccaacagcgccatgttagcgtgatgatcgatggctgccagcgtacgctgaaacccgctgagacgctggtgctgcatccggggcagagcgtctgtctaccggtggggctctatcatcgcttctgggccgaaaaagggatagtgatgggttgggaaatttcaatggttaatgacgaccatacggataatcgttttctcgaggcgggcgggcgctttccctccattgaggaagatgaacctgcaagatggctgctgtgcagtgaataccggcagtga

SEQ ID NO: 87532 - DNA, 723 bp, Enterobacter aerogenes
atggacttagaaaatatctttcgtgacgtgaagttgagtaaaaccgaaatgaccgtgctgcgttttattcaaaatgacccgcagctatgtatccgcgaagggatccgcaccgtcgcggagcgctgctacagtaatccttcttcgctggtgcggctggcgaagaagcttaagttcagcggctggctggagctggtctatttcatcaagttcaatatcaccatgccaaagctcgatgtcaccaacgatatcgattatatgagcattcagccggcagaagcgctgacgccgctgctggcaggccttgagcagcagcgtattttgatccacggcagcggtttttcgcagctaatcgcccagtatatttataataagtttctcgttaccggcgtgaacgccagcctggcattgtggccggattatgaaatccttgagcaaaaaaacgctgcccgctttgattctatctggatcatctctaaatccggacgcagcagttcggcgttaaattgggttaaggcgctggaaggcaaggagataaacctggtttgctttaccggcgattatcaaagcccgctggcgcaggccgcgaatacggcgtttattattcacgacccgcagaagttcgacgatgatatttactggagcaacccgttttttggctactgcatattgggctttgagcggctgttaaaaatgtggtttaccagcgtacgtagcaataggtag

SEQ ID NO: 87533 - DNA, 1380 bp, Enterobacter aerogenes
atgaaattaaccgtattaggcgggggcggcgtgcgctctgcatttctggcaaagtcgctggcttataacgcgcaccgcattggtttaacggaagtggtatttcaggatagctcagcggagaatttatcgctatttggtgaaatcgcccgctatgtatttaataccattcgcccggatattcattttacgaccaccagcgatccggttgccgcgctgcagggtacccattacgtgattaccacgctgcgcgttggcggcgatgagagccgcatccgcgacgagcgaatcgcgctggagcataacacgctgggccaggagaccaccggcgcgggcggttttgccatggcgatgcgctcgatcccggcgatcctgcgctactgccgtctgatcgaggaacacgccgacaaagacgcgatcctgtttaactttactaatccgtccgggctggtcaccgaggcgattatcaaatctggtttcaaacgccgggtgtacgggatttgcgatgcgccgtcggaactcatccgcgagctgccggagatcctcggctgcgacccgcacgacctgagcgtggaatgctacggtttaaaccacttttcctggtttacgcacttcaccgtgcgcggggaagaggttaccgcgcagctggtcgccaacccggatttgtaccgcaaaacggcgatgcagtacttctcgccggagctggtcaaactgtgcgataaccagttgcttaacgaatatctctattactactactatcgcgaagtggcgctacgggcgattcaacaggcgccggagacccgcggcgagcagattgcccgtatcaaccacgatatgcgtcaggagctcagcggcgtggatgttaaagcggatccgcaggcggcctttaccatctggatgaagcactacctacgccgcgaaaacagctatatgcaaaacgagtcgcagcaggaaaaattccatacccgcgagccgttaacgctgcggcagtttatcgaagagccagataccggcggctacgccggggtggcgctggatattctggaggcggtcaacagcaccaccaccaaacgcatcgtggtgtcgctacaaaataacggcacgctcgattttttacgccccgacgatgtgattgaaatcagctgcgatctgagcaaagagggtcttaagccggtgacgccggttaacgtgccgacggcgcagaaaaatatgattgccagcgtgaaggagtatgaacgattggcggtggcggcaattctgcagcagaacaaatcgctggcggtgcaggcgttgatggctcatccgctggtcggttcatattcgctggcgaagaagctggttgaggcctatctcgacgatgaacagttcgccgggtggcggtaa

SEQ ID NO: 87534 - DNA, 1560 bp, Enterobacter aerogenes
atgtctgtaatacgtcaacgtattctggagaatatgcaaaaattctccagggccatgatcggcgcagtattgttcttgccgatcattggattaattctggctctcagttccgtcttaactaacccgactcttattgctgaaaccagtttccttcatcaattagggcaactgcttggcgataccttctggccattattcggtaacctcggattattgttttgcgtgggaataagttacggcctggcaaaagataaaaaaacggaagtcgcgcttgtctcggtgatgtgttttatcatgtttctcggcgccaaccattcatggctggaacatacgcatgcggttgcggaaaaaattaatggcgaatattacggtaccgggcaaacgcagctattaggctttgtggtcgtcgatatgggagtattcttcggaatcatccttggctgcaccattgcatgggtacataataaagtctccaatattgagctgcccggcgcgctatcgatgtatggcggggcgaagctgacgctggtcgccatgacgccggtcattatctgctacgccattgcttttacctggatttggccttttatgacccacggcattagcgccctgaccgggtttatgaagaatgccggcgttgcgggagtgtttgtctacggcttctttgaaaaattccttattcccaccggcttgcaccatttcgtgtggtcgcctttccagctcacgcaaatcggcggcacgctgaatgtcgatggccaggtcgtctccggcacccaggcgattttcctcgcctatatgcgccatcccgatctgacgccggtgatgaacgacgcattacgtttctcgcaacaggggatgaccaccatctttggcctggcgggcgcatcgctggcgttttatcacaccgcgaagccggagaagaaagcgatggcgaaggcgattctgctgccggcgattatcacctcgatgctgaccggcatcaccgaacccattgaattcaccttcttatttgtctcgccgctgctgtgggtgatccatgcgacgttaaccgccgcttcgcaggcaatttgcgacatcttcaccgtgcggccgtggggcgcctccggcctgattgaatttctgatctacaacctgccgctgccggtgtcgttaacccgctggccggggtacgtgctgatcggtattggccaatttatcgtttattacgcgatattccgcacgctggtcgtgaagttaaatctgaaaacgccgggccgcgaggatgacgataacgttaaattatacagtaaggcggactaccgtagaaaagtcagcggcccgcagtcgatgacggatgaaattattaatggcttaggtggtaaagccaatattatctccgttgataactgtttcacgcgcctgcgggtggttgtccataatatgacattagttgatgatgaaatattaaaaagtactggcgcaaatggcgtagtacgcaatcgtaatgaagttcaggttatttatggcgtcaaagtcgggcaagtccgttcccgggttgatagctggctagcagaaaattaa

SEQ ID NO: 87535 - DNA, 1710 bp, Enterobacter aerogenes
atgaaatttcttggaaagctgattctctggctgctgatcgccctgctggtcgttatcgtcgccgcttactttgcgctgcaaacccgctggggggcgcgccaggcgagcagttggttaagcgaaagcaccggctggaaaatcgccttcgataagatggcgcatgacttctcttccccactacatctgcagttgcaaaatgtcacctttggccgcgacggcaagccaccgacgctggttgccagaacggtggatatcggttttagcacccgccagttcagcgacccgctgcacgctgatgaaatcgttctcagcaacggcacgctgaatctttctccggcttccgcctcgatgccgtttgccgccgaccgcctgcagctacgcgatatggcctttaacagcccggacagcgagtggaacctgagcgcgcagcgggtgaccggcggcgtgatgccatggcagccggaagcgggcgacgtgctgggcagaaaagcgcaaattcagatgagcgcgggctcgatgaatattaacggcgtcgaagccagcaacgtcctgatccagggggcaatggataacggcgaggtgaccctgaacacccttggcgccgatatcgcgcgcggcacgctgaccggcaacgccaaacgccgcgccgacggtagctggctggttgataacctgcgtctgaatgaaattcgtctgcagagcgccaaaccgctgaatgagttccttgcgccgctcacctcggtgccctcgctgcagattggccggctggatgtgaccgatgctcgtttgcaggggccaggctgggcggtgaccgacctcgacctcaacttgcgcaatctgaccttgagccataacggctggcaaagcgacgacgggacgctatcgatgaacgccagcgagtttatctacggttcgctgaatttcctcgatcccatcgtcaatgccgaattctcgccgcagggcattgcgctacgccagttcagctcccgctgggagggcggcatggtgcgtacctctggcaactggctgcgcgccggtaatgcgctggtgctcgacgatgccgtcttcgccgggctggaatatacgctaccgtccaactggaaacagctgtggatggagccgatgccgggctggctgcaaagcctgacgctgaagaaattcagcgccagccgaaatctgattatcgatatcgacccagccttcccgtggcagatcaccgcgctggacggttacggcggcgaattacagctggtgaaagatggtcagtggggcgtgtggaatggcagcgccaccctcaatgccgccgccgcgaccttcaaccgcatcgacgtgcgccgtccgtcgctgaagctgaacgcgaacgcttctacggtcaacatcagcgagctgagcgcttttaccgagcgcggcattctgcaggcgaccgccgcggtgtcacaattgccgcaacgccaggtcaatctgagcttgaacggccgcggcgtgccgctgaatattctgcaggcctggggctggcctgcgctgccgattagcggcgacggcaacttccagctaaccgcgaacggtagcgtgcaggccaatgcgccgctgaaaccgagcgtcaacggccagctcagcgccaccaatatggacaagcagcaggcggcgcaggtgatgcgcaacggcgaggttagcaacgcgcctgccgcgtcggttcccgtaacgccgtag

SEQ ID NO: 87536 - DNA, 1392 bp, Enterobacter aerogenes
atgtccgttacgaccgcagagtcagaaaatgcgcaaccggttgcgcataaaccagccagcgaattaatctatcgcctcgaagaccgtccgccgcttccgcaaacgctgtttgccgcattccagcacctgctggcgatgtttgttgcggtcatcaccccggcgctgcttatctgtcaggcgctcggcctcccggccgaagatacgcaacacatcatcagcatgtcgctgttcgcctccggcgtggcatccattatccagattaaagcctgggggccagttggctccggcctgctctccatccagggcaccagcttcaacttcgtcgccccgttgattatgggcggcaccgcgctgaaaaccggcggcgccgacgtgccgacgatgatggccgcgctgttcggcaccctgatgctggcgagttgcaccgaaatggtcctctcgcgggttctgcatctggcgcgccgcattattacgccgctggtctccggcgtggtggtgatgattatcggcctgtcgctgattcaggttggcctgacttctatcggcggcggctatgcggcgatggccgaccacaccttcggcgcgccgaaaaacctgctgctggcgggcatcgtgctggcgctgattattatcctcaaccgccagcgcaacccgtacctgcgcatcgcctcgctggtgatcgcgatggctgccggttatctggcggcgtggttcctcgatatgctgccggctaacaccgcgcctaccaacagcagcctgatcactatccctacgccgctctattacggcctgggcatcgactggagcctgctgctgccgctgatgctggtctttatgatcacctcgctggaaacgattggcgatatcaccgccacctccgacgtttctgaacaaccggtctccggcccgctgtatatgaaacgcctgaaaggcggcgtactggcgaacggcctgaactcatttgtttccgccgttttcaataccttcccgaactcctgcttcggccagaacaacggcgtgatccaactgaccggcgtcgccagccgctatgtgggctttgtggtggcactgatgctgattgtgctcggcctgttcccggcggtaagcggctttgtgcagcatattcctgagccggtacttggcggcgcgacgctggtgatgttcggtaccattgccgcatccggcgtgcgcatcgtctcccgcgagccgctgaatcgccgcgctatcctgattatcgccctctctctggcggtgggtctcggcgtatcgcagcagcctctgatcctgcagttcgcaccggactggctgaaaaacctgctctcttccggtattgccgctggcggtatcacggcgattgttctgaatttaatcttcccgcctgagaagaactaa

SEQ ID NO: 87537 - DNA, 1203 bp, Enterobacter aerogenes
atgttgcatctcgataccttatcgacgcttgttgccgcaaccatggtgttgcttttagggcgaaagctcgttcagaacgtcccattcctcaaaaaatataccattcctgaacccgtcgccggcggcctgctggtggcgctggcgctgctggttttgaaaaaaagcatggatatcgaaatcgatttcgatatgagcctgaaggacccgctgatgctggcgttcttcgccactatcggccttaacgctaaccttgccagtctgcgggcgggcggcaaagtgcttggcactttcctgattgtggtggtgggcctgctgctgctgcagaacgcgctcggtatcggcatggcgaagctgctggggctggatccgctgatgggtctgctggccggttctatcacgctttccggcggccacggcaccggggcggcgtggagcaaattattcgttgagcgttacggttttgccaatgccaccgaggtcgccatggcttgcgcaaccttcggcctggtgctcggcggcctgatcggcgggccggtggcgcgttatctggtgaagcactcttcctcgccggacggtacaccggacgaccagctggcgccgacggcgtttgagaagccggatatgggccgcatgatcacctcgctggtgctgattgaaagtattgcgttaatcgctatctgcctgaccgtagggaaggtggttgcgcaactgctggcgggtaccgtgtttgaattaccgaccttcgtctgcgtgctgtttatcggcgtgatcctcagcaacggcctggcgctggctgggctgtatcgcgtgtttgaccgcgcggtatcggtactgggcaacgtcagcctgtcgctgttcctcgcgatggcgctgatgagcctcaagctgtgggaactggcgtcgctggcgctgccgatgattattattctggcggtacaggcggtggcgatggcgctgtatgcggtgtttgtgacttaccggatgatgggtaagaactatgatgccgccgttctggcagccggtcattgcgggttcgggcttggcgcgacgccgacggcgattgccaatatgcaggcgattaccgaccgttttggcccgtcgcatatggctttcctggtggtgccgatggtgggggcgttctttatcgatatcgtcaacgcgctggtgattaagctgtacctgctgttgccgatatttggctga

SEQ ID NO: 87538 - DNA, 1512 bp, Enterobacter aerogenes
atgaccgagaaaaaatatatcgttgcgctcgaccagggcactaccagctcccgcgccgtcgtgatggatcacgacgccaatatcgtcagcgtgtcacagcgtgaattcgaacaaatttatccgaagccaggctgggttgagcacgacccgatggagatttgggcctcgcagagctctacgctggtcgaagtgttggcgaaagccgatatcaactccgacgaaattgccgccatcggcatcaccaaccagcgtgaaaccgccatcgtttgggagcgtgagaccggtaagcctatttacaacgccatcgtctggcagtgccgccgcaccgcggatatctgcgagcagctcaagcgcgacggcatggaagagtacatccgcaaagccaccggcctggtggtggacccgtacttctccggcaccaaagtgaagtggatccttgaccatgtcgaaggcgcccgcgagcgcgcgaagcgcggcgaactgctgttcggtaccgttgatacctggcttatctggaaaatgacccaggggcgcgtgcacgtcaccgactacactaacgcctcgcgtaccatgttgttcaacatccatgaactggactgggacgacaaaatgctcgacgcgctggatatcccgcgcgccatgttgccggaagtacgtaagtcttctgaagtttacggccagaccaacatcggcggtaaaggcggcacccgtattcctatctccggcatcgccggcgaccagcaggcggcgctgtttggccagctgtgtgtgaaagaagggatggcgaaaaacacctacggtaccggctgcttcatgttaatgaacaccggtgaaaaggctgtgacctcaacccacggcctgctgaccactatcgcctgcggcccgaccggcgaagtgaactacgcgctggaaggcgcggtgtttatggccggagcgtcgattcagtggctgcgtgatgaaatgaaactcatcaacgatgctttcgattctgaatacttcgccactaaggtgaaggacaccaacggcgtgtatgtggtgccggcctttaccggtcttggcgcgccatactgggatccgtatgcgcgcggcgcgattttcggcctgacccgcggagtgaacgccaaccatattatccgcgccacgctggaatctatcgcctatcagacgcgtgacgttctggaagcgatgcaggccgactccggtattcgtctgcacgccctgcgcgtggacggcggcgcggtcgccaacaacttcctgatgcagttccagtccgatattctcggcacccgcgtggaacgcccggaagtgcgtgaagtcacggcgctgggcgccgcttatctggcaggtctggcggtcggcttctggcaaaatctcgacgagctgcaggagaaagcggtgattgaacgtgagttccgcccgggtattgaaaccaccgagcgtaatttccgctacagcggctggaagaaagcggtgaaacgcgcgttagcgtgggaagagcacgacgaagcgtaa

SEQ ID NO: 87539 - DNA, 849 bp, Enterobacter aerogenes
atgagccagacatcaacattaaaaggccagtgcatcgcagagtttctcggtaccgggttgttgatctttttcggcgttgggtgcgtagctgcgctcaaagtcgcaggagccagcttcggtcagtgggaaatcagcatcatctggggtctgggggtggctatggctatctacctgaccgcgggcgtatccggcgcgcaccttaatccggcggtcaccatcgccttatggttattcgcctgctttgatgggcgcaaagttgttccttttattatttctcaattcgccggcgccttttgcgctgcggcattagtttacgggctttattacaatcttttcttcgatttcgaacacacccacaacatggtacgcggcagcgtggaaagccttgagctcgccggtatcttctcgacctaccctaacccgcatatcaattttgtgcaggccttcgcggtagaaatggtgattaccgctatcctgatgggcgtgattttagcgctgaccgacgacggcaacggcgtgccgcgcggcccgctggcgccgctgctgattggtctgctgattgccgttatcggtgcttctatgggtccgctgaccggcttcgcgatgaacccggcgcgtgatatcggaccgaaagccttcgcctggctggcaggctggggtaacgtcgctttcaccggcggcaaagatattccttatttcctggtgccgctgtgcgcaccggtggtcggcgcggcgctgggcgcattcagctaccgcaaattcattggccgccatctgccttgcgacacctgcgtcgaggaagaaaaagaatccgcttcttccgcgtcgcaacaaaaagcttcgctgtaa

SEQ ID NO: 87540 - DNA, 240 bp, Enterobacter aerogenes
atgtcattagaagtgtttgagaaattagaatctaaagttcagcaggcgattgataccatcactctgttgcagatggaaatcgaagagctgaaagaaaagaacaccacgctggcgcaggaagtgcagagcgcgcagcacggccgtgaagagctggagcgtgaaaatagccagctgagagaacaacagcagggctggcaggatcgtctgcaggcgctgctgggccgcatggaagaagtctaa

SEQ ID NO: 87541 - DNA, 990 bp, Enterobacter aerogenes
atgaataagtggggcgtagggttaactctgttgctggcatccgccagcgtgctggcaaaagattatcagctgttaaacgtatcgtacgatccgacgcgcgagctgtacgaacagtacaataaagcgtttagcgcgcactggaagcaggaaaccggcgataacgtggtgattcgtcagtcgcacggcggctccggcaaacaggcgacgtcggttatcaacgggattgaagcggatgtcgtcaccctggcgctggcctacgacgtagacgccattgctgaacgtggtcgtatcgataaaaactggctgaagcgcctgccggataactccgcgccgtatacctcaaccatcgtgttcctcgtccgtaagggcaacccaaaacagatccatgactggaacgacctgattaaacccggcgtatcggtcatcaccccgaacccgaaaagctccggcggcgcccgctggaactatctggcggcatggggctatgccctgcatcagaatcacggcgatcaggctaaagcgcaggagttcgtgaaagcgctgtataaaaacgtggaagtgctggattccggcgcacgcggttccaccaacaccttcgtagaacgcgggatcggcgacgtgctgattgcctgggagaacgaagcgctgctggcgacgaaagagctgggcaaggacaagtttgaaatcgtgacgccgagcgagtccattctggccgagccgacggtttccgtcgtcgataaagtggtggataagaaaggcactcgccaggtggcggaagcgtacctgaagtatctctactcgccggaaggccaggagattgcggcgaagaacttctatcgtccgcgcgatcctgatgtggcgaagaaatatgccaacgagttcccgaaactgaagctgtttaccatcgatcaggaattcggcggctgggctaaagcgcagaaggagcacttctccaacggcggtaccttcgaccagattagccagcgttaa

SEQ ID NO: 87542 - DNA, 765 bp, Enterobacter aerogenes
atgagaagagtaagataccttttatgggcgctgctggtggttattctggcggcgctggctggcggctactattggctgcattccggtaacccgaacgcgttacgtcatattgtcctgcagcagtgcgtacccaatcagcagcaacatcaaaacccgtcgccgtgcgcggaagtgaacctgaaaggcggctacgtgttgtttaaagatcgcaacggcccgctgcaatatctgctgatgccgacctaccgtattaacggtaccgaaagtccgctgctgttggatccgctaacgccaaatttcttctggcaggcctggcaggggcgcgaaattatgagccagcgccgcggcgcgccgattgatgataacgcggtatcgctggcgattaactcgcgcagcgggcgcacgcaaaaccatttccatattcatatctcctgcctgcgtcccgatgtccgcgcgcagttagataatgatgcggcgacaattagcagccgctggctccctttgccgggcggtctgcagggccatgaatatctggcgcgtcgggtaacggaagccgagctggctcagcgcagcccgttcctgatgctggcggaagaggtaccggaagcgcgcgaacatatggggcgttatgcgttagcgatggcgcggcaaagcgacggctcgctggtgctgttggcgacagagcgtaacctgctgactctcaaccgtgcttcggcggaagaaattcaggatcatagctgcgcaattcttaacgcaaaccactag

SEQ ID NO: 87543 - DNA, 1305 bp, Enterobacter aerogenes
atgtcgctctggctaacccacccgctgttcctcccttcgctgatcgtcggcatcaccattgtgctctgggcgacttcgctgttaccggaatttatcaccgcgctgctgttcttcgcggcggcgatgatgaccaaaatcgctccgccggaggtgatcttcggcggttttgcttcctccgcgttctggctggtgttcagcggctttgtgttggggatcgccatccgtaaaaccggactggcggatagagcggcgcaggcgctatcggcgcggctcaccgactcctggccgcggatggtcggcagcgtcgtattactgagttatgcgttggcgtttgtgatgccatcaaatatggggcgcatcgcgctgttgatgccgatcgtggcggcgatggcccggcgcgcggggatagccgacggcacgcgcggctggtacggcctggcgctggcggtgggctttggcaccttccagctatctgcgaccattttgcctgctaacgtgccaaatctggtgatgagcggggcggcggaaggctcttacgggatccatttgaattacgttccctatttactgctgcatacgccagtgcttggctggttgaaaggggcggtgctggtggcgctgatctgctggctgtttcccggcaagccgcatccgccgcgcgagctggcgccgcaggcgccaatgagccgcgatgaaaagcgtctggcgtggctactggcggtggtgttgacgttatgggtgaccgaaagctggcacggcgtcggcccggcgtggaccggcctggcggcagcggtggtcacgctgctgccgcgagtaggatttatcagcggtgaggagttcgccagcggggtgaatatgcgcacctgcatttatgttgccggcattttgggactggcgattaccgtgacccaaaccgggattggcggcgcggtgggtaacgcgttgctgcaggtgatgccgctggataaagataatccgttcaccagcttcctggcgctgaccggaattaccagcgcgctgaattttattatgaccgccaacggcgtcccggcgctgtatacgacttttgcgcagagctttgccgacgcgaccggctttccgctgctgagcgtgattatgattcaggtgctgggttattccacgccgctgctgccataccaggcgtcgccgattgtggtggcgatgggattaggtaaagtcccggcgagagcggggatgttgctatgtctggcgctggcggcggtgagctatttgattttgctgccgctggattatgcgtggtatcagctattggggaaattgtag

SEQ ID NO: 87544 - DNA, 768 bp, Enterobacter aerogenes
atgcgacatcctttagtgatgggtaactggaaactgaacggcagccgccacatggtaaacgaactggttgctaacctgcgtactgaactggccggcgtaagcggctgtgcagtggcaatcgcgccgccggaaatgtatctcgacctggctaagcgtgcggcagaaggcagccacattcacctgggcgcgcagaacgttgacgtgaacctgtccggcgcattcaccggtgaaacctccgccgaaatgctgaaagatatcggcgcgcagtacatcatcatcggccactccgaacgccgtacctaccacaaagaatctgacgaactgatcgcgaaaaaattcgctgtactgaaagagcagggtctgacgccggttctgtgcatcggtgaaaccgaagctgaaaacgaagcgggcaaaactgaagaagtgtgcgcacgtcagatcgacgcggtgctgaaaactcagggcgcagccgcttttgaaggcgtggttatcgcgtacgaaccagtatgggctatcggtaccggtaaatccgctaccccagcgcaggctcaggcggtacacaaattcatccgtgaccacattgctaaagctgacgctaaaatcgctgagcaggtcatcatccagtacggcggttccgttaacgccggcaacgccgcagagctgttcacccagccggacatcgacggcgcgctggttggcggcgcttccctgaaagcagacgctttcgcggtgatcgttaaagctgcagaagcggcgaaaaaagcgtaa

SEQ ID NO: 87545 - DNA, 600 bp, Enterobacter aerogenes
atgaagaagtgggcaatcttaagtttgattgggctgacagcgttatctgtcggcccgatggcgttgtccgcagaaacagaatccgccgccaccgccccctatcttttacccagcgcgccgatttttgatgtcagcatcagcgagttccgcgaaaaatttaatgccgataatccgaaactgccgcttaacgagtttcgttctatcgcctccagccgcgataaagctaacctgacccgcgctgccaccaagattaacgagaatctgtatgcctctaccgcgctggagcgcggcacgctaaagattaaatcgatgcagataacctggctgccgattcaggggccggaacaaaaagcggcgaaagcgaaagcgcaggaatatatgagcgccattcttcgcgcctttgtgccgaccctaagcccactgcagagccagcaaaagctgcaaaaactgctgaccgccggcaaaggcaaacgctactacaccgaaaccgaaggcgcggtgcgctatgtagtggcagatcaaggggaaaaggggctaactttcgccattgaaccgattaagctggcgctatctgaaacgctggaagacaacaataaatga

SEQ ID NO: 87546 - DNA, 429 bp, Enterobacter aerogenes
atgaccctacagcagtggttattctcaattaaaggccgtattggccgccgggatttctggatttggatcgttatctgggtgttgaccatgagcgcgctgtttaccctcgcgggcagcaatttgctgagtttacagaccgcggcgtttattctcgtctgcctgctctggccgacggcggcggtggtggtgaagcgtctgcacgatcgcgggagatccggcctctgggcgctgctgatgattctggcgtggatgctgctggcgggcaactgggcgatgttgccgcaggtctggcagtggggcgtcgggcgctttgtaccgacgctgattatcgtcatgatgttgatcgatctgggcgcgttcgtcggcacccagggcgaaaataagtttggcaaagagacgcaggatgtccgctggaaagcggacgcctga

SEQ ID NO: 87547 - DNA, 747 bp, Enterobacter aerogenes
atggcaaactgggttacaggtaaagttgtaaaagtgcaaaactggaccgatgcactgtttagcctcaccattcacgcgcccgttgagccgttcaccgcagggcagtttgctaaactgggcctggatgttgacggcgagcgcgtgcagcgcgcctactcctacgtcaacgcccccagcaatcccgatcttgagttctacctggtcaccgttccggagggtaaactcagcccgcgactggccgcgctgaaacccggggacgacgttcagatagttagcgaagccgccggtttcttcgtgctggaagaggtgccggactgcgacacgctgtggatgctcgccaccggtacggcgatcggcccctatttgtcgattctggaagaagggaaagacctggatcgcttcaaaaacctggtgctggtgcatgcggcgcgctacgcagccgacctcagctatttaccgcaaatgcgcgagctggagcagcgctacgccggcaaattgcgtatccagaccgtggtcagccgcgagacagcggaaggttctctgaccggccgggtgccgtttctgattgaaaccggtgcgctggaagaggcggtcggcctgccgatgaccgccgataccagccacgtgatgctgtgtggtaacccgcagatggtgcgtgatacccagcagttgctgaaagagacccggcagatgaccaaacatctgcgtcgccgaccgggccatatgacagcagagcactactggtaa

SEQ ID NO: 87548 - DNA, 1011 bp, Enterobacter aerogenes
atgaaacgagaactggccatcgaattttcgcgtgtcaccgaagccgccgcgctggcgggctataaatggctgggccgcggcgataaaaataccgccgacggcgcagcggttaacgccatgcgcattatgctcaacctcgtcaatatcgacggcaccattgtcatcggcgagggcgaaatcgatgaagcgccgatgctctatatcggcgaaaaagtgggtaccggcaaaggcgacgcggtagatatcgccgtcgatccgattgaaggtacccgcatgacggccatgggccaggccaacgcgctggcggtgatggcggttggcgataaaggctgcttcctcaacgcgccggatatgtatatggaaaagctgattgtcggccccggcgccaaaggcgccatcgatctcaatctgccgctggaagagaacctgcgcaacatcgcccgcgcgttgaacaaaccgcttggcgaactgaccgtcaccgtgctggcaaaaccccgccacgacgcggtcattgcgcaactgcagcagctgggtgtacgcgtgttcgcgatccccgatggcgacgtggcggcctccattctcacctgtatgccggatagcgaagtcgacgtgctgtacggcatcggcggcgcgccggaaggcgtggtttcggcggcggtgatccgcgcgctggacggcgatatgcagggccgcctgctggctcgtcaccacgtgaagggcgacagcgaagagaaccgccgtatcggtgaaaacgaactggcgcgctgcaaaaccatgggcatcgaagcgggtaaagtgctgcgtcttgatgaaatggcgcgcagcgataacgtcatcttctccgccaccgggattaccaaaggcgatctgctggacggtattacccgcaagggcaatatggcgaccactgaaacgctgctgatccgcggtaaatcgcggactatccgccgtattcagtcgattcattacctcgaccgaaaagacccggacgtccagcaacacatcctgtaa

SEQ ID NO: 87549 - DNA, 2082 bp, Enterobacter aerogenes
atgtcaggccgcctgttagatgccgtcccgctcaactcgctgaccggcgttggcgccgcacagagcagcaaactggcgaaaatcggtctgcatacggttcaggacctgctacttcacctgccgctacgctatgaagaccgaacccacctgtatcaaatcggcgaactgctgccgggcgtctacgcaaccgtagagggtgaagtgctcaacagcaatatcaccttcggcggccgccggatgatgacctgtcagatcagcgacggctccggcatcctgaccatgcgttttttcaacttcaacgcggcgatgaaaaacagcctggcgaccggtcgtcgcgtgctggcctacggcgaagctaaacgcggcaagtttggcgccgagatgatccacccggaatatcgcgtacagggtgatatgagtaccccggagctgcaggaaaccctcactccggtctacccaaccactgaaggcattaagcaggcgacgctgcgcaaactcaccgatcaggcgcttgagctgctggaaacctgcgcgattagcgaactgctgccgccggagctggcgcaggggatgatgagcctgccggaggcgctgcgtacgctgcaccgcccgccgccgtcgctacagctcagcgagctggagagcggtaaacatccggcacagcagcgtcttatcctggaagagttgctggcgcataatctcagcatgctggcgcttcgcgccggcgcccagcgctaccatgcgctgccgctcagcgccaatgacacgctgaaaacccagctcctggcttccctgccctttaaaccaacgggcgcgcaggcgcgcgtcaccgcggagatcgagcgcgatatggcgctggacgtgccgatgatgcgcctggtacagggcgacgtcggatccggtaaaacgctggttgccgcgctggccgccttgcgcgctatcgcccatggtaagcaggtggcgctgatggcgccgaccgaactgctggccgagcagcacgccaataatttccgcagctggttcgcgccgctgggcattgaagtcggctggctggctggcaaacagaaaggcaaagcgcgccaggcgcagcaggaagccatcgccaacggtgaagtgcagatgattgtcggcacccacgccatttttcaggagcaggtgcagtttaacggcctggcgctggtgattatcgacgaacagcaccgctttggcgttcatcaacgcctggcgctgtgggaaaagggccagcagcagggcttccacccgcatcagctgatcatgaccgctacgccgattccgcgcaccctggcgatgaccgcttatgccgatctcgatacctcggttatcgatgagctgccgccgggccgtaccccggtaacgaccgtcgctatccccgatacccgccgcagcgacattatcgaccgcgtgcgcaacgcctgcacccaggaaggtcgtcaggcctattgggtctgtacgctgattgaagagtccgatctgctggaagcccaggcggcggaagccacctgggaagagctcaaactggcgctgccggaacttaatatcggcctcgtccacgggcggatgaaaccagcggaaaagcaggcagtgatgcaggccttcaagcagggcgagatgcacctgctggtcgccaccacggtgattgaagtcggcgttgacgtccctaactcaagcctgatgattatcgaaaaccctgagcgtctgggtctggcgcagctgcaccagctacgcgggcgcgtcgggcgcggcgccgtcgcctcccactgcgtgctactctataaatcgccgctctccaaaacggcgcagaagcgcctgcaggtgctgcgcgacagcaacgacggtttcgtcatcgcccagaaagacctggaaatccgcggccccggcgagcttctcggcacccgccagaccggcaacgccgaatttaaagtagcggacttgctgcgcgatcaggccatgatccccgatgttcagcgcattgctcgtcatattcacgaacgctatccgctgcaggcgcaggcgctgattgagcgctggatgccggaaaccgaacgctattccaacgcgtag

SEQ ID NO: 87550 - DNA, 690 bp, Enterobacter aerogenes
atgaattcacagcgttatgcgcgtatctgcgagatgctcgccaggcgtcagcctgatctgacggtctgcatggagcaggtccataaaccccataacgtctctgcggtcatccgcaccgcagacgccatcggcgtacacgaagtacacgccatctggcctggcagccgtatgcgcaccatggcctctgccgccgccggcagcaatagttgggtgcaggtgaaaacacaccgcactatcggcgatgccgtcagccacttaaaaggccggggcatgcaaatcctcgcgacgcacctttccgacaaagccatcgattttcgcgaaatcgactatacgcgcccgacctgtatcctgatgggtcaggagaaaaccggcatcacccaggaagcgctggcgctggcagaccaggacatcattatccctatggtcggtatggtgcagtcgctgaacgtctccgtcgcctccgcgctgatcctttacgaagcgcagcgtcagcggcagaacgctggaatgtaccaacgcgccaatagcatgctgccgcctgaagagcagcagcggctgctatttgaaggcggttacccggtgctggcgcgcgtcgccaggcaaaaaggtctgccttatccccacgtcaacgagcagggtgaagtcgaagccgatgcctcgtggtgggcaacgatgcaggcggcgaggtaa

SEQ ID NO: 87551 - DNA, 2121 bp, Enterobacter aerogenes
ttgtatctgtttgaaagcctgaatcagctgattcaaaactacctgccggaagagcaaatcaagcgccttcggcaggcgtatctcgttgcacgtgacgctcacgagggtcagacacgttcaagcggtgaaccctatatcacgcacccggtagcggtggcctgtattctggccgagatgaaactcgactacgaaacgctgatggccgcgctgctgcatgatgtgattgaagatacccctgcaacctaccaggacatggaacagctttttggtaaaagcgtcgccgaactggtagagggggtgtcgaaacttgataagctcaagttccgcgataagaaagaggcgcaggccgaaaactttcgcaaaatgatcatggcgatggtgcaggatatccgcgtcatcctcatcaaacttgccgaccgcacccacaatatgcgcaccctgggctcgctacgcccggataaacgccgccgcatcgcccgcgaaacgctggaaatttatagcccgctggcgcaccgtttaggtatccatcacatcaaaaccgagctcgaagagttgggctttgaagcgctgtaccctaaccgctaccgcgtcatcaaagaagtggttaaagcagcgcgcggtaatcgtaaagagatgattcaaaagatcctctctgaaatcgaagggcgtttacaggaagcggggatcccctgccgcgtcagcggtcgcgaaaagcatctgtactccatttactgcaaaatggtgcttaaagagcagcgttttcactcgatcatggatatttacgccttccgcgttattgttcacgatcccgatatctgctatcgcgtgctgggccagatgcacagcctctacaagccgcgtcccggtcgtttcaaagattacatcgccattccaaaagcgaacggctatcaatctttgcacacctcgatgattggcccccacggcgtcccggtcgaggtacaaatccgtaccgaagatatggaccagatggcggaaatgggggttgcggcgcactgggcttataaagagcacggcggcgaaagcagcacgaccgcgcaaatccgcgctcagcgctggatgcaaagcctgctggaactgcagcagagcgccggtagctcgtttgaatttatcgagagcgttaaatccgatctgttcccggatgagatttacgttttcaccccggaagggcgcattgtcgaactgcctgccggcgccacgccggtggacttcgcctacgcggtgcataccgatatcggccatgcctgcgtcggcgcgcgcgtcgaccgtcagccctatccgctgtcgcaaccactctccagcggccagactgtcgaaatcattaccgcgccgggcgcacgcccgaatgccgcatggctgaactttgtcgtcagctcaaaagcgcgcgccaagatccgccaactgctgaagaaccttaagcgcgacgattcggtcagccttggccgccggctgcttaaccacgcgttaggcggcagccgcaagctggcagagatcccgccagagaacatccagcgcgaacttgaccgcatgaagctggccacgcttgacgatctgctggcggaaatcggtctcggtaacgcaatgagcgtggtggtggcgaaaaacctgcagcagggcgaagcctctgccgcaccggtgccggccaacgcgtcgaatcacggccatctgccgatcaagggcgccgatggcgtgctgattactttcgccaagtgctgtcgtccgattccgggggatccgatcatcgcccacgtcagcccaggcaaagggttggttatccaccatgaatcctgtcgtaacatccgcggctaccagaaagagcctgagaagtttatggcggttgaatgggataaagaaactgcgcaggaatttatcgccgaaattaaggtggatatgttcaaccaccagggcgcgctggctaacctgacggccgcaatcaacaccgcgtcttccaatattcagagcctgaatacggaagaaaaagatggccgcgtttacagcgcctttatccgcctgaccgcgcgcgatcgcgtgcatctggcgaatatcatgcgcaaaattcgcgtcatgccggacgtgattaaagtcactcgtaaccgaaattag

SEQ ID NO: 87552 - DNA, 276 bp, Enterobacter aerogenes
atggcacgcgtaactgttcaggacgctgtagagaaaattggtaaccgttttgacctggtactggtcgccgcgcgtcgcgctcgtcagatgcaggtaggcggaaaggatccgctggtaccggaagaaaacgataaaaccaccgttatcgcactgcgcgaaatcgaagaaggtctgatcaacaaccagatccttgacgtacgtgagcgccaggaacagcaagagcaggaagccgctgaattacaagccgttaccgcgattgctgaaggtcgtcgttaa

SEQ ID NO: 87553 - DNA, 735 bp, Enterobacter aerogenes
atgaaagaaacagcggcaaaaagtgtgacaatgactgcctcacgcggcggcggcgtgtataataggctcgtatgtaggatctctttcgacaatcacatacaaaagacactcatggctcaaggcacgctttatattgtttccgcccctagcggcgcgggtaaatccagcctgattcaggctttattgaaaacccaaccgttgtacgactcccaggtttctgtgtcgcataccacgcgcaatccgcgcccgggtgaagttcacggtgaacactatttctttgtcgatcatgataaattcaggtcgatgattagcgaagacgctttccttgagcacgctgaggtttttggcaactattacggtacctctcgtgaagctattgagcaggttctggcgaccggcgtcgatgttttcctcgatatcgactggcagggcgcccagcaaattcgtaataaaatgcccggcgcgcgcagtatctttattctgccgccgtcaaaagacgagcttgaccgccgcctgcgcggccgcggtcaggacagcgaggaagtcatcgcaaaacgtatggcgcaggcagttgcagaaatgagccattacgcggaatatgattaccttattgtgaatgatgattttgataccgctttaggcgatctgaaaaacattatccgcgctgaacgtctgcgcatgagccgccaaaagcagcgacatggcgctttaatcaccaaactattggcagactga

SEQ ID NO: 87554 - DNA, 1677 bp, Enterobacter aerogenes
atgcgcagatggctgatagcggcagcgttatggatggcggcggcaagcccaatggcggcctgcccggcgtggtctttgcaacgcgcggagcaggagataggccacctcagtcggcaaattgccggctggaaagcggcctactggcagcagggcagcagcggggtcagcgacgaggtctacgacatgctctcggcccggttggcgcagtggcggcgctgcttcggtgagaaggcgccgcctgaagacgatctgccgccgccacgcggcgaagtcaagcatcctatcgcgcataccggcgtgcgcaaactgcccgatgccacgagcgttggccgctggatgcgcgataaaaccgacctgtgggtacaaccgaaagtcgacggtgtggcggtgacgctggtttatcgcggggggaggttaatacaggcgattagccgcggcgacggtctggcgggggaagactggacggcaaaagtgcgccagatccccggcgtaccgcaaactaccgcaggagcgctggcaaatagcgtgctacagggcgagatttttcagctgcaagaggggcatctacaaaaacaggcgggcggtatgaactcacgggcgaaagtcgccgggatactgatgcgcaaagcgccatcggcgacgctgaacacgctgggggtgtttatctgggcctggcccgacggtccggcccggatgtctacccgtctggcgctgcttgctgacggtgggtttcctctggcgcagcgctattcccattcggtgaaagactggcaggagaccgccgtctggcgcgagcgatggttcacctcgccgctgccctttgtcaccgatggcattgtgatccgtgcagaaaaagaacctgccgggagcagttggcttccagggcaggggcactggctggcggcctggaaatatcagccgttttcgcaggtggcggaagtgaccacaatccagttcactgtcgggcgcagcggcaagatagccgttgtggcgcatctcgaaccggtaaaactggacgataagctggtgcgtcgggtcaatattggctcggtggcccgctggcggcggttagacattgtcgccggggaccaggtactgataagcctggccggacaggggatcccgcgtctggatagcgtggtctggcgggccagccagagagatgcgccacagttgccttcgcctcgctttcattccttaacctgttattttgcgacgaccgaatgtgccgggcagttgcgctcccggctggtctggctatcgtctaagccggttctggatattgcgggcgcaggagaggcgctttggcgcacgctaatggacgatcgccgcatgacacatcttttctcatggctggccttgacgcctgaacaactacagagcgtgccaggcattaccagcaagcgtggcctgcggttgtggcatcagttcaatttggctcgcgagcagccgtttattcgttgggtgctggcgctaggggtaccgatacctcaggccgcgcaggcgagcgttgcggcagaaaactggcagcaactgcgggaacgcaatgagtctcagtggcggcgattaccgggagtggggcaggaaagggcgcgccagctggtcacctttttgcaaaacccggatattgccgcgctggcgcagtggctcagcgggcaacgtattccgggattctga

SEQ ID NO: 87555 - DNA, 618 bp, Enterobacter aerogenes
atgctgcttcatgttctttatctgattggtattacggcggaagcgatgactggcgctttagcagccgggcgtcgccgtatggacacctttggggtgattattatcgccaccgctaccgcactcggcgggggttctgtacgcgatatccttctcggccattatccgctcggttgggtgaagcatccggaatacgtcattattgtggcggttgccgccgtcctcaccaccatcgctgcgccggtgatgccgcacctgcgccgcctgttcctggtgctggatgccctgggcctgatcgtgttctcgattatcggcgcgcaaatcgcgctggatatgggtgaagggccgataatcgcgtctattgccgccgtgatcaccggcgtctttggcggcgtgctgcgcgatatgttctgtaagcgtatcccgctggtgtttcagaaagaactgtacgcgggcatctcttttgccgccgcggtgctctatatcgcgttgcagcactacgtcagcagccatgacgtagtggtcatcgccacgctgctcttcggctttaccgcgcgtatgctcgccctgcgctggaagctcggcctgccggtcttctactacaagcacgacgctcattga

SEQ ID NO: 87556 - DNA, 864 bp, Enterobacter aerogenes
atgatccgcagtatgaccgcctatgcccggcgtgaaatcaagggtgactggggtagcgccgcgtgggaactgcgctcggtaaaccaacgctatctggaaacctacttccgcctgccggagcagttccggagcctggaacccgtggttcgcgagcgcatccgctctcgtctgactcgcggcaaaatcgaatgcaccctgcgttttgaacaggatcccagcgcccagggtgaattgatcctcaatgagaacctggcgaagcagctagtaaacgctgctaactgggtaaaaatgcagagcgatgaaggcgagatcaacccggttgatatcctgcgctggcctggagtgatggcggcgcaagaacaggaccttgatgcgattgccgctgaaatcctcaacgccctgaacggcgcgctggacgactttatcgtcgcccgtgaaaccgaaggtcaggcactgaaaacgctgatcgaacaacgcctggaaggcgtcagcgccgaagtcagcaaagtccgcgcccatatgccggaaatcctgcagtggcagcgcgagcgcctggtcgccaagcttgaagacgccgaagtgcagctggaaaacaaccgtctcgagcaagagctggtgttgatggctcagcgtatcgacgtcgccgaagagctcgatcgcctggaagcgcacgttaaagagacctacaacattctgaagaagaaagaagccgtgggtcgccgcctcgacttcatgatgcaggagttcaaccgcgagtcgaatactctggcgtcaaaatccatcaatgccgacgtgaccaattcagcgatcgagctgaaggtgctgatcgagcagatgcgcgagcagattcagaatatcgagtaa

SEQ ID NO: 87557 - DNA, 717 bp, Enterobacter aerogenes
atgcgtccagcaggccgtagcgctaatcaggtgcgtccagtaaccctgacccgtaactatacaaaacatgctgaaggctccgtgctggtcgaatttggcgacaccaaagtgctgtgcactgcctccatcgacgaaggcgtaccgcgcttcctgaaaggtcagggccagggctggatcaccgccgaatatggcatgctgccgcgctccacccatacccgtaacgctcgcgaagccgctaaaggcaaacagggcggccgcacgatggaaattcagcgtttgattgcccgcgcgctgcgcgccgcggtggatctgaaagcgctgggcgagttcaccattacgctcgattgcgacgtgctgcaggccgatggcggtacccgtaccgcgtccattaccggcgcctgcgttgcgctggccgatgcgctgaacaagctggttgctgccggtaaactcaaaaccaacccaatgaagggaatggtggccgccgtttccgtgggtatcgttaatggcgaagccatttgcgatctggagtacgtggaagattccgccgcggaaaccgatatgaatgtggtaatgaccgaagacggtcgcatcattgaggtgcagggcacggcggaaggcgagccgttcacccatgaagaacttctcactctcctggcgttagcgcgagggggaatcgaatccattattgcgacgcagaaagcggcgttagaaaattaa

SEQ ID NO: 87558 - DNA, 642 bp, Enterobacter aerogenes
atgaagccgtatcagcgccagtttattgagtttgcgcttagcaagcaggttcttaagtttggcgaatttacgctgaaatccgggcgtaagagcccctatttcttcaacgccggcctgtttaataccgggcgcgatctggctctgctgggccgtttctacgccgaggcgctggtggattccgggatcgagttcgacctgctgttcggcccggcctataaaggcatccctatcgccaccaccaccgccgtcgcgctggctgagcatcatgaccgtgacctgccttactgcttcaaccgtaaagaagcgaagacccacggtgaaggcggcaacctggtcggtagcccgctacagggccgcgtgatgctggtggacgacgtgattaccgccggtaccgcaattcgtgaatcaatggaaattattcaggctaatggcgctgagttggccggcgtgctgatctcgcttgaccgccaggaacgcggccgcggcgagatctctgcgattcaggaagtggaacgtgattatggctgcaaagtgatttctatcgtcactctgaaagatcttatcgcctatctggaagaaaagcctgagatggctgagcatttggcatcggtacgcgcttaccgcgaagcctacggcgtctga

SEQ ID NO: 87559 - DNA, 597 bp, Enterobacter aerogenes
atggcagaaaaacaaactgcgaaaaggaatcgtcgcgaagaaatacttcagtctctggcgctgatgcttgaatccagcgatggtagtcaacgtattaccacggcgaaactggcggcctccgtcggtgtttccgaagcggcgttataccgtcattttcccagtaaaacccgcatgtttgacagcctgatcgagttcattgaagacagtctgattacgcgcatcaatttgattttgaaagatgaaaaggacaccacggctcgtctgcgcctgattgttctgctgattcttgggtttggcgagcgtaatcctgggctgacgcgtatcctcaccggccacgccttaatgttcgaacaggaccgtctgcagggtcgtatcaaccagctatttgaacgtatcgaagttcaattgcgtcaggtgatgcgtgaaaagaaaatgcgtgagggagaaggctacaccctcgacgagacgctactggcaagccagctgctggcattttgcgaaggcatgctgtcgcgttttgtgcgtagcgagttcaagtaccgccctacggatgatttcgatgcccgctggccgctggtcgccgcgcaactgcaataa

SEQ ID NO: 87560 - DNA, 459 bp, Enterobacter aerogenes
atgatgaaaaaaatcgacgttaagattctggacccgcgtgttggcaagcaatttccgttgccaacctatgccacctccggctcagccggacttgacctgcgtgcctgtcttgacgacgccgtagagctggcgccgggcgcaaccaccctgctgccgactggccttgcgattcatatcgccgatccgtctctggcggcggtgattctgccgcgttccggcctgggccataaacatggcgtcgtgctgggcaacctggtcggacttatcgactccgactaccagggccagctgatggtgtccgtctggaaccgcggccagcagagctttactatcgagccgggcgagcgcatcgcgcagatggtctttgtgccggtggtacaggcggagtttaatctggtggaagaatttgacgccaccgaccgcggcgaaggcggattcggccactcagggcgcaaataa

SEQ ID NO: 87561 - DNA, 1215 bp, Enterobacter aerogenes
atgatgagtctggctggtaaaaagatcgttctcggcgtgagcggcggcatcgccgcctataaaacgccagaactggtgcgccgactgcgagaacgcggcgccgatgtacgcgtcgccatgaccgaagccgccaaggcctttattaccccgttgagcctgcaggcggtttccggttacccggtctccgatagcctgctggatccggctgccgaagcggcaatgggccatattgaactgggcaagtgggccgatctggttatccttgccccggcaaccgccgatttaatcgcccgcgtcgccgccggtatggcgaacgatctggtctccacgatttgcctggctacgccctctccggtggtcgtcgttccggcgatgaaccaacagatgtatcgcgccgccgccacccaagacaaccttgccactattgccgcccgcggcctgttggtatggggccccgatagcggcagccaggcctgcggcgacgttggcccgggccgcatgctcgatccgctgactatcgtggagatggcggcgcagcatttctcgcctgtcaaagatttgcaacatctcaacatcatgattaccgcgggcccaacccgcgagccgctggacccagtgcgctacatcaccaaccatagctccggcaaaatgggcttcgcgattgccgccgccgccgcacaacgcggtgcgaacgtcacgctggttagcggcccggtgtcgctgccgacgccgccgtttgtgcagcgcatcgatgttggcaccgcgctggaaatggaagcggcggtgcagaatggcgtgcaacagcagcatattttcatcggctgcgccgccgttgccgactaccgcgcagcgattgtcgccgacgagaaaatcaaaaaacaaggtgatgaattaacaataaaaatggtcaaaaacccggacatcgtcgccggggtggccgcactaaaaaatcaccgcccgtacgttgttggatttgccgccgaaacaaataatgtggaagaatacgcccggcaaaaacgtgcccgcaaaaatctcgacctgatttgcgccaatgatgtttctcagccaaatcaaggttttaatagcgataacaacgcattacaccttttctggcaggatggggataagcgcttaccacttgagcgcaaggaattcctgggccaattattactcgacgagatcgttacccgttatgatgaaaaaaatcgacgttaa

SEQ ID NO: 87562 - DNA, 666 bp, Enterobacter aerogenes
atggatatacaggaatcattgatgccgcgggaaaaaatgctgcgcgacggtattgaaacgttgagcgacgttgagctgctggcgttgtttttgcgtaccggtacgcgtacccaggatgtactgacattttcacacagcttgctacagcgcttcggttcgctgtacgggctgttatcggctgagatagaacaatttgcagatatcgacggtatcggcattgcgaaatatgcgcaacttaaaggtattgccgagctggcgcggcgttattttagcctgcggatgagagaggaaccgtcgctggtcacgccgctcatgacgcgagaatttttacaaagccagctcgccgatgaagagcgggagatctttatggcgatctttttagataatcagaaccgggtattgaaacatagccgccttttttctggtactcttagccacgtagaggtgcatccgcgagaaattgtacgcgaagcaatcaaagtgaacgccgccgcggtgatccttgcccataatcatccttcaggtagtcctgaaccgagtaagtcggataagttgatgaccgacagggtggttaagtgttgtagattcatggagatacgcgtgcttgatcatctgattattggccgcggcgcgtacgtctcttttgccgaacgtggctggatttag

SEQ ID NO: 87563 - DNA, 237 bp, Enterobacter aerogenes
atgtcccgagtctgccaagttactggcaagcgtccggtgaccggtaacaaccgttcccacgcactgaacgcgactaaacgccgtttcctgccgaacctgcactctcaccgtttctgggttgagagcgagaagcgttttgtcaccctgcgcgtatctgctaaaggtatgcgtgtaatcgataaaaaaggcatcgatacagttctgtctgaactgcgtgcccgtggcgaaaagtactaa

SEQ ID NO: 87564 - DNA, 168 bp, Enterobacter aerogenes
atggctaaaggtattcgtgagaaaatcaagctggtttcttccgctggtactggtcacttctataccaccacgaagaacaagcgtaccaaaccggaaaaaatggaactgaaaaagtacgatccggttgtacgtcagcacgttatctacaaagaagctaaaatcaaataa

SEQ ID NO: 87565 - DNA, 810 bp, Enterobacter aerogenes
atgcctgaattacctgaagtcgaaaccagccgtcgcggcattgagccgcatctggtgggcgctaacatcctgcatgccgtagtgcgcaacgggcgcctgcgttggccagtatccgaagagatttaccgcctcagcgacgaaccggtgctgagcgtgcgccgacgcgccaaatacctgctgctggagctgcgtcacggctggatcattattcatcttggtatgtctggcagcctgcgcatcctcagtgaggagcagccggctgaaaaacacgaccacgtcgacctggtgctgagcaacggtaaagtactgcgctataccgatcctcgccgctttggcgcctggttatggactaaagagctggatggtcatccggtgctggcgcatctcggcccggagccgctaagcgatgaattcaacgccgactatctccagcagcgttgcgcgaagaagaaaaccgccattaaaccctggctgatggataacaagctggtggtgggcgtgggcaatatctacgccagcgaatcgctgttttccgccgggatccatcccgatcggctggcctcgtcgctctcgcatcaggaatgcgagtggttagtgaagatgattaagctggtgctgctgcgctcgattgagcagggtggaacgacgctgaaggatttcctgcaaagcgacggtaaaccgggatatttcgcccaggaactgcaggtatatggccgcaaaggcgagccgtgccggatctgcggcacgccgattatcgccagcaaacacgctcagcgcgcgaccttttattgccgccagtgtcagaagtag

SEQ ID NO: 87566 - DNA, 480 bp, Enterobacter aerogenes
atgggcacaaaagcgatctatccgggcacctttgaccctatcaccaacggccatatcgatatcgtcacccgcgcggcgggtatgtttgataaggttttgctggccatcgccgccagcccgagcaaaaaaccaatgtttagcctcgatgaacgcattgcgctggcggagcaggcaacggcgcatctggtcaacgttgaggtgattggcttcagcgatttgatggccaatttcgcccgcgcgcagcaggcgaatattttaattcgcggcctgcgggcagtggcggatttcgaatatgaaatgcagctggcgcacatgaaccgccatttgatgcccacgctggaaagcgtgttcctgatgccgtgcaaagagtggtcgtttatctcttcatcgctggttaaggaagtggcgcgccaccagggcgacgtctcccacttcctgccgcctaacgtacatcaggcgctgttaaataagctgaagtag

SEQ ID NO: 87567 - DNA, 771 bp, Enterobacter aerogenes
atgtcgacccgactctccgtcgtgatgatcgtcaaaaacgccgccgacctgctcgccgattgcctggcgtcggtaagctgggcggatgaagtggtggtgctggactccggcagtaccgacaataccgtcgaactggcccgtagcctcggtgcccaggtctatagcaacaccgactggcaaggctacggcattcagcgccagcgcgcgcaagattacgccactcacgactgggtgctgatgattgataccgacgagcgcgttacgcctgagttgaaagagtctatcctcaaggtactggacgcgccgcagcgcggcgttatctatagcatcgcccggcgtaactacttcctcgggcgctttatgcgccacagcggctggtatcccgatcgggtgatgcgcctgtacgaacgcgcgcgttaccgctataacgataatctggtgcatgaatctctggatagcctcggcgccgaagtcgtgccgctcagcggcgatctgctgcacctgacctgtcgcgatttctccggcttccagcagaaacagctcgcctatgccgcggcctgggcgcttgagcgccatcagaagggcaagaagacctcgatggcggggattttcagccatacgctgggcgccttcgtgaaaacgctgctgctgcgcggcggcgtactggatggaaaacagggttggctgctggcggtagtcaatgcgcaatacacgtttaataaatacaccgagctgtgggcactcagccgcggctactcggagaaagtgtaa

SEQ ID NO: 87568 - DNA, 1275 bp, Enterobacter aerogenes
ttggaattgctttataccaccctactctacctcattcagccgctggtgtggctgcgactgctgctgcgcagccgtaaggccccggcataccgtaaacgctgggctgaacgttatggcttctgtcaaaacaaggtagtgccggatggcattctgctgcactccgtctccgtcggtgaaacgctggcggcgatcccgttagtacgcgcgctacgtcatcgctatccttcactgccgatcaccgtcaccaccatgacgccaaccggctcagagcgcgcgatgtctgccttcggtaaagatgttcatcacgtctatctgccgtatgacctaccctgcgccatgaaccgtttcctcaacagcgtacagccgaaactggtcatcgtgatggaaaccgagctgtggccgaacatggtcgccgcgctgcacaaacgtaaaatcccgctggttatcgctaacgcacgcctatcagagcgttccgcgaaaggctatgccaaactcggcggcttcatgcgccgcctgttaagccgtattacgcttatcgccgcgcaaaatgaagaggacggcaaccgcttcctcgcgctcggccttaaacgtaaccaactggcggtgaccggcagcctgaaattcgatatttccgtcaccccggaactggcggcccgcgccgttaccctgcgtcgccaatgggcgccgcaccgtaaagtgtggatagccaccagcactcacgacggcgaagaacaaatcatcctgcaggcacataaaaaactgctggaaaccttccccgacctgctgctgatcctcgtgccgcgccatccggaacgcttcggcgacgcccgcgacatggtgcaaaaagccgggatgagcttcacgatgcgcagcaccggtgaaattccgtctaacagcactcaggtggtgattggcgataccatgggcgaattgatgctgctctacggcattgccgacctggcgttcgtcggcggcagcctggttgaacgcggtggacacaacccgctcgaacccgccgcccacgctattccggtgctaatgggtccgcacaccttcaactttaaagatatctgcgccaagctgcagcaggacgatggcctgatcaccgtcacggacgccgactcgctggtcagagaggtttctaccctgctgacggacgaagattatcgactgtggtacggtcgccacgcggtggaagtactgcatcaaaaccagggcgcgctgtcgcgtctgctacagttattgcaaccctacctgccgcagcggagccactaa

SEQ ID NO: 87569 - DNA, 990 bp, Enterobacter aerogenes
atgagtcaaacgcctttattgagcatcgtggccgccgtgtataacggtgaaaaattccttgcgcaattctttgaatgcctcgaacagcaacagttggcaagctatgagctgatcctggtgaacgatggttctaccgacggtagcctggcagttatcgaccaatggaaagacaggctgcagaacgtcaccgtgctggagcaggagaatcagggcgtctcggtggcgcgtaatacaggtatggcggcggcaagcggtaaatacctcgccttcccggatattgacgataagttctatcccggcatgtaccgcacgctgctggaaatggcggaaaagggcaatcttgatgtcgcgacctgcaatggccgctatgtgtacgaaagccgcgacgacattcatccgattttcccgccagaacgcctgcagtccactggcgtcctgccgggttacgtctggctgaagcaggcgctcgactcgcgtaagttcctgcacgtcacctggttgaacatctatcgccgcgattttattaaccagcaccatttccactttgagccgggcctgcgccatcaggatattccctggacgacggaagcgttactggccgccgagcgtgtgcagtacaccagcgagcaattttacgactattacattcactcggaatcggtgtcgcataagccagacaacgacgatacgctgatgcgctcagcgcgccattatatgaagatcctcgagatgctcagcgccatcaaccagcgctatccagacaaggtacggcacattcccgcctgccgctggcagatagccaaagaagggttggggattatccataccttcgactgcatgaaagatgagtcgaaaaagcatattatcattaaagaattcttcgaacgcggcatctggcgcctgatctggactaacgcctgcacgttccgtttacgctggcgtctgggacgccgctatttgcgcataaagcgctatctcaacgccgcatag

SEQ ID NO: 87570 - DNA, 1095 bp, Enterobacter aerogenes
atgcgcatattgtttgttatcgacggcctgccgggcggcggcgcggaaaaagtcgtgctcacgctggcggaacactttcttagccagggcgaacaggtatcgctattttcgctgcgcgacgtctgcgattatccgctgccggaagggctcgattatcaggttatcgccgaccgctgccgcaaaccgtggcgtaagctgacggaactctcccgccgcgcgcgtcagcttgatcgcgcgattaaacaagcagaacagcatggacgcttcgatctggtactgtcgaatctgcacaaaaccgatcgcattgtcgcccgcagccgggcattacagaatcgcaacgtttggttctgcctgcacggcgttttctcaacctcttatcttggtcatcgcagcggttttgaccgctggatgaagcagcagaaaatcaagcgggtataccagggacgcaacgtggtgaccgtttccgatgcggttggaaaggatttggtcgagcagttcgcgctgcgcccggcacagcttaaaaccatctataacccgttcgatatcgccgccattcgcgcggcggctgaggcgccggccgatattccccaaggggactatattatccacgttggccgcttccatcccggtaagcgccatgaccgactgattgaagcctacgcgcaaagcggcatcgacgcgccgctggtgctgctgggacagggaaaaccggaacaggaacagcggcttcgtcaactagcgcagcagttgcaggtcggcgatcgggtgctgtttaaaggctttcagcccaacccgctaccatggattaaacatgcgagaatgctaacgctcagctccgacagcgaagggtttggcaacgttattgttgaagcgctactgctgaatacgccggtcgccagcacccgctgccctggcggggtaagcgagatccttcgcggcgaattgtcccgcggtcttgccgacctcaacagttctgcgctagcccagacgatgcaaagcatttaccatagcccgccggccattgattccgccgcgctggaaaaattcagcgtagagtcgatttgccaacagtactgtcagttgcgcaacgcctga

SEQ ID NO: 87571 - DNA, 1128 bp, Enterobacter aerogenes
atgagtaaattcaggctggctctggtgcggcagaagtatcgccccgacggcggcgcggagcgctttgtctcccgcgcgctggaagccctcgacagcactaatctggaactaaacgtcatcacccgcgagtggcaagggccggttaaaccggactggcatattcacatctgtaacccgcgcaaatgggggcgcatcagccgtgaacgcggtttcgccaacgccgcgcgcgcgctctggcagagtgaatcattcgatctggtgcaaagccatgagcgtattccgggttgcgatctgtaccgcgccggcgacggcgttcatcgccgctggctgcaacagcgctcgcgcattttaccggcctggaaaagccgcctgctgtttgccgaccgctaccaccgttatgtgatgcaggcggagcgcgagatgtatcaggacgcgcatctgcgcggggtgatttgcaacgcagagatgatcaagcaggaaattatcgaagacttcggcctgccggcggataaaatccacgtcatctataacgctattgataaccagcggtttctgccgcctggcgaagaaacctttgccgcattacgcgctaaatggcagctaccgctgaaagctagctgcctgatttatgtcggttccggctttgaacgcaaagggctggatgcggcaatccgcgccatcgcccccaccgaccgttatctgttggtggtcggcaaagacaaagaacagaaccgctatcaacagctggcaaaatcgctgaactgcgaagaacgcgtgcgcttctgcggcatgcagtctgaaacgctaccgttctatcagatggccgacggactgctgctgccgacgctgtatgatccattcccgaatgtaattctggaagcgatggcctgcggcctgccggttatcaccaccaccggctgcggcggcgcggagttcatcaccgaaggtgataacggctacgtttgcgacgcgctggatattaccgcgttacagcaggcggtgatggcgctgccaacgcgcgcgctgggctccgctgaaggcgcacgcgcccgcgaacgaattatggattgcaccagcgcgcgactgtcgacgcagctgctttctctctatcaggatctggtgaaataa

SEQ ID NO: 87572 - DNA, 1077 bp, Enterobacter aerogenes
atgacgcctgaaaccctctcctccggccagcagaacccggcgcggatcctggtcattaagctgcgccaccatggcgacatgttgctgatcaccccgcttgtaaacgcgctcaaacagcagtatcccgccgctcgcgtcgatgtactactgtatgctgagacccgcgacatgctggcggcaaatccggagattaaccagatttacgcgatcgatcgcaattggaaaaagcagggcaagcggcatcagctcaagatggaatggcagctcattcgctcgctacgccaacagcgctacgacatggtgctcaaccttgccgaccagtggcccagcgcgattatcagcaaattaaccggtgcgccgacgcgcatcggtttcgatttccctaagcgccgtcatccgttctggcgctactgccacaccgcgcttgcttctacccagcagcacaatcagctgcatacggtacagcaaaatctctctattctggcgccgctgggactggagattaatgatgcgccggcgcggatgggctacagcgaatctgactggacgaccagccgcgcgctgctgccggacggcttccaggaaaactacatcgtgattcagccgacctcgcgctggttctttaaatgctggcgcgaagcgcgcatgagcgcgctgattaacgcgctatcagcagaaggctacgcggtggtgctcacctctggccctgacgccaaagaaaagcagatggtagagaacatcatcagcggctgcccgcaggcgcgactgcactcgttagccggtcagttgacgctccgccagctggcggcggttatcgatcacgcccgcctgtttatcggcgtagattcggtgccgatgcatatggcggcagccctgggtacgccgctcgtcgcgctatttggcccgtcaaagctgaccttctggcggccgtggcaggcgaaaggcgaggttatctgggccggcgacttcggcccgctgcccgatcctgacgacatcaacaccaacaccgaagaacgctatcttgatttaatccctaccgacgcggtcatcgcggcggcgaaaaaggtactggcatga

SEQ ID NO: 87573 - DNA, 963 bp, Enterobacter aerogenes
gtgcacaatcccgcatttctcatcacgattgatacagagggtgataacctctggcaaaaacatgacagcatcaccacggagaatgcgcgctatcttccgcgttttcagcagctttgcgaaaagtatggcttcaaaccggtctatttgaccaattatgaaatggccatcgaccctttttatatcgagtttgctaaagatgtcattgcgcgcggcaccgcggaaatcggtatgcatctgcacgcctggaacagcccgccgaccgagccgctgaccgcggatgactggcgtcataagccttatctcatcgagtatagcgatgccgccatgcgtgagaaggtcgactatatgacccatctactggaagataccttccagaccaaaatggtgagccatcgcgccgggcgatgggcgtttgacgagcgctacgcgcggctgctggtggagtacggttatcaggtggattgctcggtgacgccgcgggtgaactggaagaccgctaagggcgcgccgcagggcgatggcggtacggactaccgacgcttcccgcaacatgcttattttctcgatgaaaatgatatcagtcgcgaagggcattccccgttgctggaagtgccgatgagcattcagtataagcactcggcgtggatgaatagcgtgaagcagggctacgatcgtttgcgcggtaaagttcgttcgccatccgtgcactggctgcgtccaatgggcggcaacgtcgagacgatgaagaaagtcgtagaacaaacattgactcagggtaatgactacgtggaatatatgctgcactcgtcggagtatatgcccggcggcagtccaacctttaagaatgagcaggatatcgagcgtttatatgccgatctggaagcgttctttagttggctggccccgcaggtacgaggaatgtcgttggcagaatattaccagcgtaaaatcactcagcgataa

SEQ ID NO: 87574 - DNA, 1077 bp, Enterobacter aerogenes
atgcgtatccttaaacaattaacgcggaagaaaaatgcttttttccgcgatattaaatttaatttaattaaccatcgttacagaaataaacccgagcgcgcaccattcgatccatctttgattcgtcatgttttattattacgccttgacgataaggttggcgatatggtggtaaccaccgggtgcgccaggctacttgccgatagaggatttaaagtttcggtattgaccggaccaacatgccaaaaaatattagcaggcttagagtttcttcagaaagtatatttatatcaaccacggatgtcgttaacacagttaaaagcggcaggttttgacgctgtcgttgattttgatgatgtgaaaagctacgagcgatttaaattactttctgaattgcgtttgccctgcgtgattggttttaacaaagagcaatacaaactctacgatcactccattaactttttagatgctaatagtcatatttcgcagcgttataagcaggtagtgaaactctttggcgggccagatgagcattaccgctattatttgcctggctgtttgaaagaaagagaaaaggttagcgaactgctggccaaagctggagagacgcaactgtgtgtcgcgataaatccatttacagcctcaacagataaggatttttgtcgccatcaggtagaagcgctcgttgaacgcctgcataaccttccttatcgcgtaagtattgtgatggtaggacgcagcgaaaaaatacgtcagcttgaactggatatggttctttatcttactgatagcaatattaattcggcggttgaagtagtacgccactgcgatcttgtgatcactcctgatacctcgattgtgcatatcgcgcgagcatttgataagccaatggtggcggtgtacaacaagcgcaagcttaaggataccggattgccaggctatcttatctgggcgccagggtatgaaaaagcgcggcaaattgtctgtgaagaaaaaaatgtcgcagatatgaaaatagaagcgctctggccggatatcaaagcgctggccgatcgactcgtcgccgcgcggaaatag

SEQ ID NO: 87575 - DNA, 1170 bp, Enterobacter aerogenes
atgagtacttcaaaaataagtaatcttgcaaagcagggttactcggttgttttccctttatttctattttttagcgctattttttgcatgtccacccgcacgaataacctgctgcatttgtctattttattactgctgttgtcactgctgcgccaggataaccggcaggcgctggctgaagttttgcgtgaacagtggcaaacatggggggggttggtagcgttcttcgtctacttctccctcagcaatatctgggggcatacgccgcagcatatcgactcaccgctaacacacggcgtttatctgattttttaccttctgctgatgtcgacgctcctgggtagctcgcaaacccgacggcttacgttgctgtctattgttgccggcgtcaccgtactttcaatctggaccctggctattgatcatactctggtattgaccgagcgggctgtatcgccagaaaacccagggccgactaacgtgatagatttggcaggctactgcggtatcggtcttttgatcagcggtatgttattgaaagaaaaatcgaaccactggttatatattccaattatcatcatgttggtgatgatgttgttaacccaaagtcgtgggccattgatctcactggcaatcgctatttgttgcactctgcatctacatctcttcacgcggcgtaatttgcttattattggcgcactgcttgtactgatcggattagtactttgcctgacgccagtgggcgacatgctgcttacccgttttgaagagttgggaacgcaaagcgggctacgcctgagcatctggcatcatacgttgatggaaatcgctgaccaaccgtggctgggacgtggtttcggctatgaactgaatttcatcaactacagcggtgagcacatcaccaccacgcatagcgtttatctcggttcactgctgaagggcgggattattggtttactgctgttgctggcagtgatcgtctgcggtttacatcaagcctggcgtaagcgccatgacgacagtcgctatagtctggccatcatgctgtatgcgctgatatttatggcttcccaggggatgtttattgtcagtaatccacgtgagacatgggtacttttctggctaccgctagggattgcgctcagtaagagtgtgctgaagaaacgctag

SEQ ID NO: 87576 - DNA, 909 bp, Enterobacter aerogenes
atgggatcgctgtttaagcaaatttatcgctatacccgcccgcgcgcctatcgccacaatgagaacctgtggccgtgggtaaaaatccgccgggcggaaagtggtgaaatttgtactttacagtacaaaggcaaaacggtaccgctggtcgatttaacctcgctgcgcaatagcatgcagggggaagtgctgctgacagcaaccggcccttcaacgcgcaacattgatttctccctgctgccaaaacacattccagtgatgggcgttaacggcgcatggcatctgtcggacaaagtcacattctcgctctataccattgtcgatatggagtttttcgataagaagcccgagattattcgccatatcgtccgccaaagcggcattattttgttcaccaccatgcacggcatcgccaaaattctcgatcgccacgctgatgagttgcattgccgtttagcccttatcgaggatggctgttataagatttaccagcccaaaatcgcgagtcatgcgattcaacaagcgtatcaacatgtcgataccctacgcttcgatccccaacggcccgaggtgtgttttagtaccgatattcgacagggaatttttgatgccggcaccgtcgtctactgggctttgcaaatactggcctggctgggtttcaaaacgattctgataagtggtctggatatgaccaatttcagccagccgcgcttctatgaaacgcaacaaaaccaattaccttcttatctggcaacaaaagtagaaaatcttgttatgccgtcttttgcacttgcggctaacgtactgcaacaagagcagatccaggtcattaatttttcgccagaaagcgctattccagaaactatcttcgaaaaggtttcgtttaatgagtacttcaaaaataagtaa

SEQ ID NO: 87577 - DNA, 972 bp, Enterobacter aerogenes
atgcgggtattgatcgttaaaacctcctccatgggcgacgtgctgcacacgctgcccgcgctaaccgacgccgcgcaggccattcccggcatccgctttgattgggtggttgaagagggtttcgcacagatcccttcatggcatgagtccgtcgagcgggtgattccggtggcgattcgccgctggcgcaaagcctggttttccgcgcctatcaaagcggaaagaaaagcctttcgcgaggccgtaaaggccgtcaactacgatgctattatcgatgcccaggggctggtgaaaagcgccgcgctggtgacgcgtctggcgcacggcattaaacatggcatggactggcagtccgcccgcgagccgctggcaagcctgttttataaccgtcgccaccatattgctgtccagcagcacgcggtagagcgtacgcgcgaactgttcgccaaaagcctgggctatgcccggccacaaacacaaggtgattacgccatcgcgcgccactttattcgccccgactcgccggtagcagagccgtatctggtctttctacacgccaccacccgcgatgataaacactggccggaagcgcgctggcaagagcttctcgatctgctggcaggtagcgccatacggatcaaactgccgtggggcgcgccgcatgaagagacccgggcaaaacggctggcggaagggcgcgataacgtcgacgtattgccgcgcatgagtcttgagcaggtcgcccagattctggctggcgcacgcggcgtggtttccgtcgacaccggccttagccatctgaccgcggcgctcgataaacccaatttcacgctctatggcccaaccgatccgggactgattggcggatatggtaaaaatcagcatatcgtccggccgccaaacggcaacagcaccagcgatattaccgctgagcatgttcagcaattgttgcaagcacagggactcgtgtaa

SEQ ID NO: 87578 - DNA, 1020 bp, Enterobacter aerogenes
atgatgatgtcgcaaagtctttatcgtacgctcagggcgcgctatccccaggcgattatcgacgtgatggcgccggcatggtgccgtccgttgttatcgcgcatgccggaagtcaatgaagcgattgccatgccgctgggccacggcgcgctggctatcggcgaacgccgtaaactcggccacagcctgcgcgatcgtcgttacgatcgcgcttatgtgctaccgaactcgtttaaatcggccttggtgcctttctttgccaacatcccgctgcgcaccggctggcgcggcgaaatgcgctacggcctgctcaacgacgcccgcgtgctggataaagacgcctggccgctgatggtggagcgctacgtggcgctggcctacgataacggcgtcatgcgctgcgctaaagaccttccacagccgctgctgtggccgcagctgcaggtcaacgacggcgaaaagtcacaggcctgcaacgcttttaatctctcaaacgatcggccaattatcggcttctgccccggcgcagaattcggcccagcaaaacgctggccgcattatcactacgccgcgctggcgaaaaagctcattgacgatggttatcagatagcgctcttcggctcagcaaaagataacgatgccggcaaagagatcatcgccgcgctcagcagcgagcagcaggcctggtgccgtaatctggccggcgaaacgcagctggaacaggccgtgattctgattgccgcctgtcaggccgtggtcagcaacgattcggggctgatgcacgttgccgccgccctggaccgtccgctggtggcgctgtacggcccgagcagcccggactttaccccgccgctgtcgcataaagcgcgcgttattcgcctgattagcggctaccacaaagtgcgcaaaggggatgccgctgagggctatcatcaaagccttatcgacatcactccagagcgcgtcctgcaggagctgaacgaactgttagcggaaaaaaccgagcacgaggaagcgtaa

SEQ ID NO: 87579 - DNA, 933 bp, Enterobacter aerogenes
atgatcatcgtaaccggcggcgcaggctttatcggcagcaacatcgttaaagccctgaatgacaaaggcatcaccgatattctggttgtagacaatctgaaagacggcaccaaattcgtaaacctggtggatctggacatcgctgactacatggataaagaagattttctgatccagattatggctggcgaagagttcggcgaggtcgaagcggtattccacgaaggcgcctgctcttccaccaccgagtgggacggcaagtatgtgatggataacaactatcagtactccaaagaggtgctgcactactgcctggagcgtgaaatcccgttcctgtacgcctcttccgccgctacctacggcgggcgcaccagcgactttatcgaatcccgcgaattcgaaaaaccgctgaacgtctacggctactcaaaattcctgttcgacgaatacgtccgtcagatcctgccggaagcagattcgcagatcgtcggcttccgttatttcaacgtctacgggccgcgcgaaggccacaaaggcagcatggcgagcgtggccttccacctcaatacccagctgaataatggcgaaaatccgaaactgttcgaaggcagcgatggattcaaacgcgacttcgtctatgtcggcgacgtcgccgcggtgaacctgtggttctgggaaaatggcgtttccggtatcttcaaccttggtactggccgcgcggaatccttccaggcggtcgccgatgcgaccctggctttccataaaaaaggcagcattgagtacatcccgttcccggacaaactgaaaggccgctaccaggcattcacccaggccgatctgactaacctgcgtaaagcgggctatgacaaaccgttcaaaaccgttgccgaaggcgtaacggaatatatggcctggctcaaccgcgacgcgtaa

SEQ ID NO: 87580 - DNA, 1194 bp, Enterobacter aerogenes
atgcgtggtgatttctataaacagttaaccaatgacctggataccgcgcgcgcggaagggttgtttaaagaagagcgtatcattacttcggctcagcaggcggacatcaccgtcggcgacagccacgtcattaacttctgcgccaacaactatctgggcctggcgaaccacccggaactgatcgccgcggcgaaatccggcatggacagccacggcttcgggatggcctcggtgcgcttcatctgcggtacccaggacacgcataagcagcttgagaaaaaactggcggatttcctcggtatggaagacgcgattctctactcctcttgctttgatgccaacgtcggcctgtttgaaacgctgctggggccggaagacgccattatctctgatgcgctgaaccatgcgtcgatcatcgacggcgtgcgcctgtgtaaagcgaagcgtttccgctatgccaacaacgatatgcaggagctggaagcgcgtctgaaagaagcgcgcgaagctggcgctcgccacgtgctgatcgccaccgatggcgttttctccatggatggggtgatcgccaacctgaaaggcgtctgtgacctggcggataaatatgatgcgctggtgatggtcgatgattctcacgccgtgggctttgtcggcgaaaatggccgcggttcccatgaatattgcgacgtgatgggccgcgtcgacatcatcaccggtacgttgggtaaagcgctgggcggcgcgtcaggcggttacaccgccgcgcgcaaagaagtcgttgagtggctgcgccagcgttcccgtccttatctgttctccaactccctggcgccggccatcgtcgccgcttccatcaaggtgctggagatggtggaagcgggcagcgaactgcgcgatcgcctgtgggctaacgcgcgcctgttccgcgaaaaaatgaccgccgcaggctttaccctcgcaggcgccgaccacgcgatcatcccggtgatgcttggtgaagccaccatcgcgcaggaattcgcgcgcgaactgcagaaagaaggtatttacgtcaccggtttcttctatccggtggttccaaaaggccaggcgcgtattcgcacccagatgtcggcggcgcatacccctgaacaaattgaacgtgcggtggaagcctttacccgcatcggcaaacaactgggcgtcatcgcctaa

SEQ ID NO: 87581 - DNA, 1026 bp, Enterobacter aerogenes
atgaaagcgttatccaaactgaaagcggaagaaggcatctggatgaccgacgtaccggaaccggaagtcggccataacgatctgctgattaaaatccgtaagaccgcgatttgcggtaccgacgtgcacatctataactgggacgaatggtcgcagaaaaccattccggttccgatggtggtggggcatgagtacgttggcgaagtcgtgggtatcggtcaggaagttcgcggctttaagcttggcgatcgcgtttccggcgaagggcatatcacctgcggacattgccgcaactgccgtggcggtcgtacccatctgtgccgtaataccatcggcgtgggggtaaaccgcccgggctgtttcgctgaatatctggtgatcccggccttcaacgctttcaaaatcccggataatatctccgacgacttggcatccatcttcgacccgttcggcaacgctgtgcataccgcgctttccttcgacctggtcggtgaagatgttctggtttccggcgctggcccgatcggcgtgatggccgcggcggtggcgaaacatgtcggcgcgcgtaacgtggtgattaccgatgttaacgaatatcgtctggagctggcgcgtaaaatgggcgtcacccgcgcggttaacgtcgctaaagagaatcttaacgacgtgatggccgagctggggatgaccgaaggcttcgacgtggggctggagatgtccggcgcgccgccggcgtttcgtaccatgctcgataccatgaaccacggcggacgtattgcgatgctgggtattcctccgtcggatatgtctatcgactggaccaaggtcatcttcaaagggctgtttatcaaagggatttacggccgcgaaatgtttgaaacctggtataagatggcggcgctgatccagtctggcctcgatctttcgccgattatcacccaccgtttcggtattgatgacttccagaaaggctttgacgcgatgcgctccggccagtctggcaaagtgatactgagctgggattaa

SEQ ID NO: 87582 - DNA, 729 bp, Enterobacter aerogenes
atggcacaccctatttttatcagccgtctttggcaattgaagaatattatcttgccggtactactgctaatggtaagttttggcattcaggctgagcgcaggcttgagcatggcgtactgcaagcctactggaaggcgcaatggagcgataacgcgaccattaatgttcctgccctcggatttcgctattattggctggatgaccaggggaaattaaaaaaagtcatcaatatatatgttaaggcaacgctgaaagaacagttgctgtttattcggcagaactttagtgatatcccggaaaattttatcaaatttcgcgagtggtacgttaaccagcagggtagtctgctggttaataatatcgcgcagtatatcgaatgcagcagtgagaattatagcgccgtattgctttcttttgttcctgtgcaaaataaacctgcatcaaatatagacgatatgaatgctcaggtcccctgcggcggggacgggcgctatccctggttaacgacatatcatttacagcatgaatggaatcagctttcattcaaagaatggccagatgataatgcgaataatacatattccgttatggctgatgacgtggtggtgaaaatacgcactattaacaaatactggatctatgccgctctttacgatgacagcaaagcggaccgtatgagtgacaaacgggggtacataaggagagggcatctcaaaccagataactga

SEQ ID NO: 87583 - DNA, 792 bp, Enterobacter aerogenes
atgtttaaactctcagtatgcttgctgacctgtaattcggcccgcttattacgggaagtcttgccgcctttgttacgggtggcagatgagtttattgtcgttgattccggcagtacggatgaaacgctacagatatgtcagcagtttggtttaacggttcaccatcacccctatgccgcccacggcatgcagatgaactatgcgacctcgttggcgacccatgactgggtactatgtatggatagcgatgaaattctggatgaagaagtggctgcggcgattctggcgcttaaggcgggagaggagccggatccgagctgcgcgtggcgtctgccgcgctactggttcgtgcttggcgagcaggtgcggaccatttatcccatctcatcgccggattacccggtacgcctgttcaaccgtcagcgggccagttttaaccagcggccggtagacgatcaggtggtcggccatctgacctcgaccaggctgccgggctttgtccgccacgataccttctattcactgcatgaagtgtttaacaagctcaacagctataccacccggctggtgaaggcgcaaaaggtcaggccgtcgctcagtcgcgggattatcagcgccatcggcgcgttttttaagtggtatctgttcagcggcgcgtggcgtagcggtaaggtgggggctgtcaccggactgtatgccaccttgtacagcttcatgaagtattttaaagcctggtatgctcacgacgggaagcggcagggaaccgtgacggagaagcgcacggatccctga

SEQ ID NO: 87584 - DNA, 900 bp, Enterobacter aerogenes
atggctgcgccggttttcgccggtaaactctccatcgttatcgatgatttcggctaccgtccgcagacggaaaataaggtgctggcgctaccgcccaccatctccgtcgccgtactgccgaatgccccccacgcccgggaaatggccactaaagcgcataatctgggccatgaagtgctgatccatctgccgatggcgccgctcagcaagcaaccgctggaaaaagacacgctgcgcccggatatgagcagcgatgagatcgaacgtattatccgtgaggcttacgggaaagtgccttacgccgtcggcctgaataaccacatgggtagcgccatgacctcaaacctgttcggcatgcaaaaggtgatgcaggcgctggaacgctacaatctctattttctcgatagcgtgaccatcggcaacacccaggccatgcgcgccgcccagggtactggcgtgaaggtgattaaacgcaaagtgtttctcgacgacacccagaacgaggcggatatccgcacccagttcaatcgcgccatcgcgctggcgcggcgtaatggttcggcaatcgccattggtcacccgcatccgtcaacggtgcgggtactacagcaaatggtctataacctgccgccggatatcacgctggtgcgcccgagcaatctgctgaacgaaccgcaggtcgacaactcgacgccaaacacgcccgtccaaccaaacgcgccgcagcagcagaagccgcgtaacccgttccatggcgtgaagtactgcaaaccgaaacgtccgctggagccggtgaacgccagccgcttctttaacattctcagtgaaagcatcagccagagcgcgctggtccagtattaccagcttaaatggcagggctgggatagccccaccaactaa

SEQ ID NO: 87585 - DNA, 1272 bp, Enterobacter aerogenes
atgaggggaaaggcgacttattcaaatacatggatcgcaacggctgttcgatccgttctttacgccagcgcgcttagcgctggcgtattgctgtgcgccgcatccgctcacgccgatgaccgcgaccagctgaaatccattcaggccgatatcgccgccaaacagcgcgcgattaagcaacagcagcaacaacgcgcctccctgctcgcccagttaaaagcgcaggaagaggccatttccgccgccgcgcgtaaactgcgtgaaactcaggataccctcaaccagctcaataagcagattgacgacatgaacgcgtctatcgctaagctggagcgccagcgcgcctcccaggaacggaatctcgccgcgcagcttgacgccgcgttccgccaggggccgcataccggcatgcagatgatcctcagcggtgaagaggggcagcgtaaccagcgcctgcaggcctattttggttactttaaccaggcccgtcaggagaccatcgcccagctcaagcagacgcgcgaagaagtcgcggtgcaaaaatcgatgctggaagaaaaacaaagccagcagcaaacgctggtttacgagcaaaaagcgcagcaggccaagcttgagcaggcgcgcaacgagcgtaaaaagacgctctccagcctcgaatcctccattcagaaaggccaacagcagctcagcgaactgcgcgctaacgaatcgcgcctgcgcggccgcatcgcccaggcggaagcggcagccaaagcccgcgccgaccgcgaggctcgcgatgcccaggcggtacgcgaccgtcagcaggaggcctcgcgcaaaggcaccacctataaaccaaccgaaagcgaacgttcgctgatgtcgcgaaccggcggcctcggcgcgccgcgcgggcaggccttctggccggtacgcggaacaattcttcatcgttatggcgaacagctgcaaggtgaactacgttggaaagggatggttatcgctgcgtctgaaggcaccgaagtcaaagccattgccgatggtcgggtgatcctcgccgactggctacagggctacggcctggtggtggtcgttgaacacggcaaaggcgacatgagtctttacggctataaccaaagcgcgctggtcagcgtcggtacccaggtccgcgcgggccaggctatcgcgctggtaggcagtagcggcggtcagggtcgtccgtcgctctatttcgaaattcgccgccagggtcaggcggtcaatccacagccgtggttgggaagataa

SEQ ID NO: 87586 - DNA, 1545 bp, Enterobacter aerogenes
atgtcggttactaaaaaacctatggtactggtgattctggatggctacggctaccgtgaagaccagcaggataacgccatttatagcgcgaaaacgccggtaatggacgcactgtgggcaaaacgcccgcacaccctgattgatgcatccggtctggaagtcggcctgcctgaccgccagatgggtaactccgaagtgggccacgttaacctcggcgcgggccgtatcgtgtatcaggatctgacccgtctggacgttgaaatcaaagaacgcaccttctttgccaacccggtgctgaccggcgcggtcgacaaagccgtcgccgccggtaaagcggtacacatcatgggcctgatgtcgcctggcggcgttcacagccacgaagaccacatcatggcgatggtagaactggccgcggaacgcggcgcagagaaaatctatctgcacgctttcctcgatggccgcgacacgccgccgcgcagcgctgaagccacgctggctaaattcgaagctaaattcaccgcgctgggcaaaggccgtatcgcctctatcattggccgctactacgccatggaccgcgacaaccgctgggatcgcgtagagcaagcctatgacctgatgacactggccaaaggcgaattccaggccgacaccgccgtggcgggcctgcaggcagcctacgcgcgtgacgaaaacgacgagttcgtcaaagcgaccgttatccgcgccgccggccaggccgatgccgcaatggaagacggcgacgcgctgatcttcatgaacttccgcgctgaccgcgcgcgcgaaatcacccgcgccttcgttaacgccgacttcgacggcttcgcgcgtaagaaagtggttaacctcgatttcgtgatgctgaccgaatacgccgccgacatcaaagtcgcttgcgcttatccaccagcttcactggtgaacactttcggcgagtggatggcgaagcacgacaaaacccagctgcgcatctccgaaaccgagaaatatgcgcacgtgaccttcttctttaacggcggggtagaaaatccgttcaaaggcgaagaccgtattctgattaactcgccgaaggtcgccacttacgacctgcagccggaaatgagctccgccgagctgaccgagaaactggttgcggccatcaaaggcggtcagtatgacaccatcatctgcaactacccgaacggcgatatggtaggccataccggggtgatggaagccgccgtgaaagcggttgaagcgctggatcactgcattgagcaagtggccgcggccgttgaatccgtcggcggccagctgctgatcaccgccgaccacggcaacgccgaacagatgcgcgatccggcgaccggacaggcgcacaccgcgcatactaacctgccggttccgctgatctacgttggcgacaaaacggtgaaagtggccgaaggcggcaagctttccgacatcgcgccaaccatgctgtcgctgatgggaatggaaatcccgcaagagatgactggcaagccgctgttcatcgtggaataa

SEQ ID NO: 87587 - DNA, 432 bp, Enterobacter aerogenes
atgcaagaaattatgcaattcatcggccgtcacccggtcctgagcatcgcgtggatcgcgctgctgggtgcggtactgttcaccacctttaaaggcttgatgtcaaaagttaaagtcattactcgtggtgaagcgacgcgtcttatcaacaaagaagaagccgttgttgtcgacctgcgtcagcgtgacgacttccgtaaaggccatatcgccggcgctatcaatctgctgcctgccgatatcaaagcaaataacgtcggcgagttggaaaaacacaaagcacaacccattattgttgtggatgggtccggcatgcaggcgcaagaacctgccagcctgctgaataaagccggattcgaaaaagtctttgtactgaaagaaggcatcgcaggctggagcggcgagaaccttccgctggtacgcggcaaataa

SEQ ID NO: 87588 - DNA, 252 bp, Enterobacter aerogenes
atggccaatattgagatctataccaaagcgacctgcccgttttgcatccgcgctaaagcgctgctgaacagcaagggcgtgacgttcaacgaactgcctatcgatggcgatgccgcaaagcgtgaagagatgatccagcgcagcggccggacgacggttccgcagatttttattgatgcgcagcacattggcggctgtgacgacttgtatgcgcttgattcacgtggtggacttgatcccctcttgcgctaa

SEQ ID NO: 87589 - DNA, 468 bp, Enterobacter aerogenes
atgtcagaacaaaacagcaccgaaatgactttccagattcagcgcatctacaccaaagacgtttccttcgaagcgccaaatgcgccgcaagttttccagaaagattggcagccggaagttaaacttgatctggataccgcttccagccaactggctgaaggcgtttatgaagtggtgctgcgtgtcaccgtaacggcatcgctgggcgaagaaaccgcattcctgtgcgaagtacagcagggcggtatcttctccatcgacggcatcgatggcaaccagatggcgcactgcctcggcgcgtactgcccgaacattctgttcccgtacgctcgcgagaccgttaccagcctggtttcccgcggcaccttcccgcaactgaaccttgcgccggtgaactttgacgcgctgtttatgaactatctgcaacagcaggctggcgaaggtgctgaacaacatcaggatgcctga

SEQ ID NO: 87590 - DNA, 1020 bp, Enterobacter aerogenes
atgaacgcgcttaatgctgcaatgacggtgatcggtgccggctcttacggcaccgctcttgccatcaccctggcaagaaatggccacgaggttgtcctctggggtcatgacccgaaacatatcgcgacgctgcaacacgatcgctgcaacgccgcgttccttcccgatgtgcccttcccggacacgctgcgccttgagagcgatttagcgacggcgctggccgccagccgcgatatcctcgtggtggtgccgagccacgtcttcggccaggttctgcgccagattaaaccgctgatgcgttccgatgcgcgtctggtgtgggcgacgaaaggtctggaggccgaaaccggccgtctgctgcaggacgtggcgcgtgaagcgctgggcgatgacatcccattagcggtcatctccggtccgactttcgccaaagagctggccgccggcctgccgacggcgatttctctggcggcgacggatccgcagtttgcggaagaccttcagcgcctgctgcactgcggtaaaagcttccgcgtctacatcaacccggattttatcggcgtgcagttgggcggcgcggtgaaaaacgttatcgccatcggcgccgggatgtctgacggcatcggctttggcgcgaatgcacgtacggcgttgatcacccgtgggctggtggaaatgtcccgtctcggcgcggcgctaggcgccgatccggaaaccttcatgggcatggccgggttgggcgacctggtactgacttgtaccgataaccaatcgcgaaaccgccgttttggcatgatgctcggacagggcatggacgtgcaaagcgcgcaggacaagattggccaggtggttgaaggctatcgcaataccaaagaggttcgcgttctggcgcagcgtttaggcgtcgaaatgccaataaccgaggaaatttatcaggtattgtattgcggaaaaattgcgcgcgaggcagcattgaccttattgggtcgcgcacgcaaggacgaacgcagcgccaactag

SEQ ID NO: 87591 - DNA, 822 bp, Enterobacter aerogenes
atgccgtgtgaagaactggatatcgtctggaacaatattaaagccgaagcccgggctttggccgactgtgagccgatgctcgccagtttttaccatgcaacgctactcaagcacgaaaatctgggcagcgccctgagctatatgctggcgaataagctggcctcgccgattatgcctgctatcgctattcgcgaagtggtggaagaggcctatgccgcagacccggagatgatcgcttccgccgcctgtgatatccaggcggtacgtacccgtgaccctgcggtcgataaatactcaacgccgctgttgtacctgaaaggcttccatgcgctgcaggcctatcgtatcggccactggctgtggaatcagggtcgccgcgcgctggctattttcctgcagaaccaggtttccgtctcgttccaggtcgatattcatccggcggcgaagattggccgtgggatcatgctcgaccacgccaccggtatcgtggtcggtgaaacggcggtgattgaagacgacgtatccatcctgcagtctgtgaccctcggcggtaccggtaaaaccagcggcgaccgtcacccgaaaattcgcgaaggcgtgatgattggcgccggggcgaagatcctcggcaatatcgaagtcgggcgcggggcgaagattggcgccggttccgtggtgctacaacctgtgccgccgcataccaccgccgcaggcgtaccggcgcgcatcgtcggcaagccggagagcgacaagccagcgatggatatggatcagcattttaatgggattcaccatactttcgagtacggcgacgggatttga

SEQ ID NO: 87592 - DNA, 474 bp, Enterobacter aerogenes
atgctgaacatcgtgttattcgaaccagaaatcccgccgaacaccggcaatatcatccgcctgtgcgccaacaccggcttcaatttacatatcattgagccaatgggctttacctgggacgataaacgcctgagacgcgccgggttggattatcacgagttcaccgccgtacagcgccacgcggattacgcggcgtttgtcgccagcgcgaagccgcaacggttgttcgccctcacgactaaaggcacgcccgcccacagcgcggtaagctatcaggatggtgatttcttgatgtttggtccggaaacgcgcggcctgccggccagcatcctcgatgccctgccggcggagcaaaaaatccgtattccgatgatgccggacagccgcagcatgaacctgtcaaacgcggtgtcggtggtggtgtatgaagcctggcgccagttgggataccccggcgccgtgttgcgccgctaa

SEQ ID NO: 87593 - DNA, 1185 bp, Enterobacter aerogenes
atgattatttccgccgccagcgactatcgcgccgccgcacagcgtatcctgccaccatttctgttccactatatcgacggcggcgcctacgccgaacataccctgcgccgcaacgttgaagacctctccgacgtggcgctccgccagcgcattctgcgcaatatgtcggatctgagcctggaaaccacgttattcaacgaaaagctggcgatgccaacggcgctggcgccggtcgggctgtgcggcatgtacgcgcgccgcggcgaagtgcaggcagcgggcgcggcggacgacaaaggcatcccgtttaccctctctaccgtttccgtttgcccgattgaagaggtcgccccgaccatcaaacgcccgatgtggttccagctgtatgtcctgcgcgatcgcggatttatgcgcaatgcgctggagcgcgccaaagccgcaggctgctccacgctggtctttaccgtggatatgccgacccccggcgcgcgctatcgcgacgcccattctggcatgagcggcccaaacgccgccatgcgccgctactggcaggccgtcactcatccgcagtgggcatgggacgtcggtctcaacggccgcccgcacgacctgggcaatatctccgcctacctcggcaaaccgaccgggcttgaggattacatcggctggctggcgaataatttcgatccgtcgatttcatggaaagacctggagtggatccgcgacttctgggacggcccaatggtgatcaaagggatcctcgacccggaggacgcccgcgatgcggtacgcttcggcgctgacggcattgtcgtctccaaccacggcggccgccagcttgacggcgtgctctcttccgcccgcgccctgcccgccattgccgatgcggttaaaggcgacatcactattctcgccgacagcggtatccgcaacggtctcgacgtggtgcggatgatcgcccttggcgccgacagcgtgctgctgggccgcgcgtatctgtacgcgctggcgacccacggcaagcagggggtggcgaatctgctcaaccttatcgagaaagagatgaaagtggcgatgacgctgaccggggcgaaatccatcagcgaaatcagccgcgattcgctggtgcagaatgccgaagcgctgcagacctttgatgcgctcaagcagggcaacgccgcgtaa

SEQ ID NO: 87594 - DNA, 774 bp, Enterobacter aerogenes
gtgaaagtgatgccaaaacgcctggctgacgacgtcgcaaatcgcgtccgggcgctgatagaagaacaacagctggaggcgggcatgcgtttgcccgccgagcgccagcttgccgtccagctcggtgtttcacgcaattcgctgcgtgaagcgctggcgatgctggtcaacgaaggggtgctgcttagccgtcgcggcggcggcaccttcgtgcgctggcagcatgagccctggtcggagcaaaacatcgtccagccgctgaaaacgctgctcgccgacgaccccgactacagttttgatattctcgaagcccgccacgctattgaagccagcaccgcctggcatgcggcgatgcgggccaccgacgccgaaaaagaaaaaatccgcctctgttttgaagccaccctcagcgatgacccggatctcgcctcacaggcggatgttcgcttccacctggcgatcgctgaagcctcacataatgtggtgctgctgcaaaccatgcgcggtttcttcgagcttctgcaatcctcggtgaagcagagccgccagcgcatgtatctggtgccgccggtgttcgcgcgtctgaccgaacaacatcaggcggtaatggaagcgatcttcgccggcgacgcggaaggcgcccgccaggcgatgatggcccacctcggttttgtccacgccaccattaaacgttttgatgaagaccaggcccgccaggcgcgtattacccgcctgcccggtgaccacaatgaaaattccagggagaactcgtga

SEQ ID NO: 87595 - DNA, 1656 bp, Enterobacter aerogenes
atgaacctctggcaacaaaattacgatccggctggtaatatctggctatcgagccttatcgcctcactgccgattctgtttttctttttcgccctgattaagctcaagcttaaaggctatatcgccgccacctggaccgtagccatcgcgctgcttgtcgccctgctgttctataaaatgccggtcgatcgcgccttatcgtcggtggtatacggcttcttctacggcctgtggcctatcgcgtggattatcatcgccgcggtcttcgtctataaaatctcggtaaagaccgggcagttcgacattatccgctcgtcgattctttcgattacaccggaccagcgcctgcagatgctgattgtcggcttctccttcggcgccttcctcgaaggggccgccggtttcggcgcgccggtggcgatcaccgccgcgctgctggtcgggctcggcttcaatccgctatacgccgccgggctgtgcctgattgttaacaccgcgccggtggccttcggcgccatggggatcccgattctggtcgctggccaggtgaccggcatcgatagcttcgccatcggccagatggttggccgccaactgccgttcctgaccattatcgtgctgttctggatcatggcgattatggacggctggcgtggggtgaaagagacgtggcctgcggtgatggtcgcaggcggctcgttcgctatcgcgcagtacctcagctctaacttcctcggcccggaactgccggacatcatctcttcgctggtgtcgctggtatgcctgacgctgttcctcaagcgctggcagccggtacgtatcttccgctttggcgatatgggcgccgcgcaggttgatcaaacgctggcgcgcacgcattacaccgccggtcaggtcattcgcgcctggtcgccgttcctgttcctcaccgccaccgtcaccctgtggagcgtaccgccgtttaaagcgctgtttgcgccgggcggggcgatgtatgacttcgtggttaacatcccggtaccgttcctcgacaaaatggtcgcccgtatgccgccggtggtaagcgccgcgacgccgtacgccgcggtgtataaattcgactggctgtcggcgaccggcaccgccattctgttcgccgctatactgtctatcgtctggctgcgtatgaagccgaaggatgcgctgaccactttcgccgggacgttgaaagagctggcgctgccgatttactccatcggcatggtgctggcgttcgcctttatttcaaactactccgggctgtcatcgacgctggcgttggcgctggcgcataccggccacgcgtttaccttcttctcgccgttcctcggctggctgggggttttcctgaccggttcggatacctcgtctaacgcgctattcgccgcgctgcaggcgacggcagcccagcaaatcggcgtctccgatattctgctggtcgccgcgaataccaccggtggggtgacaggcaagatgatttcgccccagtcgatcgccattgcctgcgccgcggtaggcctggtgggtaaagagtcggacctgttccgttttaccgtcaagcacagcctgatattcacctgcatggtgggcctgattaccaccctgcaggcttatgtcttaacctggatgattccgtga

SEQ ID NO: 87596 - DNA, 363 bp, Enterobacter aerogenes
atgaaagaagtcgaaaagaatgaaatcaagcgtttgagcgaccgtctcgacgccatccgccaccagcaggccgacctgtcgctggtcgaagccgccgataaatacgcggagctggaaaaagaaaaggcgaccctggaaacggaaatcgaacgcctgcgttccgttcagtcgcagaagctgagcaaagaagcgcagaaactgatgagcatgccgcaccgtcgcgccatcaccaaaaaagagcaggccgatatgggcaagctgaagaaaagcgtgcgcggactggttgtcgtccatccgatgaccgcgctgggccgtgaaatgggccttaaagagatgaccggcttcgcgaagagcgagttttaa

SEQ ID NO: 87597 - DNA, 225 bp, Enterobacter aerogenes
atggcgaaaatcggcgacggcgtaccacgtatcatcgataaaacggtagatttcatggcctcgagccaggcgtttatggaatatctgaaaaaatgcccgcgtttacagcggataccgcgcgatattcctgaggataaaaaagcgctatttctgagtcgtctggagtattaccggcagctgtaccggccgacgtgcgaccagcaagaagcggagtcagagcgttga

SEQ ID NO: 87598 - DNA, 600 bp, Enterobacter aerogenes
atgatgtacaacctggcgcggccgatgccgcgcccaataccactcctgtcagatatgcaggcaataatggaagaaacacaggcatttgaaaaccgcgtacttgagcgtttaaatgctggtaagaccgtaagaagtttcctgatagccgccgtcgaactcctgacggaggcagtcaatattctggtacttcaggtattccgcaaagacgattacgcggtgaaatacgcagtggagccattgctggacggcagtgggccgctgggcgatctttccgtacgcctgaagcttatctacggccttggggtgataagccgcgccgaatacgaagatgccgagctattgatggccttgcgtgaagagctcaatcatgacggcaatgagtacgctttcaccgacgatgaaattctcgggccgttaggcgagctgcactgcgtcgccgcgcttccgccaacgccgctgtttgatgagagcgataaggaactgctggcaatgcagaaactgcgctaccagcagatggtacgttctacgatggtgttgtctctgactgagctgatttcccgaatcagcttaaaaaaagccttccagaaatcaacgctctga

SEQ ID NO: 87599 - DNA, 1149 bp, Enterobacter aerogenes
atgaaagcattacattttggcgcaggtaatatcggacgtggcttcattggcaaactgctggctgacgccggtatcacccttacgttcgccgatgttaatcaggtggtccttgatgccctgaatgcccgtcatagctatcaggtccacgtggtgggtgaaaacgaacaggttgataccgtctccggcgtgaatgccgtcagcagcattggcgatgaggtggtggatctgatcgccgatgtcgacctggtgaccaccgcggtcggccccgtcgttctggagcgtatcgcccctgccatcgccaaaggcctggtgaaacgtaaagcgcagggtattgaacgcccgctgaatatcatcgcctgcgaaaacatggtacgcggcaccagccagctgaaagaccatgtgtttaacgcgctggcggaagaggacaaagcgtgggttgaagcgcatatcggcttcgtcgactccgccgtagaccgcatcgtgccgccgtcggcttccgccacccacgatccgctggaagtcaccgttgaaaccttcagcgaatggattgtggataaaacccagtttaagggcgagctgccgaacatcccaggaatggaattaaccgataacctgatggcatttgtcgaacgtaagctattcaccttaaacaccgggcatgctataaccgcctacctcgggaaactggcgggccatcaaacgattcgcgacgcgattctcgatgagcacattcgcgccgtcgtgaaaggcgcaatggaagagagcggcgcggtgctgattaaacgctacagctttgatgcgcagaaacacgcggcttatatccagaagatcctcggtcgctttgagaacccgtatctgaaagatgatgtggagcgcgtcggccgccagccgctgcgtaaattgagcgcgggcgatcgtttgatcaagccgctgcttggcacgctggaatacggcctgccgcaccggaacctggtaaaagggattgccgcggccatgcatttccgcagcgaagacgatccgcaggctcaggaactcgcggcgctgattgccgaaaaagggccacaggccgcgctggcgcagatttccggtctggatgcggcaagcgctgtagtggcggaagccgttaacgactacaacgcggtaaaatga

SEQ ID NO: 87600 - DNA, 1911 bp, Enterobacter aerogenes
atgtcatccgatatcaagatcaaggtgcaaagctttggtcgtttcctcagcaatatggtgatgccgaatatcggcgcgtttatcgcgtgggggattatcaccgcgttatttatcccaacagggtggttgccgaacgagacgctggcgaagctggtcggcccgatgatcacctacctgctgccgctactgatcggttataccggcggtaagctggttggcggtgagcgcggcggcgtcgtcggcgctatcaccaccatgggcgttatcgtcggcgcggatatgccgatgttcctcggctcaatgatcgccggcccgctcggtggctactgcattaagaaatttgacgcctgggtagacggtaagatcaaatccggtttcgaaatgctggtgaataacttctccgccggcatcatcgggatgatccttgccattctggcgttcctcggcatcggcccggcggttgaagtgctatcaaaactgctggcggctggcgttaatttcatggtagcgcacgacatgctgccgctggcgtctatctttgttgaaccggcgaaaatcctgttcctcaataacgcaattaaccacggtatcttctcgccgctgggtattcagcagtcccatgagcttggcaaatccatcttcttcctgattgaagctaacccgggtccggggatgggcgttctgctggcgtacatgttctttggccgcggcagtgcgaagcagtctgcgggcggtgcggcaatcatccacttcctgggcggtatccacgaaatttacttcccgtacgtgctgatgaacccgcgtctgattctggccgttatcctcggcggtatgaccggtgtcttcaccctgactatcctcaacggcggcctggtttccccggcttccccgggttccattctggcggtactggcgatgacgccaaaaggcgcctacttcgctaacatcgcggccattattgcggcgatggcggtctcctttattgtctccgccatcctgctgaaaaccagcaaagtgaaagaagaagacgatatcgaagccgcaacccgtcgcatgcacgacatgaaagccgagtccaaaggcgcggcgacgccgctggcggcgggcgacgtggctaacgaccttagccacgtgcgtaaaatcatcgttgcctgcgacgccggtatgggttccagcgccatgggcgccggggtactgcgtaagaaagtccaggatgccggactgagcaatatctctgtcactaacagcgcgattaacaacctgccgccggatgtcgacctggtgatcacccaccgcgacctgaccgagcgcgccatgcgccaggtaccgcaggcacagcatatttcgctgaccaacttcctcgacagcggtctgtataccagcctgaccgagcgtctggtagcggcgcagcgccacatcgacaacgaagtaaaagtcaccgatagcctgaaagatagctttgataatactgacaaaaacctgttccagctgggcgcggataacatcttcctcgggcgcaaagcggcgaccaaagaagaggccattcgcttcgccggtgaacaactggtgaaaggcggatacgttgagccggaatacgtacaggcgatgctcgaccgcgagaagctgacctcaacctatcttggcgaatccatcgcggtaccgcacggtaccattgaagcgaaagaccgggtactgaaaaccggcgtcgtcttctgccagtatccggaaggcgtgcgcttcggcgaagaagaagatgaagtcgcgcgtctggtcatcggtatcgccgcccgcaacaacgaacacattcacgttatcaccagcctgaccaacgcactggatgatgaaaccgtgattgagcggctggcgaaaaccaccagcgtcgaagaagtcctgtcgttgctgaataaataa

SEQ ID NO: 87601 - DNA, 366 bp, Enterobacter aerogenes
atgtttctcaattattttgcgctgggcgttctaatcttcgttttcctggttattttttacgggattattattttgcatgatattccgtacctgattgcgaagaaacgtaatcatccgcactccgatgcgattcacgtcgcggggtgggtcagcctgtttacgctgcacgtaatatggccatttttatggatctgggccactctctatcagccggcgcgcggctggggaatgcagcataagccgaatgaagcagggactgatggcgctgacagcgagctggcgcaactcaatcagcgtatcgctgaactcgaacataaaatcgcgcatctgcagccgacagcgccgccatcctcgacggagaaataa

SEQ ID NO: 87602 - DNA, 1137 bp, Enterobacter aerogenes
atggacctgttgatcattttgacgtacgtggccattgcgtggtcggtatttaaaatattccgtattccggtaaataaatggacggtcccgaccgcggccctgggcggcgtatttattgttagcgcgcttattttattaatgaactataaccacccttatacttttactgcgcagaaagcggttatttctattcctattacgccgcaggttaccggcattgttagcagcgtgaccgataaagccaaccagcgggtgaaaaagggcgaggtactatttactatcgacccggcgcgctaccaggcgcgtgtcgacaggctgcaggccgatctggtcaccgctctgcacagtatcaataccctgaaagcccaactgcaggaagcgcaggcgaacaccgtgcgcgtctccgccgagcgcgaccggctgtataaagattatcagcgctatttgaaaggcagccaggcgcgggtcaacccattttcggaaagcgatatcgataatgcgcggcaaaactatcttgcccaggatgcgttggtgaaagcctcggttgccgagcaggcgcagattcagagccagctggatagcacgctgaatggcgaacagtcgcaggtggtgagcctgcgcgcgcagttggcggaagcgaaatataacctcgatcagaccaccgtccgggcgccgagcgatggttacattacccaggtgctgattcgcccgggaacctacgccgcgtcgctgccgctgcgcccggtgatggtctttattccgcaacagaaacggctaattgtcgcccagttccgccagaactcgttgctcaggctggaggccggcgatgatgccgaagcggtgtttaacgccctgccaggtcaggtattccacggtaaactggtcaacgtattgccggtggtgccgggcgggacttatcaggcgcagggttcgctgcagtcgctgagcgtcacgccgggtagcgatggcgtgctggcgacaattgaactggatcccgatgcgcaggtcgatgcgctgcccgacggcatctacgcccaggtggcggtctattccgaccatttcacccacgtgtcggtgatgagaaaagtgctgctgcgcatgaccagttggatgcactacctctatctcgatcattaa

SEQ ID NO: 87603 - DNA, 609 bp, Enterobacter aerogenes
atgaaactgatcggcagctataccagtccttttgtacgcaaaatttccgttatcttgctggaaaaggcgatccccttcgagtttgtgaacgaattcccctataacgacgtcaacggtgtggcgcagtacaacccgctgggaaaagtcccggctttgctgaccgatgacggcgcgtgctggtttgattcgcccattattgcgcaatatctggaactgctaaacgtcgcgccggcgatgctgcccgcggaacctctggcggcgctgaagatgcgccaactggaagccttgtctgacggcatcatggaggcggcgatcgcgctggtgcgggaaaaagcgcgtccggcggcccagcagtcagaaaccgaactgctccgccagcgggaaaaaatcgctcgcggccttgatatgttggaagggtacgccgccgacggtaccttgcgtcacggtgagctgaatctggcgaccattactgccgcctgcgctattgcttatctgaattttcgtcgcgtggcgcccggctggtgcgcgacgcggccaaaactggtcaaactggtcgagacgttgtttcagcgagccagttttgcccgtaccgaaccgccagggagttga

SEQ ID NO: 87604 - DNA, 1389 bp, Enterobacter aerogenes
atgtctatcgatactcgcgcgctttatacccggcttccggccattgaccgtttacttcgcgatcccgcttttgctttactgctcgatcgccatggccattcgcaaatcgtggcgcttctgcgccagatgttggatgaggcgcgggaacatatccgccaggcgcaggcattgccagagtggtgcgacgactggccgcaggagaccgccagccggctgaaccatagtcagcagagcgcgctgcgtccggtattcaacctgacgggcaccgtgctgcataccaatctggggcgcgctatccaggcggaagccgcggtgcaggcggtggcgcaggcgatgcgcgcgccggtcacgctggaatacgatctcgacgatgccgggcgcggtcatcgcgaccgggcgctggccgatctgctgtgccggatcaccggcgcggaagatgcctgtatcgtcaataacaacgcggcggcggtgctgctgatgctggcggcgacggccagcgggaaagaagtggtggtctcgcgcggcgaactggtcgagatcggcggcgcatttcgcatccccgacgtcatgcgccaggccggttgtttgctgcatgaagtgggcaccactaaccgcacccacgccaaagattattgtcaggctatcaatgagcagactgcgctgctgatgaaagtgcataccagcaactacagcattgaaggctttaccaaagcggttgatgaggcggagctggcggaaattggccgcgaacatggcgtgccggtggtggccgatctcggcagcggctcgctggtggatttgagccagtacggtttgccgaaagaaccgatgccgcaggaattgattgcggcgggcgtgaacctggtgagcttttccggcgataagctgctcggtggaccgcaggcggggattatcgtcggcgatcgggcgctgatcgctaagttacagagtcatccgcttaagcgtgcgctgcgggcggataaaatgacgttggcggcgctggaggcgactctgcgcctgtatctgcatccggaggcgctggccgacgagctgccgacgctgcgcctgctaacccgccgcgccgaagatattcgtcagcagggcgagcgcattcagcctgggctggcggcgcactatagcgattttgacgtgcgcgtcgaagcgtgtttatcgcaaatcggcagcggttcgttgccggtcgaccgactgcccagcgccgcgttaacctttacgccgcgcgatggtcgcggcagccagctggaagcgctggccgcccgctggcgcgccttgccgataccgacgatcggcagaatttatgatggccgcttatggctggatctgcgctgtcttgaagatgaaccccggtttatggagatgttattgagatga

SEQ ID NO: 87605 - DNA, 1860 bp, Enterobacter aerogenes
atgattattgccaccgccggacatgtggaccacggcaaaaccacgctgctgcaggcgattaccggcgtcaacgccgatcgtctgccggaagagaaatcacgcggtatgactatcgatctcggctacgcctattggccgcagcctgatggccgggtgttgggttttatcgatgtgccggggcatgaaaagtttttgtccaacatgttggccggcgtgggcgggatcgatcacgcgctgctggtggtggcctgcgatgacggcgtgatggcgcaaacccgcgagcacctggcaattctgcagttaacgggaaaaccgacgttaaccgttgcgttgaccaaaacggaccgcgtggacgcggcgcgggttgccgaagtccgggcacaggtggaatccacgctgagcgagctggggttcgacgacgtggctttcttcgccaccgcggcgacggaaaacctcggcattgccgaactgcgcagtcatttgctccagctggccgagcgcgcgcatccgcaacagcagcgctttcgtctggcgctggatcgcgcctttaccgttaagggcgcggggctggtggtgaccgggacggcgttatccggcgaggtaaaaatcggcgataccctctggctgaccggcgccaataaacctatgcgcgtccgcgggctgcatgcgcagaatcagccggttgaacaggcgcaggccgggcagcgtatcgcgctgaatatcgtcggcgacgcgcaaaaagaggatctcagccgcggcgactggctgctctcggcgcagcccgcagaaccttgcgagcgggcgatcgtcgagctcacctgtcacgcgccgctcagccagtggcagtcgctgcatatccaccatgccgccagtcatatcaccggccgcgtttcgttactggaaggcaatctggccgagctggtgctggatacgccgctgtggctggcggataacgatcgcctggtgttgcgcgatatctccgctcgcttgacgctggccggcgcgcgggtggtgacgctgaatccgccgcgccgcggtaaacgcaagccggagtatctgcagtggctttacgcactggcggcggcgcggggcgacgatgcgcaggcgttggatattcatctgcagcgcgatgcggtgcgtcttgacgagtttgcctgggcgcggcagctgagcgccgacggcctgacggcattaattaaccgtccggactacctgcaggccgggaatagcctgcttagtgcgccgctggccgcccgctggcagaaaaaactgctcgacgcgctggcccgttatcacgaccagcatcgcgatgagccggggccggggcgtgaacgcctgcggcggattgcgctgccgatggaagatgaagcgctggtgctgttattgattgaacagatgcgcagcagcggcgtcattcaaagccatcacggctggctacacctgccggaacataaagccgggtttaccgatgagcagcaggccatctggcagcgtgcggaatcgctcttcgccgatgagccatggtgggtacgcgatctggcgcgcgatctgaacgtcgaagagtcgttgatgcgcgcggtgctgcgccaggcggcgcagcaggggatgattacggcgatcgtgaaagatcgttattatcgcaacgatcggattgttgaatttgcgcaattgatccgccgcctggatctgcagcgtggttccacctgtgcggcggattttcgcgatacgctgaatattggccgtaaactggcgattcaaattctcgaatatttcgaccgcattggctttacccgccgtcggggcaacgatcatcttctccgcgatgcgctgttattccctgaaaataaaaacggcgaataa

SEQ ID NO: 87606 - DNA, 1152 bp, Enterobacter aerogenes
atggctgcatcgactttttatattccgccagtaaacgttattggcgctggttctgttactgaagcgatgaatactatccagcaatacggatatcgtcgggcattaattgtcaccgacgcgatgctgaataaattaggtatggcgggtgaagtacaaaaggcgttacaggagcgggatattttcagcgtggtgtatgacggcgtgcacccgaacccgacgactctgaacgtcgaaagcggtctggcgctgctaaaagagaataactgcgactgcgtgatttccctgggtggcggttccccgcacgattgcgcgaaaggtatcgcgctggtcgcggcaaatggcggcaacatccgtgactatgaaggggtggaccgttcggcaaaaccgcaattgccgatgatcgctatcaataccaccgccggtacggcttccgaaatgacccgcttttgcatcattaccgatgtcgatcgccacatcaaaatggcgattgtcgataagcacgtgacgccggttctgtcggttaacgactcctcgctgatgatggggatgccgaaatcgctgaccgccgccaccggtatggacgcgctgactcacgctatcgaagcctatgtttctatcgcggcgacgccgatcaccgatgcctgcgcgttgaaagcgatgaccatgatttcacagaatttaactcacgcagtggaagatggcggcaatgaacaggcgcgtgaagcgatggcctatgcgcagttccttgccggtatggccttcaacaacgcgtcgctgggctacgtccacgcgatggcgcaccagctgggcggcttctacgatctgccgcacggcgtctgcaacgccgtactgctgccgtttgtgcaggagtacaactgcagcgtcgccgccgcgcgtctgcgtgactgcgcgcaggcgatgggcgtgaacgttgccgggctgaacgataagcagggcgcggaagcctgcatcgcggccatccgcgagctggcgcgtaaagtcggcatcccggccggtctgcgcgatctgaacgttaaagaagaggatatcccgctgctggccagcaacgcgctgaaagatgcctgcggcttaaccaatccgattcaggcgactcacgaagaaatcatggcgattttccgcgccgcgatgtaa

SEQ ID NO: 87607 - DNA, 489 bp, Enterobacter aerogenes
atgaaccggtttattatcgccgatgcgcaaaagtgtatcggctgccgaacctgcgaggtggcctgcgtggtgtcgcatcagcaggatcaagattgttctaccgtttctgcaagacgctttgcgccgcggattcgggtggttaagagcgatgagctatcaacggcgacgctgtgccgtcagtgcgaggatgcgccctgcgcgaacgtctgcccggaaggggcaatacgccatgaaggcgacgtctggcgagtcgagcaacggctgtgcattggttgtaaaagctgtatggtggcgtgcccttatggggcgatgacggtgatgttgactgacgaaggcgtgcaggcgctgaagtgcgacctgtgcgcgcaccggcaaacggggccggcgtgcgtagcggcctgcccgactcaggcgctgcgctgtattgagcccgccgagctggaaagattaagcgccgagcgccgccgttgggcggcgcaggcaatgtaa

SEQ ID NO: 87608 - DNA, 1257 bp, Enterobacter aerogenes
atgacattttcacttttcggcgacaaattcacccgtcattcaggcatcacccgcctgatggaagacctcaatgacggcctgcgcacaccgggcgcgatcatgctgggcggcggcaaccccgcgcaaatcccggagatgaatgaatacttcaatagcctgctggccgatatgctggataacggcaaagcccttgatgcgctttgcaattatgatggtccgcaagggaaaagcgagcttctgaccctgcttgcgcaaatgctgcgcgaagaattaggttgggagatcgaaccacagaatattgctctaacaaatggcagccagagtgcatttttctacttatttaacctgtttgccggccgccgtgccgacggcaccacccgcaaagtgctgttcccgctgacgccagaatatatcggctacgccgattccgggctggaagaggatctgtttgtcgccacccgtcccaacattgagctgctgccggaaggccagtttaagtatcacgtggacttcgaacatctgcagatcaccgaagagacggggatgatctgcgtctcccggccaaccaacccgaccggcaacgtcattaccgacgaagagcttattaagctggatgccctcgccaatcagcacggcgtcccgctggttattgataacgcctatggcgtgcctttcccgggtattatttttagcgaagcgcgcccgctgtggaatccgaacatcgtgctgtgcatgagcttatccaagctcggcctgccgggcacgcgctgcggcattatcatcgccaacgagaaaatcattaccgccatcagcaatatgaacggcattatcagcctcgctccgggcggcattggtccggcaatgatgtgcgaaatgatcaagcgtaaggacctgctgcggctatcggagacggtgattaaaccgttctattatcagcgtgttcaggaaaccatcgctaccattcgccgctatttgccggaagaacgctgcctgattcataaaccggaaggggcgattttcctctggctgtggtttaaggatctgccgatctctaccgagctgctgtatcagcgcctgaaacaacgcggcgtgctgatggtgccgggcgattacttcttcccggggctggacaagccgtggccgcatacgcatcagtgcatgcgcatgaactatgtgccggatccggagaaaatcgaggcgggagtgaaaattcttgccgaagagattgagcgcgcctggcaggagcaagacgcctga

SEQ ID NO: 87609 - DNA, 2031 bp, Enterobacter aerogenes
atgaaactcgctgcgcttgcctcgctactgctgcccgggatggcctttgccgcctggacaaccgctgacttccccgccttcactgaacaggatgcaggccgtttcacgacgcaaaatgaggtgacgaagggtacccgccctttgcggataagttttgaccaacagtgctggcagcctgcgggggcgataaaactcaatcagatgctgtcgctggaaccctgccgggatacgccgccgcagtggcgcgtgttccgtgacgggcgctatacgctggaagtcgatacccgctccggtacgccaacgctgatgctgtcgctggcggaacagcacactaccagcacgcagccgctgctgcgccagtgtcccaaatgggatggtaaaccactgacgctcgacgtcggccaaacgttcgctgaaggaagccaggtccgcgatttttacagcggtaatatcgccacggtgaaagcgggcaaaatcacgctgcggcccgccgctggtagtaatgggctcctgctgcttgaacaagcgaatagcgccgccagcgcgccgtttaactggcacaacgccacgatctattttgtcctgaccgatcgcttcgtcaacggcaatccggccaacgacaacagctacgggcgccataaagacggtatgcaggagataggcaccttccacggcggcgatttacaagggctgaccagcaagctggattatcttcaacagcttggcgtcaacgcgctatggataagttcaccgctggagcaaattcacggctgggtcggcggcggcaccaaaggcgactttccccactacgcctatcacggttactacacccaggactggacccgtcttgacgccaacatgggtgacgaagccgatcttcggcaactggttgatgaggcccatcggcgcggtatacgcgtgctgtttgatatcgtcatgaatcacgccggttacgccacgctcgccgatatgcaggaatttcacttcggttcgttgtacctgaaaggcgatgaactgaaaaaaacgcttggcgagcgctggaccgattgggaaccggcgtcggggcaaagctggcacagcttcaatgattacatcaacttcagcgataaagcaggctgggaacaatggtgggggaaaaaatggatccgcaccgatatcggcgactacgacaatccgggtttcgacgatttcaccatgtcgctggcgttcctgccggacctgaaaaccgaatcgacgatcccttctggcctgccaaatttctaccgtcacaagccggataccgccgccaaagagatagccggctacacgccgcgcgactatctgacccactggcttagccaatgggtacgcgactacgggattgacggtttccgcgtcgataccgcgaaacacgtcgaactggacgcctggcagcagctcaaaacacaggccacggccgcgctggcagactggaaaaaagcgaatccgcagaaagcgctggatgacgcgccattctggatgaccggcgaggcctggggccacggcgtgatgcagagcgactactatcgccacggtttcgacgcgatgattaatttcgattatcaggatcaagcggcgaaagcagcaaactgtcttgcaaacatggacgccacctggcagcagatggcggacaagctgcaggatttcaacgtgctgagctatctctcctcgcacgatacccgcctgttccgcgaaggcggcagccgggcggcggaactgctattactcgcgccaggcgccgtacaactcttctatggcgatgaatcttcacgcccgttcggccccacgggttccgacccgctgcagggtactcgctccgatatgaactggcaggatgtggtcggtagcgcatccgataacgtcgcgcactggcaaaaaatcgcccaattccgtgcccgccatccggccattggtatgggtaaacaacagacgctgacgctagagcagggctatggtttcgtgcgtgaaagcagcgctgataaagtgatggttgtctgggccggacagcaatag

SEQ ID NO: 87610 - DNA, 564 bp, Enterobacter aerogenes
atgccttacattacaaagcaaaatcaagcgatcacggcagatcgtaactggcttgtctctaagcaatacgacggccgttggtcgccgagcgagcaggcgcgtctgaaagatatcgcctcacgttataaagtgaagtggtctggcaatactcgccgtataccatggaactcgctgcttgagcgcgtcgacattattccaaacagcatggtggcgaccatggcggcggcggaaagcggttggggcacctcgaagctggcgcgcgtcaacaacaacctgtttggtatgaagtgcggcggcggcaattgtcgcggtgcgatgaaaggctactcccagtttgaatcggtcgagcagtcggttcaggcttacgtgagaaaccttaacacgcatccggcttattcatccttccgtaagtctcgcgcacagctgcgtaagacggaccaggaagtgactgccagcgcgatgatccacaagttgaaggggtactcgacgaaagggtcgagctataacaactatctcttcgctatgtatcaggacaatcagcgcctaattgccgctcatatgtaa

SEQ ID NO: 87611 - DNA, 1179 bp, Enterobacter aerogenes
atgtttgaaaagcgtcaccgcattacgctgttattcaacgccaacaaagcctatgaccgtcaggtggttgaaggcgttggcgaatatctgcaggcatcacagctggaatgggatatttttatcgaagaggattttcgcgcgcgtatcgaaaacatcaaagagtggttgggcgatggcgttatcgccgattacgacgacccggagatagaaaagctgctggcggatgtcaaagtgccgattatcggcgtcggcggctcctaccataagccagaatgctatccgcctgttcactatatcgccaccgataatgccgcgctggtcgaaagcgcattcctgcatctgaaagaaaaaggcgtgaaccgtttcgctttttacgggctaccgacctccagcggcaagcgctgggcgatggagcgcgaacacgccttcagccagctagtcgccaaagagaaataccgtggcgtggtctatcaggggctggagaccgcgccggagaactggcagcatgcgcaaaatcggcttgccgactggctgcaaacgctgccgccgcaaaccggtattatcgccgtgaccgatgcccgcgcccgtcacattctgcaggcctgtgagctgctgcatattccggtgccggaaaaactgtgtgtcattggcatcgataacgaagaactgacccgctacctctcccgcgtcgcgctctcttccgtggcgcagggtacccggcagatgggctaccaggcggcgaaacttctgcatcgattactggaaaacgaagcgctaccgctacagcggctgctggtgccgccgatgcgcgtcattgagcgacgctccaccgattatcgctcgctcaccgaccctgcggtgattcaggcgatgcattatatccgcaatcacgcctgcaaaggcatcaaggttgagcaggtgctcgacgccgtcggcatctctcgctctaatctggagaaacgctttaaagaagaggtcggcgagaccatccacacggtgatccacagcgaaaagctggaaaaagcgcgcagcctgctggtctccaccacgctatcgataaacgaaatttcgcagatgtgcggttatccgtcgctgcagtatttctattcagtgtttaagaaagagtacgacgtgacgccgaaagagtaccgcgatcggcacagtgaagtgatgatgtag

SEQ ID NO: 87612 - DNA, 1182 bp, Enterobacter aerogenes
atgtcgaaaaacacgtcgtctgaaatcaaacttacgccatccgcccctgccgtttttccggcgctgaaagggctcaatctccaggttttcgtgatgatcgccgcgattatcgccattatgctgttctttacctgggttaccgacggcgcctatctgagcgcgcgtaatatctccaacctcctgcggcaaaccgccatcaccggcatcctcgccgtcggcatggtgttcgtgatcatttcggcggaaatcgatctgtccgtcggctcgatgatggggctgctcggcggcgcggcggcgattttcgacgtctggctcggctggccgctgccgctcaccatcctcgttacgttggtcatggggctgctgctcggcgcgtggaacggatggtgggtcgcctatcgcaaggtgccctctttcattgttacccttgccggcatgctggcgtttcgcggaattctgatcggtattaccaacggtaccaccgtctcgcctaccacgccggcgatgtcgcaaatcggccaaagttatttaccggacggcatcggctttggtatcggcgttattggcatggcggcctttatcatctggcaatggcgcgggcggatgcgccggcaggcgttagggctggcgaccaccagttctggcggcgctgttggccgtcagaccatcaccgcagttatcgtgctgggcgctatctggttgctcaatgattatcgcggcgtgccgacgccggtgctcatactcgccgccctgctgctggcgggcatgtttatggcgacccgcaccgcttttggccgtcgtatctatgccattggcggcaatctggaagcggcccgcctctccgggattaacgtcgagcgcaccaagctggcagtcttcgcaattaacggcctgatggtcgccatcgccgggttgatcctcagttcgcgactgggagcgggttcgccttccgccggcaatatcgccgaactggacgccatcgccgcctgcgtgattggcggcaccagcctggcgggcggtatcggcagcgtggcaggggccgtaatgggggcgtttattatgtcggcgctggataatggcatgagcatgatggacgtcgccaccttctggcaatacatcgtcaaaggcgccattttactgttggcggtctggatggattcggctaccaagcggagaacataa

SEQ ID NO: 87613 - DNA, 1542 bp, Enterobacter aerogenes
atgtcctggttactcgaaatgaagaacatcaccaaagcctttggcgcggttaaggccgtggataacgtcagcctgcggctgaatgccggggaagtggtgtcgttatgcggtgaaaatggttcggggaaatcaacgctgatgaaagtgctgtgcgggatctatcctcgcggcagctacgaaggtgaaattattttcgctggcgagacgttacaggcgaatcatattcgcgataccgagcgtaaaggtatcgccattattcaccaggagctggcgttggtgaaacatctcacggtgctggaaaatatctttctcggcgccgaggtctcacgccatggcctgctggattacgaaaccatgaccctgcgctgccagaagctattggcgcaggtgaatttatcgatctcaccggatacacgcgttggcgatttaggcctgggccagcagcagctggtcgagatcgctaaggcgctgaataaacaggtacgtttgctgatcctcgatgaacccacggcatcattaaccgaacaagaaaccgcgacgctgctggcaattattcgcgatctgcaaaaccacggcatcgcctgtatttatatttcgcacaagctcaatgaagttaaagccatctccgacactatctgcgtaatacgtgacggccagcatattggcacccgcgacgccagcgggatgaatgaagatgacatcatcactatgatggtcgggcgcgagctcacggcgctgtacccaaatgaaccacatagtcatggcgatgagatcttgcgggtcgagcatctcaccgcctggcacccggttaaccgtcatatcaagcgcgtcaacgacgtgtcgttttccctccgccgcggtgaaatccttggcatcgctgggttagtcggcgccgggcgtaccgaggcggtgcagtgtctgtttggcgtctggccggggcgctggcagggaagcatctttatcgacggacagcaggtgacgattaacaactgccaacaggcgattgcccatggcatcgccatggtgccggaagaccgcaaaaaagacggcatcgtgccggtgatggctgtcggcaagaacatcactctcgcggcgttaaaccagttcaccggcccggcaagcagcctcgacgacgccgcggagcagcactgcattcagcagtcgattcagcggctgaaaatcaaaacgtcatcgccggatctggcgataggccgcctgagcggcggcaatcaacaaaaagcgattctggcccgctgcctgctgctcaatccgcgcattttgatcctcgatgaaccaacccgcggcatcgatatcggtgcgaaatacgaaatctacaagcttatcaatcaactggtgcagcaaggcatcgccgtcatcgtcatctcatccgaactgcccgaagtgctcgggctgagcgatagggtgctggtgatgcacgaaggcaagcttaaggccgatttgcataatcaaggtctgacccaggaacaggtgatggaagccgcactgaggagcgaacgccatgtcgaaaaacacgtcgtctga

SEQ ID NO: 87614 - DNA, 996 bp, Enterobacter aerogenes
atgaagataaagaacctttgccttacgctctgcgcctcatcgctccttctcgccagcatggcgggcatggctaaagaagttaagattgggatggccatcgacgaccttcgtctggaacgctggcaaaaagatcgcgatattttcgtcaataaagcggaatcattaggtgccaaagtatttgtgcaatccgccaatggcaacgaagaaacgcaaatgtcgcaaattgaaaatatgatcaatcgcggcgtcgatgttttagtaattattccttacaacggccaggtgctcagcaacgttattaaagaagcgaagcaggagggaattaaagtcctcgcctacgatcgcatgattaataatgctgacatcgatttttatatttctttcgacaatgaaaaagtcggtgaaatgcaggcccagagcctggtcgacaaagtgccgcagggtaattatttcctgatgggcggctcgccggtggataataacgccaagctgttccgcgccggccagatgaaggtgctcaaaccttatgtcgatgacggcaaaattaagatcgtcggcgatcagtgggtcgacggctggctgccggaaaatgcgttaaaaatcatggaaaacgcgctgacggcgaataacaacaaaattgacgcggtagtggcttccaatgatgcgaccgccggcggcgctatccaggcgctaagcgcccaggggctggcgggtaaagtcgccatttccgggcaggatgccgatctggctggcgtgaaacgtattatttccggcacccagacaatgaccgtttataaaccgattaccacgcttgccactagcgctgccgaaatcgccgttgaattaggcaatgaccagcaacccaaggctgacgccacgttgaataacggcttaaaagatgtcccctcgcgcctgttaacgccaattgaagtcaataaagagaatattgacgccacggtgattaaagacggtttccacaaaaagagtgaactgtaa

SEQ ID NO: 87615 - DNA, 1323 bp, Enterobacter aerogenes
atgcagacctatttcgatcaactcgatcgcgttcgttatgaaggcccgaaatcgactaacccactggctttccgtcactacaatccggatgaattagtactgggtaaacgcatggaagaccacctgcgtttcgctgcctgctactggcacactttctgctggaatggcgcggatatgtttggcgtggggtccttcgatcgtccatggcagcagccgggcgaagcgctggaaatggcgaaacgtaaagccgaagtggcatttgagtttttccataagttgaatgtgccgtattactgcttccatgatgtcgacgtttctccggaaggcgcttcgctgaaagagtacagcaacaacttcgcgcagatggtggacgtactggcggaaaaacagcagcagagcggtgttaaactgctgtgggggacggcaaactgctttaccaacccgcgttatggcgcaggggcggcgacgaaccccgatccggaagtctttagttgggcggcgactcaggtggtcaccgcaatgaattcgacccacaagttgggcggtgaaaactacgttctgtggggcggtcgcgaaggctacgaaaccctgcttaataccgatctgcgccaggagcgcgagcagattggccgctttatgcaactggtggttgaacacaaacacaaaattggtttccagggcaccctgctgatcgagccgaagccgcaggagccgaccaagcaccaatatgattatgatgcctccacggtttacgggttcctgaaacagtttgatctggaaaaagagattaaactgaacattgaagccaaccacgccacccttgccggccactctttccaccacgagatcgccacggctattgcgctgggcctgttcggttcggtggacgcgaaccgcggcgatgcgcaactgggctgggataccgaccagttcccgaacagcgtagaagagaacgccctggtgatgtatgagatcctcaaggcgggcggcttcaccaccggcggcctgaactttgatgctaaagttcgtcgccagagcaccgacaaatacgatctgttctacggccatatcggcgcgatggacactatggcgctgtcgctgaaagttgcggcgcgcatgattgaagacggcgagctggataaacgcgtggcgaaacgctacgccggctggaacggtgaattgggccagcagatcctcacaggccagatgaccctgaccgacatcgcgcactatgcgactcagcataacctggcgccgcagcaccacagcgggcatcaggaactgctggaaaacctggtaaaccattatctgttcgataagtaa

SEQ ID NO: 87616 - DNA, 1455 bp, Enterobacter aerogenes
atgtatatcgggattgatttagggacctcgggcgtaaaagccattctgctcaatgaacagggcgacgtactggcgacgcataccgaaaaactgaccgtctcgcgcccgcatccgctctggtccgaacaagatcccgaacagtggtggcaggcgacgaataccgcgatgcaagcgctgggcgcgcaacactccctgcgcgaggtaaaagctttaggcatcgccgggcagatgcatggcgccacgctgcttgataaacagcagcgggtcctgcgtccggcgattttgtggaatgacggccgctgcggcgaagagtgcatgctgctggaagaaaaagtcggcgcttcgcggcaaatcaccggcaacctgatgatgccgggttttacggcgccgaagctgctgtgggtacagcgtcacgaagccgaaatctttaaacagatcgataaggtcctgttgccgaaggattacctgcggctgcgcatgagcggtgagtacgccagcgatatgtccgacgccgccggcacgatgtggatgaacgtcgcgcgtcgtgactggagcgatgaaatgctcgccgcctgcgggctcagccgcgacaatatgccggccctctttgaaggctgcgaggtgaccggccatctgcgcgcagaggtcgctcaggcgtggaatatgccgcgggcgctggtggtagcgggcggcggcgataacgcggcaggcgctgtcggtgttggcatggccgatgcggggcaggcgatgttatcgctggggacctccggcgtttatttcgccgtcagcgatggttttctgagtaaaccggaaagcgcggtgcatagtttctgccacgccctgccgggccgctggcatctgatgtcggtgatgctcagcgccgcgtcttgtctggattgggcggcaaagctgaccggcctcggcagcgtaccggcgctgatcgccgcggcgcagtcggcggatgacaatgccgacccggtgtggttcttgccttatctttccggcgagcgtacgccgcacaacaatccgcaggctaaaggcgtgttcttcggccttacccatcaacatggtcccgccgaactggcgcgggcggtgcttgagggggtgggttacgcgctggctgacggtatggatgttgtgcactcctgtggtgtgaagccagacagcgtcacccttatcggcggcggcgcgcgcagcgcatactggcggcaaatgctcgccgatatcagcggacaacagctggatttccgcaccggcggcgatgtcggcccggcgttaggcgcggcaagattggcgcaactggccgttcatcatgatgcggctttctctgacctcctgccgcagctgccgctggagcaggcgcatctgcctgatgctcaacggtttgcccgttatgcgccgcgtcgtgaaacgttccgccagatttatcagcagcttaagccgctgatgtcataa

SEQ ID NO: 87617 - DNA, 378 bp, Enterobacter aerogenes
atgaaattaaaacgtacgacggcaagattaatcatgctgctgggctcgctggtttacctcatcggcatctggcgaacgtgcccgctgttcagcggtaaaggctattttcttggcgtgctggtgatggggatgtttgctgtcctcacccatcaacgaacggagcaggaagcgcagcgagatgatgattttatctccctgtgccggctggttctgttgctatcggcaggattgctgctggtcggcgcctggtttgttccggcgccgtggcgtgaaaaaagtatttacgtgatggcatggtttgtctgtatgtacggtgcgtcagcaacgtcttatcccgctaaagtcgcggataaagctcgcaataactcagtggaataa

SEQ ID NO: 87618 - DNA, 996 bp, Enterobacter aerogenes
atgcaggaaaaaataagctggattaccaacttgcgcggcatagcatgcctgatggtagtaatgattcacagtaccacctggtacattacccatcctcatagcatcagcttgttcgaatgggatatcgcgaatctgcttaactcggcatcacgggtcagcgtcccgctttttttcatgatttcaggatatctgttttttggcgaacgcagcgcccagccccgccattatctgcgcatcgcgctgtgtattctgttctatagcgtgctggcactgctctatatcaccctgtttacccacatcaacgttgagctgtcattaaaaaatttactgcagaagccggtgttttatcacctgtggtttttctttgccattgtggtgatttatctgctctcgccgctgattcaggtgaagcaggtcagcggcaaaatgctgctggcgctgatgctggtgattggcctcatcgccaaccccaatatggtaagcatcaaggcgggcggcattgaatggctaccgataaacctctatatcaacggcgataccttttactacgtactgtacgggatactgggccgggcgatcggcgccatgaacaccgacagaagaggactgaccctgctgtgcgcgctgctgtttaccgccgcggtgtgggtcatttcacgcggcacgctgcatgaactgcaatggcgaggcgattttggcgatacctggtatctgtattgcgggccggctgtgtttatctgtgcaatctcgttattcaccctgggcaaaaacatcctcaatagccgtgagctcccgggtatcgcgttaatctccagacattcattaggcatttatggctttcacgcattgtttattcacgctctgcgcgccagcggccttgagctaagccgctggcccttgctggatattgtgtggattttcgccgccgcgctgttgggtagcctggcgctgtctacgctggttcagcgaattgatcgccgtcggttggtgagctga

SEQ ID NO: 87619 - DNA, 300 bp, Enterobacter aerogenes
atgaaatatttcgtatctgccctggcggcgctgctgctggtcggctgcagccagacacctgctcaacccgttcaaaaagcgcaaaaagcacgtattacgccgcaaactacgctgaatatggaaaaattatgcaaggatcaggcggcgttacgttacagcaccgacacccgtcgcgtcgacgtcaatcatttcgagcagttccaggcaagctatgagctttccggtctgacttcgcggaatgaacgctttgtctgttcttttgatccagacggccagtttttacatctttctatgcgctaa

SEQ ID NO: 87620 - DNA, 912 bp, Enterobacter aerogenes
atgcaaaagtttgataccaggaccttccagggcctgatcctgaccttacaggattactgggctcgtcagggctgcaccattgttcaaccactggacatggaagtcggcgccggcacatcccacccaatgacctgcttacgcgcgttggggccagagccgatggcgaccgcctacgtacaaccttctcgtcgcccgaccgatggccgctatggcgaaaacccgaaccgcttacagcactattaccagttccaggtggtgattaagccgtccccggacaacattcaggaactgtatctcggatctctgaaagagctgggtatggatccgactatccacgacatccgcttcgttgaagataactgggaaaacccgactctgggcgcctggggattgggttgggaagtgtggcttaacggtatggaagtgacgcagtttacttacttccagcaggttggcgggctggagtgtaaaccggtcaccggcgaaattacctacggcctggagcgtctggcgatgtacatccagggcgtggacagcgtatacgatctggtctggagcgatggcccgctgggtaaaaccacttacggcgacgttttccaccagaacgaagtggaacaatccacctataactttgaatatgcggacgtagacttcctgttcacctgcttcgagcagtacgagaaagaagcgcagcaactgctggcgctggaaactccgctgccgctgccagcctacgagcgtattctgaaagccgcccatagctttaacctgctggatgcgcgtaaagccatctccgtcaccgagcgtcagcgctatattctgcgtatccgcaccctgactaaagcagtggcagaagcttactatgcttcccgtgaggcccttggcttcccgatgtgcaacaaagacaaataa

SEQ ID NO: 87621 - DNA, 2070 bp, Enterobacter aerogenes
atgtctgagaaaactttcctcgtggagatcggcaccgaagagctgccaccaaaagcactgcgcagcctggctgaatccttcgctgccaactttactgcggaactggacaacgctggcctcgcgcacggcgccgtcgaatggtttgccgcgccgcgccgtctggcgctgaaagtggcgaatctggcagcctcgcagccggatcgagaagtcgaaaaacgtggcccggccattgcccaggcgtttgacgctgaaggtaaaccaagcaaagcggccgaaggctgggcgcgcggctgtggtattaccgtcgatcaggctgaacgtttgaccaccgataaaggcgaatggctgttgtatcgcgcccacgttaagggggaaagcgcgcaaacgctgctgccgaacatggttgcgacctcgctggctaagctgccgatcccgaaactgatgcgctggggcgcttctgacgttcactttgtgcgtccggttcacaccgtgaccctgctgttgggcgatcaggtgatcccggcgaccattctgggtatcgcttccgaccgtatcatccgcgggcaccgttttatgggcgagccggaattcaccatcgacaatgccgaccagtatccgcagattctgctggagcgcggtaaagtgatggccgactacgccgagcgtaaagccaaaatcaaagcggatgctgaagcggcggcgcgtaagattggcggtaacgctgacctgagcgaaagcctgctggaagaagtgacctcgctggttgaatggccggtagtgctgacggcgaagtttgaagagaaattcctcgcggtgccatccgaagcgctggtttacaccatgaagggcgaccagaagtacttcccggtctatgcaaacgacggcaaactgctgccgaacttcatcttcgtggcgaatatcgagtccaaagatccacagcagatcatctccggtaacgagaaggtcgttcgtccgcgtctggccgatgccgagttcttcttcaataccgaccgtaaaaaacgtctggaagataacctgccgcgtctggaaaccgtgctgttccaacagcagctgggtaccctgcgcgataagaccgatcgtattcaggcgctggcgggctggattgccgaacaaattggcgctgacgttaaccatgcgacccgcgcgggcctgctgtccaagtgcgacctgatgaccaatatggtcttcgagttcaccgacacgcagggcgtgatggggatgcactacgcgcgccatgacggcgaagcggaagatgttgcggtcgcgctgaacgagcagtatcagccgcgttttgccggcgatgcgctgccgtctaacccggttgcctgcgcggtggctattgccgacaagatggacactctggcgggtatcttcggtatcggtcagcatccgaaaggcgataaagacccgtttgcgctgcgccgcgccgcgctgggcgtactgcgtatcatcgttgagaagaacctgaatcttgatttgcaaacgctgaccgaagaagcggtgcgtctgtatggtgagaaactgactaacgccaacgtcgttgatgacgtcatcgacttcatgctgggccgtttccgtgcctggtatcaggacgaaggctacggtgttgacactatccaggcggtactggcgcgtcgtccgacccgcccggcggatttcgatgcgcgcatgaaggctgtgtcgcacttccgtacgctggaagagtcctccgccctggcggcggcaaacaagcgcgtatccaacatcctggcgaaatccgacgagaccctgaacgatatcgttcatgcctcggtgctgaaagaagcggcggaaattaagctggccggtaatctggtggtgctgcgtgataaactgcagccttatttcgccgaaggccgttatcaggatgcgctaattgagctggctgcgctgcgcgagccggttgatgagttcttcgaaaatgtgatggttaacgctgaagacaaagatgtccgcatcaaccgtctgacgctgctgtccaaactgcgcgagctgttcctgcaggttgcggatatttcactgctgcagtaa

SEQ ID NO: 87622 - DNA, 1620 bp, Enterobacter aerogenes
atggctcattgtgcccacaccccctcttttgttttacatcaggtcacctgtcagttcgcgacgggacagacgctttttggcccgctgaatttatcgctggaaccgttgctttgcggccttgtcgggcgaaatggcgttggcaagacacgcctgttgcgtctgctggcgggcctcgattctccctcctgcgggcatatcgaacgatcggccaccgttgcctgggtggcgcagcagccgaccctcacggccgggacaaccgttgcctccctgctgggttatgcgccagtatttgacgccttgtcccgccttgaacaggggaaagggctggcaaatgacttcgaactgttggatggccgttgggatctgcccgatcgcctgagttcagcctttcgcgatgccgatctcccggcattctccgccgatcgtcccgctttttcgctcagcggcggcgaacgaatgaaggcgctgctgtgcggcgcattcgtttccggcgcggactttctgctgctggacgaacccacgaatcatctcgatcgtcagggccgggagtggctgtatcagcagctggaaatctggcggggcggggcattaatcgccagccacgaccgtgaattactggctctgatgtcgaggattattgagctaacgccggcggcgctgcgcagctacggcggtaattatgccgaatatcagcggcagcgcgaagcggagcaacaggccgcccgctcggcgctggagcatgccgcaatcgaacggcggcgcacccgggcgcggatgcaaaaggagcatgacgcggcccaacggcgctcggctcagacgctgcgtaccgtcgatacgctgaatatcgcctctttcgagcgtgtgaagtacaaaggggcggcaaaagagcgtccgggaacgctgcgccgccagcatcgtgagcagaacagtagtctgaatgccgccgtgcaccaggcgcgggagtgggtagaagaagataatccggtgatgttcacactgcctggcagtgaagtggctgccggcaagcaggtactggtgctggaatcgctgcagttggctcactcatcccccgcgccgctcgactggcgggtggatggcccgatgcgcatcgcgctaaagggaccaaacggctgtggcaaaacaacattattgaaaaccctgatggggctggagcaggcaaccgctggcgacgtccggctgtcggtgagtgcggcgtatctcgatcagcatctgacgcagctggatttatcattgtcggtgatggcgcaccttaacctgggcgataccccactggatgagggagtactgcgtagccgtctggcgcagctccagttgggagctgacaaggtcagccttccgctggcggcgttaagcggcggcgaacgcctgaaagcggcgcttgcctgcgtgctctggcggcgggactcaactcaattgctgctgctggatgagccaaccaatcacctcgatctggcgtcgacccaggcaattgaaagcgcgctggcgacgtttcccggcgcgatgctggtggtatcgcatgacgaggcatttttacagggtctgaagctgacccattgtctggagtggagggaaacgggctggcattttgccgccctctga

SEQ ID NO: 87623 - DNA, 213 bp, Enterobacter aerogenes
atgtccggtaaaatgactggtatcgtaaaatggttcaacgctgacaaaggcttcggcttcatcactcctgacgatggctctaaagacgtgttcgtacacttctctgctatccagaacgatggctacaaatccctggacgaaggtcagaaagtttccttcaccatcgaaagcggcgctaaaggcccggcagctggcaacgtaacttctctgtaa

SEQ ID NO: 87624 - DNA, 291 bp, Enterobacter aerogenes
atggaatataaagatcccgtatttgatttgttgagtaacctggaacagattgtttttaaagaccagccgcaaacggctacgaacgcccgtaccccaagcgtttttaatgaattcgaacggctgcgtaagggcacaggccttaagacagatgatttcgccaatgcaatgggcgtcagcgtcgcgatggttgaagagtgggaatcgcgacgggtaaaaccttcatccacggagctcaaattgatgcgcctgatgatggccaatccacagctctcaaggcagctaatcgattga

SEQ ID NO: 87625 - DNA, 1359 bp, Enterobacter aerogenes
atgaagaaaacaaccatcgatattcaggcttttatcaacgaacatccattcacgaagtaccaatggatgattctcgccttatgttttattaccgtcgcgatggacggatttgataccgcgattattggttttatcgcctcagacctggtacaggaatggggggttgagaaatccgcgttgggcccggtaatgagcgccgctctggtcgggctcgccgtcggcgcgctgacggccgggccgctcgccgatcgtattggccgcaagaaagtgctgattatgtcgatcctggtgttcggcggctttagtttgttaaccgcgtttgccagcagccttaaccaactgacattattgcgcttcctcaccggattgggcttaggcgcggcaatgccgaatgccgcgacgctaatgagcgaatatgctccggaacgccgccgcgcgctgatggtaaacctgatgttcgtcggcttcccaatggggtcgtcgctgggaggctttctgtcggcctggatgatcccgcattatggctggcaaagcgtgctggtgcttggcggcgtgatgccgctgctgctggccgtggcgttaatgttcctgctaccggaatccgcacgctatatggtcgtgaaacggcagccggcgcagcggatcgccgccatcctgaagcgtatcgcgccgttgccggatgcggttgaatttgagctacgtgaagcaggccaggtgaaggaaaagtcagccattggcgtgattttctccccgcgctacgccgtgggcaccgtgatgctgtgcctgacctattttatgggattgctgattttctatctgctgaccagttggctgccgctgcttatccgcgagaccggcgcctcgatgggccaggcttctatcatcaccgccctgttcccgctcggcggcgggattggcgtgctgatcctcggcgcgctaatggataagatcaaccctaacaaagtggttgccgtcggctggctgctcaccggcgtctttgtttgcctggtgggtttctcaaccagcaatctgctgttgatgggggtaatggtgtttatcgctggcagcattatgaacggcgcgcaatcatcaatgccggcgctggctgccgggttctatccaacccagggccgcgccaccggcgttgcctggatgctcggtatcggccgcttcggcgggatcctcggcgccttcagcggcgctttcctgatgcaggcacaattgtcgtttgagaccatcttcacgatgctggcgatcccggcgtttttatccgccatcgccctggtagtgaaatacaaactgagccagcgccaacctgccgttaagccaaatgacggtaaaaacctacagaaagcctaa

SEQ ID NO: 87626 - DNA, 711 bp, Enterobacter aerogenes
atggcgacaggaaagtcctgctctcgctggtttgcggccgttgcggccatattaatggtggttagcctgagtgggtgttttgataaagaaggcgatcagcgcaaagcgttcatcgacttcctgcagaatacggcgatgcgtagcggcgaacgtctgcctacgctgaccgccgatcagaaaaaacagttcggccccttcgtgtccgattatgcggtgatttacgcttattcacagcaggtcagccaggcgatggatgcgggtctgcgcccggtggttgatagcgttaacgccattcgcgtggcgcaggattataccactcagcgtgagccgctgcggcaggctaacggcgcgctgggcgtgctgagccagcagctggaaaacgctaaaatgcaggcggatgccgcgcatggcgcgctgaagcaggctgatgatcttaagccggtttatgaccaggtgtttaataaagtcgtgacggcgccggcgaatgcgctgcagccgctgattccggccgcgcaggtctttactcagcaactggtccaggtgggtgattttgtcgctcagcaggggacgcaggtgagcttcgtggctaacggtattcagttcccgacgtctcagcaggcaagccagtacaatgcgctgattgctccgctggccgctcagcatcaggcctttaatcaggcctggacggcggcggttaacgccacgcgttaa

SEQ ID NO: 87627 - DNA, 972 bp, Enterobacter aerogenes
atgaagccgtctgtcattctctataaaacgctccccgacgatctgttacaccgtctggaggaacacttttccgtcacccaggtgaaaaacctgcgtccggaaaccgtttcacagcacgcggaggccttcgcccaggcggaaggtttactgggttcgagtgaaaaggttgacgccgcgttactggagaaaatgccgaagctgcgtgcgacctctaccgtgtctgtcggctacgacaattttgatgtcgatgcgttgaacgcgcgcaagattttgctgatgcatacgccgaccgtgctaaccgaaaccgtcgccgatacggtgatggcgctggtgctgagcaccgcgcgtcgggtggttgaggtcgctgaacgcgtgaaagcgggcgaatggaccaggagcatcgggccggactggttcggctgcgatgtacaccataaaaccctgggcatcgtcggcatgggccgcattggcatggcgctggcgcagcgcgcccacttcggtttcggcatgccgattctgtataacgctcgccggcaacatccgcaggcggaagagcgcttcaatgcgcgctactgcgatctcgataccctgttacaggaagcggatttcgtctgcctcattctgccgctgagcgaagagacccaccacctgttcggcgaagcgcagtttgccaaaatgaaatcttccgccatcttcattaacgccgggcgcggtccggtcgttgacgagcaggcgctgattgcggcgctgcaggccggtgagatccacgctgccggtcttgacgtctttgaacatgaaccactggcaaaagattcgccgctgctgacgctgccgaacgtggtcgcgctgccgcacattggttccgccacccacgagacccgctataacatggcggcctgcgcggtagataacctgattgacgcattgaacggcaaggttgagaagaactgcgtgaacccgcaggtgaagtaa

SEQ ID NO: 87628 - DNA, 1281 bp, Enterobacter aerogenes
atgaacagttcaacaaatgcagcaaaacgttggtggtacatcatgcctatcgtgtttatcacgtatagcctggcgtaccttgaccgcgccaacttcagctttgcatcggccgcgggcattaccgaagaccttggcatcaccaaaggcatctcatcgctgcttggcgcccttttctttcttggatacttcttcttccagatcccaggagcgatttacgctgaacgccgcagcgtgcgtaaacttatctttatctgccttatcctgtggggcggctgcgcctcgctaaccggcgtggtgcataacatcccggcactggcggccatccgctttatccttggcgtggtggaagcggcggtcatgccggcgatgctgatttacatcagtaactggttcaccaaatcagagcgttcacgcgctaacaccttcctgatcctcggcaacccggtcaccgtactgtggatgtcggtcgtatcgggttatctgatccaggcctttggctggcgtgaaatgtttatcattgaagggatccctgctgtgatttgggccttctgctggtgggtactggtgaaagacaaaccgtcgcaggtgaactggctggcggaaagtgaaaaagcggcgctgcaggaacagctggagcgcgaacagcagggtatcaaagcggtacgtaactatggcgaagccttccgttcacgcaacgtggtgctgctgtgtatgcaatatttcgcctggagcatcggcgtgtacggtttcgtactgtggctgccgtcaatcatccgcagcggcggcgaaaacatggggatggtcgaagtaggctggctctcttcagtaccctatctggcggcaacgattgcgatgattgccgtctcctgggcttccgataagatgcagaaccgtaagctgtttgtctggccgctgctgctcattggcgggctggcgttcatcggctcctgggccgtcggcgccaaccatttctgggtctcttataccctgctggtgatcgctggcgcggccatgtatgccccgtatggcccgttctttgcgattatcccggagatgctgccacgcaacgtcgccggcggcgcgatggcgctgatcaacagtatgggagcgctgggttctttctttggttcgtggttcgtcggctatctcaacggcgcaaccggcagcccgtccgcctcgtacattttcatgggtgtggcgcttttcgcctcggtatggcttactttaattgttaagcctgctaagaatcaaaaacttccgcttggcgctcatcacgcctga

SEQ ID NO: 87629 - DNA, 936 bp, Enterobacter aerogenes
atggaaaacttagatgtcattaccattggcgaagccatggcgatgtttgtcgccaccgaaaccggcgaactggcggaggttgaacgctttatcaaacgcgtcgccggcgctgaactgaacgtggcgaccggcctggcgcgcctggggctgaaggtgggctgggtgagccgcgtcggcaacgatagctttggccgcttcgtgctgaattcgctggccaaagaaggcatcgacgcgcgcggcgtggccattgacgagcgctacgctaccggcttccagatgaaatctaaagtcgaaaatggaaccgatcccatcgtggaatatttccgtaaaggatcggctgccagccatctgtcgacggaagatttccgcgctgattacttcaccagcgcccgccatttgcacttaagcggcgtcgccgccgcgctgtccgacagttcgtatgcattgctggaacatgcggccaacgtgatgaaagccgaagggaaaaccctctcttttgacccaaacctgcgcccggtactgtggaaaagcgaagccgagatggtggagaaactgaaccgcctcgccttccaggctgactgggttttgccaggcttaaaagagggcgtgattcttaccggccagcagacgccggaaggtatcgctgatttctatctgtcgcgcggcgttaaggcggtggtgattaaaaccggctgcgacggcgcatggttcaagaccgccaacggcgaacagggcgccatcgcagccattaaagtcgacaacgtggtggacaccgtcggcgcgggtgatggctttgccgttggcgtaatcagcgcgctgctggaaggcaaaacgctgacgcaagccgtgaaccgcggtaacaaaattggctcgctggccattcaggtacagggcgatagcgaagggctgcccacccgcgaagcgctgggcgaataa

SEQ ID NO: 87630 - DNA, 750 bp, Enterobacter aerogenes
atggccagaaaaatcattgtcgtcaccgccgcttatggcaacgaccacgttaaagcgcttggcgggcagtccgccgtattaccctttatcgccggttccggcgccgatggcgtggaaattcgccgcgagttgttcagcgcggcggaactgaagcagttgccgacgctggcggccgacattgaaaaacaggggctgctggcctgctactccgcgccacaagcgctgttcaccgacaacggcgagctcaatccccatctcccgtcgttacttgaagaagcgcaaaccctcaacgccctgtggctgaagctctccctcggtcatttcatccataaccaacagctggagacgctgcgcgacattctgagcgccagcggcatggcgctggtggtggaaaatgaccagaccgattgcggccaactggcgccaatgcagcgcttcaaagccgcctgccgggtccatcagatgccggtgacgctgactttcgacatgggaaactggctgtgggtcggcgattcgccggaagaagccgcgcgccatctcgcccccgctgtcagctatattcatgtgaaggcggcggagcctcatcatgagaagtatcgcgccgtcccaccggaccaggcggacgctcgctggctggcgctgctcgataacctgcccgccgacgcgccgcgcggtattgaattcccgctggtcggcgacgacctgaccgccgtcacccgccattacgttgatctgttacgcgaggattaa

SEQ ID NO: 87631 - DNA, 1017 bp, Enterobacter aerogenes
atggcgaaagcggcgcgagcaaccatcagcgacgtggcgaaagccgcgaagaccggtaaaaccagtatttcacgctatctcaacggcgaaaagcatctgttatccgacgatctgttggcgcggattgaaaaagcgattgccgagctcaactaccgtcccagcctgatggcccgtggtctcaaacatggccgtacccgcctgattggcctgatcatcgccgatatcaccaacccttactccgtgaacgtgttaagcgggattgaagccgcctgccgcgaaaaaggcttcaccctgctggtgtgtaataccaacaacgaggtcgatcaggagctgcattaccttgacctgctgcgtagctatcaggttgaagggattgtggttaatgcagtcggcatgcgcgaagaaggcctcaaccgcctgcagcaatcctcgctaccgatggtgcttatcgaccgtaaaatccccgatttcgcctgtgatgtcgtggggctggataacactcaggccgccaccaccgccaccgaacatctggtggaaaagggttttgaagcgctgttgtttttaagcgagccaatcggctccgtaaacacccgccgcgagcgcctggacgcctttcgcgcgaccctacagcgctatgctggcgtggtggcggaaaacgccgaggtgccgctcaacgacggcgccatgatggataacgtcctgcgccagttccacgcccgccaccgcggaatgcgcaaagcggtgatttccgccaatggcgccctgacgttacaggtcgcccgttcactgaagcgcgttgacctcatctggggcagcgatattggcctgctgggcttcgatgagctggaatgggcggagctggcgggcgtcggtattaccaccctcaaacagccaacctggcagattggctatgcttcggtcgaacaggtcgtcaggcgtatcgaaggcggcagcgaccccatctgcgagcgggtcttctccggcgagcttattgtccggggatcaacgtctcgttaa

SEQ ID NO: 87632 - DNA, 663 bp, Enterobacter aerogenes
atgaaaaaacgcgtactcatgattgctgctatcgttagcggcacactggctatttctggttgtactaccaacccttataccggcgaacgcgaagcgggaaaatccggcatcggcgcgggtatcggctccttagtaggcgcaggcgtcggcgcgctctcctcttccaaacatgaccgcggcaaaggcgcgctgattggcgctgcggcaggcgcggcgctaggcggcggcatcggttactacatggacgtgcaggaagcgaaactgcgcgaaaaaatgcagggaaccggagtcagcgtgacgcgaaatggcgataacatcgtgctcaacatgccgaataacgtcacctttgacagcagcagcgccaacctgaaacctgcaggcgccaacaccctgaccggcgtcgcgatggtactgaaagagtacgagaaaaccgccgttaacgtcgtcggctacaccgacagcaccggcagcaacgatctcaacatgcgtctgtcgcaacagcgtgccgacagcgtcgccagcgcgctcatcactcagggcgtagcggccaaccgtattcgcactaccggcatgggcccggcgaacccgatcgccagcaacagcacggcggaaggcaaagcgcagaaccgtcgcgtggaaattaccctcagcccgctgcagtaa

SEQ ID NO: 87633 - DNA, 2331 bp, Enterobacter aerogenes
ttgccaacttcatctgcaactaaaaccatcttaaccgcggcccactgggggccaatgctggtggagacggatggtgaaaatgtgatttcgtcccgcggcgcgctggacacccccttcgccaactcgctgcaaacagcggtgcgcgaacaggtgcacagtaaaactcgcgttcgctatccgatggtgcgaaaaggctatctcgcttcgccgcaacagccgcagggcgtacgcggccaggatgaattcgtgcgggtaagctgggagcaggcacttgatctgattgatgcccagcatcggcggatccgcgaaagctacggcccgcagtcgattttcgccggttcctatggctggcgttctaacggcgtgttgcataaggcggcaaccctgctgcagcgctatatgagtcttgccgggggctataccggacacctcggcgattattcaaccggcgcggcgcaggcgatcatgccttatgtggttggcggtaatgaagtttatcaacagcaaaccagctggccgcttatcctggagcacagcgaggtggtggtgttgtggagcgctaatccgctgaatacgctgaaaatcgcctggaacgcctcggatgaacaggggatcccctggtttgatcgcctgcgccagagcggcaagcggctgatctgtatcgatactatgcgatcggaaagcgttgatttctttggcgaatcgatggaatggatcgcgccgcatatgggcactgacgttgcgttgatgctggggatcgcccatacgctggtagagcatggctggcaggacgatgaattcctcgcccgctgtaccagcggttatgacattttcgcccgctatttgagtggtgaaagcgatggcgtcgccaaaaccgccgaatgggcggcggcaatctgcggcgtagcggcggaaaaaatccgcgaactggcgaaacttttccacgaaaacaccaccatgctgatgtccggctggggcatgcagcgccagcagtttggcgagcaaaaacactggatgctggtgacgctggcggcgatgctggggcagattggcacgcccggcggcggttttggtctttcttaccactttgccaacggcggcaaccccacgcgccgcgccgcggtgctggcctccatgcagggcagcgtagcgggcggcgtagacgcggtggaaaaaatcccggttgcccgcatcgttgaggccctggaaaacccaggcgcaagctatcagcacaacgggatgacgcggcgctttcccgacatccgctttatctggtgggcgggcggcgccaactttacccatcatcaggataccaaccgcctgattcaggcctggcagaagccggagctgattgtgatttccgaatgcttctggaccgccgccgcgcgccatgctgatatcgtcttaccggcgaccacttcgtttgagcgtaacgatctgaccatgaccggcgactacagcaatcagcatctggtgccgatgaagcgggtggtcgcgccgcgcgatgaagcgcgcgacgatttcgatgtttttgccgatctgagcgaacgctgggaggcgggcggccgcgaacgcttcaccgaaggaaaaaacgatttgcaatggctggagaccttctaccagattgccgcccagcgcggggcgcagcagcaggtgacgctgccgccgtttgccgaattctggcaagcgaaccagctaattgaaatgccggaaaacccggataacgcccgtttctcccgcttcgcggcatttcgcgcagacccgcaggctaacccgttaaaaaccgccagcggaaaaattgaaattcactcgccgaccattgccgggtttggctatgccgattgtccgccgcacccgatgtggctcgaacctgacgagtggcacggcaacgccgaggtgggtcagctgcagatactttccgcccatccggcgcaccgcctgcatagccagttgaaccagacttcgctgcgtgaacgttatgccgtcgccgggcgcgaaccgctgactatccatccgctggacgcccaggcgcgcaatatcgccgacggcgatctggtgcgggtgtggaattcgcgcggtcaggtactggctggcgcggtggtcacggaaggcattcgtccgggggtgatttgcctgcatgaaggcgcgtggccggatatcgaccccgatgccggcatatgcaaaaacggcgcggtgaacgtgctgacgaaagatattccgacctcgcgtctgggcaatggttgcgccgggaatacggcgctggcatggctggaaaaatacgatggacccgcgctggcgcttagcgcatttgatccgccggccaatgcataa

SEQ ID NO: 87634 - DNA, 441 bp, Enterobacter aerogenes
atgatccaaaaatgggatgccacggagaccggcccgctactcgagttatggctggaaagcacgatttacgcgcatccgttcattgctgaaagctactggcgggaaagcctggaagttgtgcgcgatgtctatcttcccgccgccgccacctgggtgtggcaggagaatgacgcactgaaagggtttatcagcgtgatggattcgcgcttcgtcggggcgcttttcgtcgccccgcaagcgatccgccacggtatcggccgcgcgctgcttgatgaggtcaagcagcactacgactggttaagcctggaggtctatcagaaaaacgtgcgggcggtaaatttctaccacgcgcaaggtttccgtatagaagactgcgcatggcaggacgatacccagcacccaacctggattatgcattggccggcggatcaaatgcgctaa

SEQ ID NO: 87635 - DNA, 564 bp, Enterobacter aerogenes
atgcaacgttgcggatgggtaagccaggatcctctttatatccagtatcacgataaagaatggggagtcgccgagagaacaccgcaaaagctgtttgaaatgatctgcctcgaaggccaacaggcggggctctcgtggataactgttctgaaaaaacgtgaaaactatcgtcaggcctttcaccagtttgacccggtgcgcgtagcagccatggatgaagcggacgtcgagcgcctgctacagaatgcgggcattatccgccatcggggaaagatccaggccatcatcggcaatgcgcgggcgtttctcgccatggaagccaacggtgaagcattcagcgatttcgtctggtcgtttgtcgataatcagccgcaaattacccatgcggcgacgctcgccgaaattcccaccaccacaccagcctccgatgcgctatctaaagcgttgaaaaagcgcggctttaaattcgtcggctccactatctgttattcatttatgcaggcctgcgggttagtcaacgatcatgtgaccggctgctgttgctaccccgggagaccagcatga

SEQ ID NO: 87636 - DNA, 648 bp, Enterobacter aerogenes
atgataataaagaaatgcaatggcctccggggtgggttgatcccggcgtgcatcactatctggatgtcgtgtgtttcaggcgctaatgcctggcaacaggaatatatcgctaacgatacaaaaagtaatacgtccgaacgctatacatgggatagcgatcaccaaccgcgttatgaagatattctcgccgagcgtatgagagcgtcagaagcgcccgcagggctggcgttaaatcaggcgctgtcgccgcccgatttaggtcacggcatgagcgtgggatggaactattcactggccagcggcgtgacctccgggccggttgccagcttgcgtagcgatctcaatccgccgccagcgacgcgtcgcgcgggcgaaggtatttacgtcaacacgctcggctggcgtatggattatcagcagctgtggggcgtgcatccatgggcgcaggtaagctataaccagtctatttctgtcgataacaatgcgtcgattagccgcggaaaagacggtagctggggcgacgtcacgttgggcgccgatatgccgctgggttcgcatctggcggcatgggccacgctttcgcaggtagataatgtgccatcgggggaaaatacgctgtatctgatgggggtcagcgccaatttctaa

SEQ ID NO: 87637 - DNA, 1206 bp, Enterobacter aerogenes
atgaacgctgcaaacactcaatatactcgttggctcacgctgattggcacgatcattacgcaattcgcactgggatcggtttatacatggagtttgtttaatagttctctggccaacaaactggacgagccagtaagccaggtggcattttccttcggcctgttaagtctcgggctggcattatcctcttccgttgccggtaaattgcaggaacgctttggcgtgaaacgcgtcaccatggcctccggcattctgctgggcgccggctttttcctcactgcccatgccaacagcctgatgatgctgtggctgagcgccggcctgctggtcggtctggcggacggcgcgggctatttactgacgttatctaactgcgtgaagtggttcccggagcgtaaaggtctgatttccgccttctcgattggcgcttatggccttggcagcctcggttttaaatttatcgatagccacctgttggcgacggtcgggctggaaaaaacctttgttatctggggcgctatcgtgctggtgatgattgtctttggcgcgatgctgatgaaagatgcgcctaatcatcccgcgacgaccaccgcgaacggcgttgtcgaaaatgatttcaccctcgctgaatccatgcgtaaaccacagtactggatgctggcggtgatgttcctgacggcctgcatgagcggcctgtatgtgattggcgtcgccaaagatatcgcgcagggcatggtacatctcgacgtggcgacggcggcgaatgcggttaccgtgatttctatcgccaacctgagcggccgtctggttctgggcatcctgtctgataagatctcccgtatccgcgtgattactatcggtcaggtggtctctttggtcggtatggcggccctgctgttcgccccgctgaatgcaatgaccttctttgcggcgattgcctgcgtggcctttaacttcggcggcaccattaccgtcttcccgtcgctggtgagcgaattctttggcctcaataatctggcgaaaaactacggcgtgatttacctcggcttcggtattggtagtatctgcggttcgctgattgcctccgtgttcggcggcttctatgtcaccttctgcgtcatcttcgctctgctgattttgtcgctggcgctttccactaccattcgccagccgaaaagcgaaatttatcatcaagcacacgcctga

SEQ ID NO: 87638 - DNA, 1692 bp, Enterobacter aerogenes
atgaaatacattaaaacgatgtcgcagcagaagctgagtttttggcttgcgctgtacatcggctggtttatgaacgccgcggtgtttttccgccgcttcgatggctacgctcaagagtttaccgtctggaaagggttgtccgggttggtggaactggtagcgacggttctggttactttcttccttctgcgcctgctgtcgttattcggccgccgggtatggcgcatattagcgacgctggtggtgctgttttccgcggcagcaagctattacatgaccttcctcaacgtggtcattggctacggtattatcgcttcggtgatgaccaccgatattgacctgtcgaaagaggtcatcggctggcatctgatcctgtggctgtccgtggttagcgctttaccgctgctgcttatctggagcaaccgctgtcgtaagacgctgctgcaacaggttaaaacgccggggcagcgggcgaaaaatatcctgatagtcgtgctggccgggctgatggtctgggggccaattcgcctgctggaagtccgtcagaagaatgttgagcgcaattcagaagtcgatatgccaagctacggcggcgtgattgccaactcgtatctgccttctaactggctgtcggcgctcgggctgtacgcgtgggcgcaggtggatgaatcgtctgataataagtcgctgattaatccagcgaaaaaatttacctatgtggcgccacaggatcttgatgatacgtacgtggtgtttattatcggcgagaccacccgctgggatcatatgggtatactcggctataaccgtaataccacgccgaagctggcgcaggagaagaatcttgtcgccttccgcggcacctcttgcgataccgccaccaaactgtcgttgcgctgtatgttcgtgcgtgagggcggagcggatgataatccgcagcggacgctgaaagagcagaatgtgtttgccgtactgcatcaactgggcttcgccggtgacctgtacgcgatgcagagcgagatgtggttctacagcaatacgatggccaacaatatcgcctatcgtgagcagatcggcgccgagccgcgcaaccgtggcaagaacgtggatgatatgctgctggtcgatgaaatgaagcgcggcatggagcaaaacccgagcggcaagcgtttgatcattctccataccaaggggtcgcattttaactatacccagcgatacccacgcagctttgcgcagtggaaaccggaatgtgtgggcgtggacagcaaatgttcgaaggccgagttgattaactcctacgataacagcgtcacttatgtggatcactttatcgtcagcgtgctggaccaactgcgggataaaaaggctatcgtgttctacgccgccgatcacggcgagtcgattaatgaacacgaacatctgcatggcacgccgcgtatgatggcgccgccggagcagttccgcgtgccgatgatggtctggatgtcggataagtatctggcgaatccggatcacgccgcctcctttgcgcgcctcaagcagcaggcggcaatgaaggttccgcaccgtcacgttgagctgtatgacaccattatgggttgtcttggttatacctcgccggatggtggaattaatgagaacaacaactggtgtcgcatgccggcagcggcgaaagcggcgaaggaataa

SEQ ID NO: 87639 - DNA, 1608 bp, Enterobacter aerogenes
atgagtatttccttgaaaaagtcagggatgctgaagcttggtctgagcctggtcgccatgaccgttgccgcaagcgtacaagctaaaaccctggtttattgttctgaaggttcgccggaaggctttaacccacagctattcacctcgggtaccacctatgacgccagttcggtgcctatttataaccgtctggttgaattcaaaaccggtacgactgaagttattcctggtcttgctgagaagtgggatgtcagcgaggacggtaaaacctataccttccacctgcgtaaaggtgtgaagtggcaggataataaagactttaaaccaacgcgcgagctgaatgccgacgacgtggtgttctccttcgaccgccagaaaaatgacaaaaatccgtaccataaagtctctggcggcagctatgagtacttcgaagggatgggcctgcaggacctgattagcgaagtgaagaaagtggacgataataccgtccagttcgtgctgacgcgcccggaagcgccgttcctcgctgacctggcgatggactttgcttctatcctgtcgaaagagtatgccgacaacatgctgaaagccggcacgccggaaaaagtagaccttaacccaatcggcaccggcccattccagctgctgcagtaccaaaaagactcgcgcattctgtataaagccttcccgggctactggggcaccaagccgcagatcgatcgtctggtcttctccatcactccggacgcttccgtacgctacgccaagctgcagaaaaacgagtgccaggtgatgccgtatccgaacccggctgacatcgcgcgcatgaaggaagataaaaacatcaatctgctggaacagccgggtctgaacgtgggttatctctccttcaataccgagaaaaaaccgctggataacgtcaaagttcgccaggcgctgacctacgcggtgaacaaagaagcgatcatcaaagccgtttatcagggcgccggccagtcggcgaagaacctgatcccgccgaccatgtggggctataacgatgacgttaaagactacacctacgatcctgagaaggcgaagcagctgctgaaagaagcgggcatggaaaaaggcttcaccatcgacctgtgggcaatgccggtacagcgtccgtataacccgaacgcgcgccgtatggctgaaatgatccaggccgactgggcgaaagtcggcgtacaggccaagatagtcacctacgagtggggcgagtatctgaaacgcgcgaaagcgggcgagcatcagaccgtgatgatgggctggaccggcgacaacggggatccggataacttctttgcgaccctgttcagctgcgctgcggcgaaagacggctctaactactctcgctggtgctacaagccgtttgaagacctcattcaaccggcacgcgccaccgacgaccacaacaagcgtattgaactgtacaaacaggctcaggtagtgatgcatgaccaggctccggcgctgatcattgctcactccaccgtttacgagccagtgcgtaaagaagtcaaaggctatgtggttgatccgcttggcaaacaccacttcgataacgtctctgtcgaataa

SEQ ID NO: 87640 - DNA, 1020 bp, Enterobacter aerogenes
atgttgcagtttattctccgacgtttgggactcgtcatcccgacatttatcggtattacccttctcacctttgctttcgttcatatgatccccggcgatccggtgatgattatggcgggcgaacgtggtatttcccccgaacgtcacgcgcagttgctggccgaaatgggccttgataagccgctgtggcagcaatatgcccattatatttggggcgtactgcacggtgatttagggatctcgctgaaaagccgaattcccgtgtggcaagagtttgtgccacgcttcaaggccaccctcgaactgggcgtctgcgcgatgattttcgccgtcgccgtcggtattccggtgggcgtgctggctgcggtaaaacgcggctccatctttgaccacactgccgtgggtctggcgctgaccggctactcgatgcctatcttctggtggggcatgatgctgattatgctggtttcggtacagctgaatctgacgccggtctccgggcgtatcagcgatacggtattccttgacgataccctgccgctgaccggttttatgctgattgacaccgccatctggggcgagcagggcgactttattgatgccttaatgcatatgatcctgcccgccatcgtgctgggtacgattccgctggcggtgatcgtgcgtatgacccgctcatcgatgctggaagtgcttggcgaggattacatccgtaccgcacgcgctaaggggttgacccgcatgcgggtgatcgtcatccatgcgctacgcaacgcgatgctgccggtggtgacggtgattggtctccaggtgggcacgctgctggcgggcgccattctgaccgaaaccattttttcgtggccaggtttaggccgctggcttatcgatgcgctacagcgccgcgattatccagttgtgcagggcggggttctgctggtggcgacgatgattattctcgtcaacctgctggtcgacctgctgtatggcgtggtgaacccgcgtatccggcataagaagtaa

SEQ ID NO: 87641 - DNA, 903 bp, Enterobacter aerogenes
atgtcacaaattacagaaaataaagttgtcgccgcaccggtgccaatgaccccgctgcaggagttctggcactatttcaaacgcaataagggtgccgtcgtcgggttggtgtacgtggcggtgatgattatcatcgcggtattcgccaactttctcgccccttataacccggcggatcagttccgtgattcgctgctggcgccgccgttctggcaggatggcggcagcctggcgcatctgcttggcaccgatgatgtgggtcgcgatattctctcacgcctgatgtacggcgcgcgcctgtcgctgctggtgggctgtctggtggtggtgctgtcgctgatcctcggcgtggtgctggggctggttgcaggctatttcggcggggtggtggactccatcatcatgcgcgtggtcgatatcatgctggcgctgccgagcctgctgctggcgttggtgctggtggctatcttcggaccatcaatcgtcaatgcttcgctggcgctcaccttcgttgccctaccgcactatgtgcgtctgacgcgcgcggcggtgctggtggaagtacaccgcgattacgttaccgcttcccgcgtggcgggcgccggcgcgatgcgccagatgttcgttaatattctccctaactgtcttgcgccgctgattgttcaggcgtcgctgggcttctctaacgccattctcgacatggcagcgctggggttcctcggtatgggcgcgcagccgccgacgcctgagtggggcactatgctttccgacgtattgcagttcgcgcaaagcgcctggtgggtcgtgaccttcccgggtgtggcgatcctgctgacggtgctggcatttaacctgatgggtgacggtctgcgtgacgcgctcgatcccaaactgaagcagtaa

SEQ ID NO: 87642 - DNA, 984 bp, Enterobacter aerogenes
atggcgttattaaatgtagataagttatcggtgcatttcggcgatgagaatgcgccgttccgcgccgtagaccgcatcagctatagcgtgaagcagggcgaagtggtcggcatcgtgggggaatcgggttccggtaagtcggtgagctcgctggcgattatggggctgattgattaccccggccgggtgatggcggacaaactggaatttaacggccgcgatttgcagcgaatttcggaaaaagagcggcgccagctggtgggggcggaagtggcgatgatcttccaggatccgatgaccagcctcaacccgtgctttaccgtcggctaccagattatggaagcgattaaggtccatcagggcggcaataagcaaacccgccgccagcgggcgatcgacctgctgaacctggtgggtattcctgacccggcgtcgcggctggacgtttatccgcaccagctttccggcgggatgagccagcgcgtgatgatcgcgatggctatcgcctgccggccaaaattgctgattgccgatgaaccgaccaccgcgctggatgtgaccattcaggcgcagattatcgaactgctgctggagttgcagcagcaagagaatatggcgctggtgctgattacccacgatctggcgctggtggcggaagccgcgcataaaattatcgtcatgtacgcgggtcaggtggtggagaccggtgatgcgaaagatatcttccgcgcgccgcgtcatccttacacccaggcgttgctgcgggcgctgccggagtttgcccaggataaggcgcgtctggcctcgctcccgggtgtggtgccgggtaaatacgatcgtcctaacggctgcctgctgaacccgcgctgcccctacgcaacggataaatgccggagcgaagagcccgcgcttgcggatctcgacggcggccgtcagtcaaaatgccactacccactcgatgatgccgggaggcctggattatga

SEQ ID NO: 87643 - DNA, 1014 bp, Enterobacter aerogenes
atgagtacgcaaaaggccgccacgcagcaaccgctgttgcaggccattgatctgaaaaaacactatccggtgaagaagggtctgttcgctccggaacggctggtgaaagcgctggatggcgtctcctttactcttgaacgcggtaaaacgctggcggtagtgggggagtcgggctgcggcaaatcgacgctgggtcgtttactgacgatgattgaaattcccaccggcggcgagttgtattatcagggacaggatctgctcaagcacgacccgcaggcgcaaaagctgcggcggcaaaaaatccagattgtgttccagaacccgtatggttcgctgaacccgcgtaaaaaagtggggcagattctggaagagccgctgttgattaacagcagcctgagcaaagagcagcggcgtgaaaaggcgctggcgatgatggcgaaggtgggcctgaaaacggaacattacgatcgctacccgcatatgttctccggcggtcagcgccagcgtatcgccattgcccgcgggctgatgctggatccggacgtggtgattgccgatgaaccggtctccgcgctggatgtttcggttcgtgcccaggtgctgaacctgatgatggatttgcagcaggatttagggctgtcctacgtgtttatctcccacgacctgtcggtcgtcgagcacatcgctgatgaagtcatggtgatgtatcttggccgctgcgtagagaagggtaccaaggatcagatctttaataacccgcgtcatccgtatactcaggcgctgctgtcggcgacgccgcgactgaacccggacgatcgtcgcgagcgcatcaagctgaccggcgaactgccgagcccgctgaatccgccgccgggctgcgcctttaatgcgcgttgccgccgacgctttggcccatgcacccagcttcaaccgcagcttaaggattacggcggccaactggtggcctgctttgccgttgatcaggatgagaatccggagaaagcgcgtgcgtga

SEQ ID NO: 87644 - DNA, 1680 bp, Enterobacter aerogenes
atgaccaaagcaaaaactaccgctacgccgcttccgctatggcagtactggcgcggcctgtctggctggaacttctattttctggtgaagtttgccctgctgtgggcggggtacctgaacttccatccgatgcttaacctggtgttcctcgcctttctgctggtgccgatcccccgagaaaaactgcaccgggtacgccactggatagcgatcccgctcggctttgccctgttctggcatgatacctggctaccgggtccggaaagcatcatgagccagggttcgcaaattgccggtttcagcgccgattacatctgggatctgatcacccgcttcattaactggaatatggtcggcgccttctttgtgctgctggtgctgtggctattcatcagccagtggctacgcgttaccgtatttgtttcggctatcatggtctggctggttatcagcccgctgctgccctcctttaccttatggcctgccggtcagccgaccacggcagcggccacgccggcggcaacaaccggtggaaccacaaccgccgcggcatccaccagcgctgccgccagcggcgatatcccgccgcagaccgaaccgccaacctcggctaacctcagcaactggctgaaaactttctatgctgctgaacagaaaagaaaaacgtcattccccgctcagcttcctgccgatgcgcagccgtttgatctgctggtgatcaacatctgttctctgtcatggtcggacatcgaggctgccgggctgatggatcacccgctgtggaaacatttcgatatcgtcttcaaaaactttaactccgcgacctcctacagcggcccggctgcggttcgcctgctgcgcgccagctgcggccagctatctcatagcaacctgtatcagccatcgggcagcgagtgctatctgttcgaaaatctggccaaactgggctttacccaacagctgatgctggggcataacggcgtattcggcgacttcctcaaagaggttcgctcgctcggcggcatgcaaagtccattgatggatcagagcggtttgccggttatcctacaaggcttcgacggatcgccggtttacgacgaccaggcgacgctcgatcgctggctacagtctaccgagaagctcaacacgccgcgtaccgcgaccttctacaacacgctgccgctgcacgatggcaaccattatcccggccaaagcaaaacggccgactataaggctcgcgcgcagaaattctttgatgagctggacgccttcttcaccgaactggaaaaatcggggcgtaaagtgatggtggtggtagttccggaacacggtggcgcgctgaagggagataagatgcaggtttccgggctgcgcgatatcccaagcccatcgattaccaacgtccctgcggcggtgaaattcttcggcatgaaggcgccacatcagggcgccgcggtggaaataacgcagccttccagctacctcgcggtttctgaactggtggtgcgcgcgctggacggcaagatgtttaccgaagataacgtcaactggcagcaatacaccgctaacctgccgcagaccgcggcggtatcggaaaactccaacgccattgttattcagtatcagggcaaaccttacgtgcagctcaacggcggcagttgggtgccatatccgcagtaa

SEQ ID NO: 87645 - DNA, 198 bp, Enterobacter aerogenes
atgatgtctatcgccgatatcattcagctgatcgtattgtgcgccctgctgtttttcccgctgggatatctaacgcgccattatcagcgccgtattcgcacgactttgcgtttgatgttctttaaaccccgttatgtgaaaccagccggcgtgctgcgccgggataatgcgaccaggcagggcaaactgaaaaaatga

SEQ ID NO: 87646 - DNA, 1557 bp, Enterobacter aerogenes
gtggatattgtatatacgttgggtatttcatcgttatgggacgaagtatgccatatgcccgttggcggggtgtggtggcttaatgtcgaccgctatgccgacgccgtcagcctgatgaatcaaacgctggaaagccaggcgcaggacagcaaagtcgccgccatagtgatgggaaaaaaccctaaagaagtcatgtcattaaaaaaagatcgcggccctaataaaatcgcattattcaccatgcccgatcgcccggaaggcctgaaggagttgcaccgcgacctactttgttcgatggaacctggcaattatttatttattctgctatgtacagaaaattcctggcaaaatataaaaacagaagaattactccgttgggtagaaaaatcgaatcgatgggccaaataccataactgctctcttatgatacttaattctgctaacgataccgacaaacaactttccccgttattacgccagtatcgagccctttccgggctggcgagcattcgttatcagggtgatagccatctatttgatatcgcatggtggggcagtgagaaaggtattagcgcgcagcaacagttggttattttacacgatgatgagggctggcgactggcgcaaaacgaagaagcggtggtacagccgcgcagcgacgaaaaaatcgtcctcagtaatttgcgcgtgctggaaggggcccccgcgctttccgaatactggacgctgttcgaaaccaatgatgccgtctttgaagccggtcgtaccgcacaagcggccaccttgctattttccatcacccagaacgaacaaatagagcagctcggccgctatatccataccctgcgtcgccagcgcggcagcgccctaaaaatcgtggtacgtgaacaaacgccgagcctgcgcgccactgatgaacgcttgctgctaagcagcggcgccaacatggtgatcccctgcagcgccgggctttcacgctgcctgacgctcattgaaagcgtgcaaaagcagaaatttactcgtcacgttccggaagacttcaacacgttgttgacctggagccggccacttaaacttcgcggctatcaaaagtgggacgccttctgtgaagcagtcggtaatatcatggccaacacgctgctgccgccggatagcaaaggggtgatggtggcgttacgccctgcgccggggctacgcgttgaacaggcattaaccctgtgtaaacctaaccgcatgggcgatatcgtgacgatcggcaataatcgattagtgctgttcttatcgttttgccgggtaaacgacctcgacaccgcattaaaccatatcttcccattaccgaccggagacattttctctaaccgtatgatttggtttgaagacaagcaaatttcagcggaaatcctgttgatgcgaggcctctccccggacaactggaacacgccgctgccaattaccataggcaaaaacgaagcccttaacgttaagcacgatgggcgccagtggcggcgaatcccggaaccctggcggctctccaccgacggagaaccgcggtcatga

SEQ ID NO: 87647 - DNA, 189 bp, Enterobacter aerogenes
atgccggaaaaagaccctgcggtacctggcgatgcgacgctgggatataccttccaaaatgatttcctggcattaagccgggcattttccctgccggatattgattaccacgatatttcccgacgcgaacagctcgccgcggcgttgcaacgctggccgctgttggccgaattagcagagaaaaagtaa

SEQ ID NO: 87648 - DNA, 738 bp, Enterobacter aerogenes
atggcgattctgggattacaaggcatacgcggcggcgtaggcaccacctccattaccgccgcactggcctgggcgctacagctgctcggcgaaacggtgctggtagtcgatgccagcccggacaatatgctgcgcttttttttcaacgttgatttcgaccatcacaacggctgggcgcgctcgttgattgacggtcgcgactggcgcgacgccggactgcgctacaccgcgcatatcgatcttctgccgtttggccgcctgacccctggcgaacgcgagcacgttgataaactgagtccgaccctggaacccatcgcagcgcaaatcaaattgctcgatcagcaggggagccaccgctggctgctgcttgatattccggagggctactctccgcttacccgcgaactgctgagcgtctgcgatcgtgcgctacaggttgtgcaccccgacggtaacagtcatatacgtctgcatcagcaggcactgcctgccaacgcggatattttgattaacgacctgcgcgtcggcagccagctgcaggaagatctctatcaactgtggctggaaagccagcggcgtattttgccggtcacgattcaccgcgatgaagcgatggcggagtgtctggcggcgaaacagccgcttggcgaatatcgccaggattcgctggcggcggaagaggtgttaacgctggccaactggtgcctgctgcactatgccagggagggggcggcatga

SEQ ID NO: 87649 - DNA, 2619 bp, Enterobacter aerogenes
atgatccgcctgagtacgttgctgctggcgccgccggtgggcgagcgcttgagtgaacgttatgatgactatcgtcagcatggcgcgtcggtgctctcggcttttctcggttgcctgtgggcgtcgctggcgtgggcattcatgccgcttgagacgccgcgctggcaagctattcgcgaacaccatggcgactattttccgcatattaatccgcatcgcccacgcccgttagatccgctgcgctatttgctgcagtcgctctggctgctggcgacccgggtgccggaagcggataaaaaaataaactggcgctcgctggcggcgctggaaggggttcacgggcgctacgcgcagtggctggaaaaattaccggagaaggtcaacacccgtaccggccacctcgataagcaaaaagagcttgaacatctgcatccgcagctgcggcggctggtgcttggcaccattaccttcttctcgctgattctggcgctgttgtgtatcacccagccgtttaacccgctgtcgcagtttatcttcctgctgttactgtggggcgtcgcgctgctggtgcggcgtattccggggcgtttctccgccctgatgttgatcgtgttgtcattgaccgtttcttgtcgctatatctggtggcgctatacctccacgctgaactggaacgatccggtcagcctggtgtgcgggctgattttgctgtttgccgaaacctacgcctggattgtgctggtactgggctatttccaggtggtgtggccgctgaatcgccagccggtgccgctaccggaagatatgaacgaatggccgacggtggatatcttcgtgccgacctacaacgaagatctcagcgtggtgaaaaataccatctacgcttctcagggtatcgactggccgaaggataagctcaatatctggatccttgatgacggtggtcgcgaagagtttcgccagttcgcgaaagatgtcggcgtacattacatcgcgcgtaccagccacgaacatgccaaggccggtaatatcaacaatgcgctgaagtatgcgaaaggcgagttcgtctctattttcgactgtgaccacgtgcccacccgctcgtttctgcagatgactatggggtggttcctgaaggataaaaagctggcgatgatgcagacgccgcaccacttcttctcgccggatccgttcgaacgcaacctgggccgttttcgtaaaacgccaaatgaagggacgctgttttacggcctggtgcaggacggcaacgacatgtgggatgcgacctttttctgcggctcctgcgcggtaattcgccgcggcccgctggatgaaatcggcggtatcgccgttgagacggtcaccgaggatgctcacacttcactgcgcctgcatcgtcgtggccacacctccgcctatatgcgcatcccgcaggcggcggggctggcgacggaaagcttgtcggcgcatatcggccagcgtattcgctgggcgcgcgggatggtgcagattttccgtctcgacaaccccttattcggtaaagggttgaagctggcgcagcgtatctgctacgtcaacgcgatgctgcactttttgtccggtataccgcggcttatcttcctcaccgcgccgctggccttcctgctgctacacgcctatatcatctatgcgccggcgctgatgatcgccttgttcgtgctgccgcatatgattcatgccagcctgaccaactcgaagatccagggcaagtaccgccactccttctggagtgaaatctacgaaacggtgttggcctggtatatcgcgccaccgaccttcgtcgcgctgattaacccgcataaaggcaagtttaacgtcaccgccaaaggcggactggtgaaggatgagtatgtcgattgggttatttcccgcccctatatttatctggtgttgctcaatctggtgggcgtggcggtcggcatctggcgctttatgtacgggcccgaaaacgaaattttaaccgtctgggtcagtatcatctgggtgttttataacttaatcatcctcggcggcgccgtggcggtgtcggtggagagcaaacaggtgcggcgttcgcaccgcgtcgagatgtcgatgccggcggcgattgcccgcccggatggccacctgttctcctgtaccgttcatgactactcggacggcggcctggggataaaaattcacggtgaagcgcgggtactggaagggcaacacgtgaatctgctgctcaaacgcggacagcaagaatatgacttcccggtacgcgtcgcgcgggtgaatggcggcgaagtcggtctgcaattgctgccgctgacaaaccagcaacatattgattttgtgcagtgtacgtttgcccgcgctgatacgtgggcgctttggcaggatagcttcccggaagataagccgatggaaagcctgctggatatcctcaagctggggttccgtggatatcgtcacctggcggagttctcgccgccgtcggtgaaggttattttccgctcgctcacctcgctggtggcctggattgtatcgtttttaccgcgccgtcccgaacgcgccgcggcggtgctttcggcagaaccggcaatggctcaacaatga

SEQ ID NO: 87650 - DNA, 2316 bp, Enterobacter aerogenes
atgagcagttggtaccccttcgcaacattttcggctccggcgacgtcgccggaggccgtggttgccggagctccagcgacagcgggagctgttcagccagcgccggtcgttaacgatggccagccaacggcgacggttatcgattctgccgccgcgccggtggtggtggcggacaacattccctctcgcgatgtgaagctgacttttgcgcaaatcgcgccgccgccggggagcatggtgctgcgcggttctcatcctgagggcgccgtagagttcggtatgcgcagcgatgaggtggtcgccaaagcgctgctcaatcttgactacacgccgtcgccatcgctgctgccggtgcagtctcaactgaaggtttatcttaacgacgagctgatgggcgtactgccggtcaccaaagagcaactgggtaaaaaagtgagcgcccagatccccgtcgatccgctgtatatcaccgattttaaccgcgtgcggctggagttcgtcggccactatcgcgacgtttgcgaaaacccggcgagcagtacgttgtggcttgatatcggtcgtgagagctcgctggatttaacctatcagtcgctgcaggtccgtaacgatctctcccacttcccggtgccgttctacgactcgcgcgacaaccgtccgctgacgttgccgatggtttttgctgctgcgcctgacgtcatacaacagcaggcggcggcgattgtcgcctcctggtttggcagcaaggctggctggcgcggccagcagttcccggtccacttcaatgagataccggaacgtaacgctatcatcttcgcgaccaacgataagcgtccggacttcctgcgcgaccatccgccggtgaaagcgccgactatcgaaatggtcaaccatccgagcaacccgtacgtcaagctgctggtgatcttcggtcgcaacgatcaagacctgctgttggcggccaagggcattgcccaggggaatattttgttccgcggcgatagtgtcgtcgtggatggcgtgaaagagttgaaggcccgccagccctatgacgcgccgaactgggttcgtaccgacaggccggtgactttcggcgagctgaaaacctatgaacagcaactgcaatcaagcggcctggtgccagattcgattaacgtggcgctgaatctgccgccggatctgtatctgctgcgcgctaacggtatcgatatggacctgaagtatcgctataccatgccgccgatcaaagatagctcgcggatggatatcagcctaaacgatcagttcctgcagtcgttcaacctcaatagctcgcaggatgtgaataagctgattttacgcctgccggtgctgcaggggttactggacggccagaaccaggtgaccatacccgcgctgcgcctgggcgcgatgaaccagctgcgcttcgatttccagtacatgaacccgatgcctggcggcaacatcgataactgcattaccttccagccggtgcagaatcacgtggtcatcggcgatgactccaccatcgatttttcgaagtattaccacttcctggcgatgccggatctgcgcgtcttcgccaacgccggtttcccgtatacccgcatggccgatctctctcagacgctaatcgtggtgccgaaaacgcctgatgcgggccaggtggagacgctactgcaggcggtaggcggcatcggcgcgcagagcgggctggcggctatcaacttgcagatgaccgatgacggcaaccagattaagggcaaagatgccgacctgatgctgattggcgctattccgccatcgctgaaagacgatagcaaaatcaatctgttggttgaggcgaccaaaagctgggtgaaaacgccgatgcgtcactatgacctggccagcatctacccggacgatgacgcccgcacgccgcatacgcgaaccgacatcacctcttccgggccaatggcggcgattatcggcttccagtcgccatacaacgaccagcgcagcgtgatcgccctgatggccgatagcccacgcggcaacgagctgcttacaaacgccttaaatgacagcggcaaacgggcggcgatgttcggttcggtggcggtgattcgcgaatccggcgtcaatagtctgcgggttggcgatatctattatgtcggccatctgccgtggttcgagcgcatctggtttgcgctctccagccatccgatactgttggcgattctggcggccgtcagcattgtgctgctggcgtgggtgctgtggcgcatgctgcgtattctcagccgtcgccgtcttgatcctgatgatgagtaa

SEQ ID NO: 87651 - DNA, 1107 bp, Enterobacter aerogenes
atgaacgaatttcgtggggtacttctctcggtattgatgctggcggcggggcaggttagcgctgcctgccagtggcccgcctgggagcagtttaaaaaagcgtatgtcagcgccgaagggcgggtcatcgaccccagcgatgcgcgcaaaatcaccacctccgaagggcaaagctacgcgctgttcttcgctctcgcggccaacgatcgccagggcttcgataagctgttccagtggacgcagaacaacctggcgcagggcgatctgcgcgcccatctgccgggatggctatgggggaaaaagagcgaggatgaatggacgctgctggacagcaattcggctgcggattctgatttgtggattgcctgggcgctgctggaagccggacgcctgtggaaggttgataactatactgaggtaggaaaagcgctgctggcgcggattgccgatgaagaagtcggtgatgttccggggctcgggccgtcggtactgccggggaaagttggtttcgcggacgacaagggctggcgctttaatccaagttatctgccgccgcagctcgccacctactttacccgctttggcgcgccgtggccgaagatccgcgacagcaatctgcgactgctgctggaaacggcgccaaaaggcttctcgccggactgggtgcgctatgagaaaggtagcggctggcagttgaaaaccgataaaccgattattggcagctatgacgctatccgcgtctatctgtgggtcggaatgctcaataacgccgataaacaaaaagcgccgctattggcgcgtttcaaaccgatggcggttcagacgatcaaacagggattaccgccggaaaaaaccaatatcgccagcgggaaaacgactggcgaggggccggttggcttttccgccgccatgctgccgtttttacaagatgacgacgcccgcgcgctacaacgccaacgggtcgccgatcattatcccgacgcggacgcctactacagcgcggtgctgacgctgttcggccaggggtgggatcaacatcgttttcgtttcgccgtgggtggcgaattacaacctgactggaaccaggcatgcgcaagttctcactaa

SEQ ID NO: 87652 - DNA, 3486 bp, Enterobacter aerogenes
atgcgcaagttctcactaagcttcatcacgctgtctgtcggccttggcctgttgccgctggcgcaggtggagaatacccctgcgcagcagcatctgctggaacaagtgcgtctcggcgaggccagcagtcgtgaggacctggtgcgtcagtcactttataggctggaactgatcgacccgaataaccccgattatcttgccgcgcggacgcgctatctgctgcgccagggcgacaccgccggcgcgcaaaagcaactcgatctgctggcaaagctggctccggaatcgtcggcgctacaagcgacgcgtaacgagatgaagatcagtaccggtagcggtcgccaggcgttgcagcaggcgcgattgctcggcgttgccgggaaagtcgatgaagccgtcgccgcctatgaaaagctcttcggcggcgtcccaacggataccgaagccgctatcgaatactggacgctggtggcgcgattgcccgctcgccatagcgaaggcgtcagccagctgaaaaaacttaatgccacaaccccggataacgtcacgttattgacctcgctggcgaagctgatgttttcagataacaagccgcaggaaggcttcgcctatctggaacagatggcgcgttcggcctcaggccgcggaattgcggctgatatgtggctcggcgaaattaaaagtatgccggtcagcagaggcagcgttcaggcactacagcgattcctgctccagttccccgccggttccgctgccgctaacgcccgggtgttgctggcgcagcagcaaactcaactgcaagacccagccttcctcgccaaaagcgaagggctggcggcggtgaaatccgggaatgcggcgcaggcggtggccgatctgcagcaggcggtacgcgcggatgcccgcgatagcgatgccgtcggcgcgctgggcgccgcctactcacagcgcggcgatcgggcgcgggcggtagcgcagcttaataaagcgatcgcgatggatccgaaaagcccgaatcgcgataagtgggacagtttgctgaagaccaaccgctattggttgttaattaaacagggcgataacgcgctgaaagcaggccaactggcgcaggcgcaaaacgcgtacgcccaggcgcagcgggtggataacaccgacagctacgcggttctggggttaggcgatgtcgccgcggcgcgcaaagatgacgccgccgccgaacgctactatcgccaggcgttacgcatggatcgcgacaataatctcgccgtacgcggtctggcgaatgtttatcgtcgtgaatcgccggaaaaagccagcgcctatattgccagcctccccgccagccagcggcgcagtattgatgatatcgaacgcagtcttaccaacgatcggctggaaaaacaggccgaagcgctggaaagccagggcagttgggcgcaggccgcggaggtgcagcggcggcgtctggctctggatcctgaaagcgtgtggataacctatcggttggcgaaagatctggtcagcgccggccagcggccggaagcggacgcgctgatgcgtaacatggccaaccgcaagccgggcgatgccgaacgggtttacgcctacggcctctatttgtccggtaataatcaggatgatagggcgctggcgcaaattaacgcgctgccgcgcggacagtggaccgataatattcgtgaactggaagggcgtctgcaaagcgacaaagtgatgcgcgaggccaaccatcttcgcgatagcgggcaggaagcgcaggccattgccttgattaaacagcagccggaatcgatccgctacgatctgacgttggcggattgggcgcagcagcgcggcgatagcgcagaggcgatagcccagtaccatcgggtgctgagccagcaggctgataatggcgatgcgcgacttggcctggcggaagtctatctcgccgagggcgataaaaacgccgcccgcgcgcaggtcgcgcagttgaaggatgcggatacggaatcgatcaacatgcagcgccgggtagcgctggcccgcgccggatttgacgataccgcgggcgcgcaacaaatatttgaccgcatcgtgccgcaggcgaaaagccagccgccgtcgatggaaagcgcgctggtgctgcgtgatgccgcgcgtttccagacgcaaagcgagcaaccacagcaggccctggaaagctataaagacgcgatggtggccgctggcgtgacccgcgttcgcccgcaggataatgacacctttacccgcctgacccgcaacgatagccaggatgactggctgaagcgcgggatccgcagcgacgccgccgatctttatcgccagcaggatcttaacgttacccttgagcacgactattggggatcgagcggcaccggcggttattcagacctcaaagcgcacactaccatgttgcaggtggacgcgccgttgtatgacgggcggatgttcttccgtaccgatgtggtgaatatgaacgccgggtcgttttccactaatagcgatggcggttattcgccgagttggggaacctgtggtgaaattagctgctatggcggcagtaaaaatcagagcgatggcggcgccagcgtagcggttggctggaagaacgccacctggagcggcgatatcggcaccacgccgatgggctttaacgtggtggatgtcgtggggggactgagttatagcggcgatgccggcccggtcggctataccgtcaacgtccaccggcgacccatttccagctcgttgctctccttcggcgggcaaaaagataatcctaacgacggccataccggcactacctggggcggcgtccgcgccgccggcggcggcatcagcctcagctacgataaaggcgaggctaacggcatctggtcatcgctgggggctgaccaactcaccggcaaaaacgtcgaggacaactggcgcgtacgctggatgaccggttactactataaagcgatcaatgaaaataatcgccgggtgaccgtcggcctgaccaatatgatctggcactacgacaaagacctcagcggttacacgctgggccagggcggttactacagcccgcaggagtatctctccttctcggtgccggtcatctggcgtcagcgtaccgaaaactggtcgtgggaactcggcgggtcggtgtcgtggtcccattcgcgtacgcaaactcatgcgcgctatccgttgctgaatttgattccttcacagtatcgctacgatgccagccagcaaaaagaagagggcggcagcagccagggtttcggttataccgcacgggcgctggtggaacggcgggtcaccggcaactggtttgtcggcgcggctgtggatattcagcaggctaaagattacaccccgagccacgcgctgctgtacgtgcgctattctgcttccggctggcagggcgacatggatatgccgccgcagccgttggtgccttatgcggattggtag

SEQ ID NO: 87653 - DNA, 2007 bp, Enterobacter aerogenes
ttgcgcgtcagccgctcacttacaattaaacagatggcgatggtcgcgagcgtgtccatggcgtttgtcctggtcttttgctctattttgctgtttcactttgtgcaacagagtcgctataccacggccacgcaattagaaagtatcgcccgttccgttcgcgagcccctgtcggcggcaattttgaaagccgatattcccgaagcggaagccattctgggccgcattcagcctgctggcatcgtcagccgggcggatgtggtactaccgaatcaatttcaggcgctgcggatgcgctttattcccgaacgcccggtgccggtgatgatcactcgcctgtttgaactgccggtacagatatccctgccgatttactcactcgagcgtccggctaacccgcagccgttggcctatctggtgctgcaggcggattcctatcgcatgtataaattcgtcatgagcgcgcttgcgacgttagtgactacttacttacttttggtgctcattttgacggtggcgcttacctggtgcattaaccggctgattgttcgcccgctgcgcgccattgcccgcgagcttaacgatattccgccgcaggagcggctcggacatcagctgagcctgccgcgactgcaccaggatgatgaaatcggcatgctggtgcgttgctacaatcgcaaccagcagtctttgctgcgtcagcatgatgagctatcgctgcaatcgacccgtttcccggtgtctgagctccccaacaaagcctttttgatggcgatgctggagcagaccacaacccgtccacaaccctcggcgctgctggtggtagcctgtgagaccttgcaagatgccgctggcgtcctgaaagagagccagcgcgagatgctgctcctgacgctggttgagaagctgaaagcggttatcccacccaatatggtgctgacgcaggtgagcggttacgatttcgctattttcgcccccggactcagcaagccgtgggaagcggtgtcgttaagtaagcaagtgcttacttctattagcgagcgattgccgctgcacggtgtccagctgcggccctgcgccagcgttggtatcgcgatgtttaatagcgaactgagcgccgaacagttttatcgtcgggcggtttccgccgcggtgacggcgcggcgcaagggcaaaaatcagatcgagttctttgaccccgagcagatggaaaaagcccagcgtcggttaatggaagagcatgacatcctcaccgcgctcgagaatcagcagttcgccatctggtttcaaccgcaggtggatattgccagtggcgatatttgcggtgcggaagttctgcttcgccagcgacaggccgatggcggttggtcgctgccgtgcgatctgattgagcgtattgaaaactgcgggctgatggtgccggtaggctattgggtgatggaagaagcctgccgccagctggcagcctggcagcagcaggggatcatgctgccgttgtcggtgaatgtctcgttactgcagttgctgcatcctgaccgcggcgttgagttgctggcactcatagaacgctatcgtatcgccccgggcaccctggtgctggaggtgacggaaagctgccgtctcgacgatccgcaggcggtgattgacctgctgcgcccgctgcgcgacgccggcacgcgtattgcgctggatgatttcggcatgggttatgccgggttgcgccagttgcaacatatgaaatcgctgccggttgatatcctgaaaatcgacaaggcgtttattgatatgttgccggatgataccagtatggtcccggcgataattcagctcgcacgcgggctcaagctgcggatcgttgctgagggcgttgaaaaagaagaacagctgaaatggttgcaagcggctggcgtggatgtcgctcagggttacctgtttggttgcgccttgccgctggaaagctttatgcagcgcttcctgcaggccgataagaacgatgcaagtttgtaa

SEQ ID NO: 87654 - DNA, 1287 bp, Enterobacter aerogenes
atgaagctctctctcttcaaaagcctctatgtccaggttttatcggccatagctatcggtattttgctgggccatttctacccggaacttggcgcgcagatgaaaccgttcggcgacgccttcgtaaaactgattaaaatggtcattgctccggttatcttctgtaccgttgtaacagggattgccgggatggaaagcatgaaggccgtcggtcgtaccggtgcggtggcgctactctactttgaagtggtgagtaccattgcgttgattatcggtcttatcatcgtcaacgtagtgcaacccggcgcgggcatgaacgtcgatcccgcgacgctggacgcgcacgcggtggcagtctacgccgagcaggctaaagatcagggtgttgtcgcctttctactcgatattattccgggcagcgtgattggcgctttcgccagcggtaatattctgcaggtgctgatgtttgccgtcctgtttggctttgcgctgcatcgtttaggcagcaaaggccagctgattttcaacgtcattgagagcttctcgcaggtcattttcggcatcattaacatgattatgcgtctggcgccgatcggcgctttcggggccatggccttcaccatcggtaaatacggcgtcggtaccttggtacagctgggccaactgattatctgcttctacatcacctgtatcctgttcgtggtgctggtactgggttctatcgcgcgggccactggatttagtatcttcaaattcattcgctatatccgcgaagagctgctgattgtactggggacctcttcgtccgaatccgcgctgccgcgaatgctggataagatggagaagttgggttgccgtaaatcagtggtggggctggtgataccgaccggctactcctttaacctcgatggcacctccatctacctgacgatggcggcggtgttcatcgcccaggccaccaatagccatatggatatcttccatcagatcaccctgctggtggtgctgctgctctcttcgaaaggggccgcgggcgtcaccgggagcggatttatcgtgctggcggcgaccatctctgcggtagggcatctgccggtggcgggcctggcgctgattctcggtatcgaccgctttatgtccgaagcgcgcgcgttgaccaacctggtgggtaacggcgtggcgaccgtggttgtcgcgaaatgggtgaaagaactcgatgccaaacagctcgatgatgtgttgaataaccgcgttcccgcggacaaatcgcaagaattatcctcgtaa

SEQ ID NO: 87655 - DNA, 1500 bp, Enterobacter aerogenes
atgcagggcacaaaaattcgactcttaaccggtggtttgctgatgatagcgacggccggttctgtgcaggcagaagcgctccagccggacccggcctggcaacaggggacgttggcgaacggtttttcgtggcaggtactttccacgccgcagcgccctagcgatcgcgtcgaagtccgcctggctgtgaatattggctcgctgagcgaaagcactcagcagagcggcttcagtcatttcattccgcgcctggcgctgacccaaagcggcagcctcccgacgatgcaggcgcgttcgctgtggcagcagagtattgacccgaagcgtcctctgccgccggcgattgtttcttacgatttcaccttgtttaatctgagtttgccgaataaccgcaacgacctgctaaaagaagcgttgaactggctggcggacgctaacggtaaattgagtattacccaacaagccgtcaatcatgccctgcagggcagcgatatggtggcgacctggccgctggatacccaggaaggctggtggcgctatcgcctgaagggctcaacgatgctcggtcacgatccggcggcgccgttgaagcaaccgattgatattaaacagctgaaagaattttatcagaaatggtacaccccggatgcgatgacgctgattgttgtcggtaacgtcgatagccgcagcgtcgctgagcagatcaacaaaatcttcggcgaactaaaaggtaaacgcgagaccccggcggcggtaccaacgctatcgcctctgccggctgtaccggtcagcatcatgaccgatgccgtgcgtcaggataagctgtcgatcatgtgggattctccatggcagccaatccgcgattccgccgcgctgcagcgctactggcgcgatgacctggctcgggaagcgctgttctggcacgtgcagcagaacctgagcaaaagcaacgtaaaagacatcggtctcggttttgattgccgcgtgctgtatcagcgcgcccagtgcgcgatcaatatcgactcgccgggcgaacgcctgaacgccaacctgagcgcggtatcgcgcgagctggcgaaggtacgcgacaatggtctgccacaggaagagtttgatgcgctgattgcacagaaaaacctcgaactgcaaaagctgttcgccacctatgcccgcacggataccgatatcctgattagccaacgaatgcgttcgctgcaaaatcaggtggtggatatcgcgccggagcaatatcagaaactgcgccaggagttcctgaactcactgacggtcgacatgttgaaccagtatctgcgccagcagctgtcgcaggatatggcgctggtattgcagcagccgaaaggcgagccggagtacaacatgaaagatctgaaagcgacatgggaaaagctgatggcgccagcacccgctgcggcggtgagcgctacgccggatacggttgatgcgcataacgaggcgacggatattcccccagcgcagtaa

SEQ ID NO: 87656 - DNA, 930 bp, Enterobacter aerogenes
atgtctaagaaaattgccgtgattggcgaatgcatgattgaactgtcagagaaaaacgcggcggtgaatcgcggtttcggcggcgataccttaaacacatccgtctacatcgcgcgccagaccagcgcggatgccctaagcgtacactacgtgaccgcgctgggcaccgacaccttcagccagcagatgctggagtcctggcagggcgaacaggtaaaaaccgatctgattcagcgcatggctgaccgactgcctggcctttactacattgaaacggacgagaccggcgagcgaaccttctactattggcgcaacgaagcggcggccaaattctggctcgaaagcgagcgcgcaggcgccatctgcgaagagctggctacctttgattacctctatctgagcggcatcagcctcgccatcctcagcccggccagccgggaaaagttgctcaccctgctgcgcgaatgccgcgccaacggcgggaaagtgattttcgataacaactaccgtccgcgcctgtgggccagccagcaagagactcgccaggtgtaccagcaaatgttggaatgtaccgatatcgcttttctgacgctggatgatgaagatgcgctgtggggagcggtaccggttgccgaagttatcgcccgcacccacgccgctggcgtagaagaggtggtggtgaagcgcggcgccgactcctgcctggtggcgatcgccggccagccgctgctggaggtgcccgcggtgaagctgccgaaagagaaagtagtggataccacggcggcgggcgattcgttcagcgccggctatctggcggtgcgcctgaccggcggcgacgcggaatccgcggcgaaacgcggacatctcaccgccagcacggttatccaatatcgcggggcgattatcccgcgcgaagcgatgccggactaa

SEQ ID NO: 87657 - DNA, 2052 bp, Enterobacter aerogenes
atgaccagaacccgtaaaacgattgctattatctcgggaacgattgtgctgttaatcgttctttttttcatcgtgttggcgacctttgactggaaccggctcaagccgacgatcaatcagaaagtttccgccgagctcaatcggccattcgccattcgcggcgacctgggcgtagtgtgggagcgacagcctgaggagcgcggctggcgtagctggatcccgtggccgcatgtgcatgccgaagatatcgtgttgggcaacccgcccgacattccgcaagtgacgatggtacatctgccgcgcgtggaagcgacgctggctccgctggcgctgctgagcaaaacggtctacttgccgtggattaagctcgaacagcccgacgtccggctgataaggctgacggaaaacagcaataactggacctttaaattagcttcagacccggcatccgaaaaagccaacccgccatcggcctggtctttccgccttgataatattctcttcgatcgcggcaacattgccattgacgataaggtaacccgcagcgatatcgcgatcgtggtcgatccgcttggcaaagcgctgccgtttagcgaagtcaccggtgcgggcaacaaagcgcaggcgacaaaagccggcgattatatctttggcctgtcggtgaaggggagctacaaaggccagccgctgagcggcagcggcaaaattggcggcatgctggcgctgcgtagcgatagtaccccgttcccgctacaaggcgattttcactctggtaatacccggatagcgtttagcggcacggtcagcgatccgcttaatgtcggcgggctcgatctgcggctgaaattcgccggcgactcgttgcgcgacctctacgacctgaccggcgttctgctgccggaaacgccgtccttttccaccgatggccgcctgcgcgccgactttaaacataaaaacggcatgcgttttgactatcgcgattttaacggccggattggcgacagcgatatccacggttcgttgacctataccaccggcaaaccgcgaccgaagcttaccggcgatctggagtctaaacagctgcggctggcggacctcggcccgctgattggcgttgattccggtggcggggcgaagaaatcctcatcacgtaaagcgggagatgccgtacagccagcgggaaaagtcctgccggccgatcgctttgagacggataaatggcaggtgatggacgccgatgtgcgcttcaaggggcggcgaatcgaacacggcggtactctgcccatcagcgacctggcgacccacattattcttgaacgcggcgacctgcgtctgcaaccggtgcgctttggcctggccaacggttcgattgccggcagcgtgcatctgcagggcgataaaaaaccgctacagggcgaagccaatttgcaggcgcggcggctcaagcttaaggcgctgatgccgaacgttgaaatgatgcagaaaacgctcggtgagatgagcggcgatgtacaactgcgcggcagcggtaattcggtggcggcgctgctcggcaacagcaacggcaaccttaagctgctgatgaatgatggtctgattagccgcaacctgatggaaatcctcggcttaaacgtcggtaactttatcatcgggcagatttttggcgatgaggaggttcgggtgaactgcgcggcggccaatattgatgtggtcaacggcgtggcgcgaccgcaaattttcgccttcgataccgagaacgcgctgattaacattaccggcaccgccagctttgcctctgaacagctggatctgaccgttgacccggaaagtaagggcctgcgggtgattactctgcgttctccgctgtacgtgcgcggtacctttaaatcgccggatgccggggtgaaagccgggccgttgattgcccgcggcgcggtggcggcagcgttagcgacgctggtcacgccggcggccgctttactggcgctgatctcgccggcggaaggcgaggcgaatcagtgccggacgattttgtcgcagatgaaaaagtaa

SEQ ID NO: 87658 - DNA, 1323 bp, Enterobacter aerogenes
atgcaagccacagccactactatcgacaacgcgcaagacgccacgccggttaactcgcgtaataaagtcgtcgtcgcctcactcatcggcaccgccattgagttcttcgacttctatatttacgccaccgccgcggttatcgtcttcccccatatctttttcccacagggtgatgccgccgccgcgacgctccagtcgctggcgacgttcgccatcgcctttgtcgcgcgcccgattggctcagcgctattcggccactttggcgaccgcgtaggccgtaaagtcacactcgtcgcctcgctgctgactatgggcatctccaccgtggtcatcggcctgctgccgggctatgaaagcattggcatcctggcgccgatgctgctggcgctggcgcgctttggtcagggtctcggccttggtggcgaatggggcggggcggccctgctggcgacggaaaacgctccgccgcgcaaacgcgcgctatatggctccttcccgcagctgggggcgccaatcggcttcttcttcgccaacggcaccttcctgttgctgtcgtggctgttgagcgaccagcagtttatggaatggggctggcgcgtgccgttcatcttctccgcggtactggtcattatcggtctgtatgttcgcgtgtcgctgcatgaaaccccggtgttcgctaaggtggcggcggcgaaaaaacaggtcaaaatcccgcttggcacgctgctgactaagcacgtgcgcgtgaccgtgctcggcaccttcatcatgctggcgacctataccctgttctatatcatgaccgtttactccatgaccttcagtaccgctgccgcgccgattggcttaggtttgccgcgtaacgaagtgctgtggatgctgatgatggcggtcattggttttggtgtgatggtgccggtggcgggcctgctggcggatgcctttggccgtcgtaaaagcatgattatcatcaccacgatgattattctgttcgcgctgttcgcctttaaaccgctgctcggttccggcaacccgattctggtcttcaccttcctgctgctgggcctcagcctgatggggctgacattcggcccgatgggcgcactgctgccggagctgttcccgacggaagttcgttataccggcgcctctttctcctataacgtgtcgtcgatccttggcgcgtcggtcgcaccgtatattgccgcctggctgcagggcaattacggcctgccggctgtcggtatctacctggcggcgatggcggcgctgacgctgatcgccctgctgttgacccacgaaacccgccatcaatcgctgtaa

SEQ ID NO: 87659 - DNA, 1032 bp, Enterobacter aerogenes
atgacgccggaaaacgacgatcgccaaccgccacaggaaacgggccagcagccggagaaaaacaaaagtacgctcgccgccatcaacgattccgccgttgggcagaaagctaaccaggcgctgaaaacggtcaccggaacggcggccaaagttcagcgcaatccggtaatagcccacctgctgcgcgccgccgagcggttcaatgacaggcttggcaatcagtttggcgcagccatcacctacttctcatttttgtcgatgatccccattctgatggtttcattcgccgccgctggtttcgtgctggcctggcatccgaccctgctgcaggacatcttcgataaaatcctgcaaaacgtcagcgacccgacgctggcggcaacgcttaaaaacaccatcaacaccgccgtacagcagcgtaccgccgtcgggctggtcggcctgttggtcgcgctctactccggtattaactggatgggcaacctgcgtgaagcgattcgcgcccagtcgcgcgacgtgtgggaacgtacgccgcaggatcaggaaaaaatctgggtaaaatacttccgcgatctgatctcgctgattggcctgctggtcgcgctggttatcacgctgtcgattacctccgtcgccggatctgcacagcagatgattatctccgcgctgtatctcgattatatagaatggctgaaacccgcatggcgcctgattggcctggcgatttccatctttgcgaactatctgctgtttttctggatcttctggcgactgccgcgccaccgtccacgccgcaaagcgctgttccgcggtacgctaattgcggcgattggcttcgagattattaaaatcgtgatgacctggacgctgccggcgctggtgaaatccccatccggcgccgcctttggttccgtactggggctgatggccttcttctacttcttcgcccgtctgaccctcttctgcgccgcgtggattgcgaccgcagagtataaagacgataagcggatgccgggcaaaacccacgattaa

SEQ ID NO: 87660 - DNA, 900 bp, Enterobacter aerogenes
atggataaaattcacgcaatgcaactctttattcgtgtcgcggaactggagagtttctctcgcgccgccgatacccttgggttgcccaaaggtagcgtatcgcgacagatccaggcgctggagagccatctcggcgctcgcctgctgcaccgcaccacccgccgggtgcagttgacgcaggacggcatggtctattacgaacgcgccaaagacctgttaagtaatctcgaagaactggatggtatgtttcagggcgatccgtcaagcattagcggccgcctgcgtgtcgatatgccgatcagcgtcgccaaaaaactggtcatcccgaaacttcccgcgtttttacaacagtatcccggcattgaaatcgaactgagcagtagcgaccggctggtcgatgtggtgcgcgaaggcttcgactgcgtgatccgggtgggtacgcttaaagactcgggactcatcgcccgcccgctcggcaaactcacgcaaattaactgcgccagtccgcattatctggcgcgcttcggctacccggaaagcctcgacgatctggcggatcatgccttgatccactacgccagcaacttcggcgcgcggcagtcaggctttgaagtcgtcagcgacggcgccgtgcgctgggtgaaaaccggcggcgtgttgaccgtcaatagcaccgaaacctaccaggccgcctgccaggccgggctcggcattattcaggtcccgcgcattgccgtacgtgaaccgctgcgtaccggcgagctggttgagatcctgccgcagtaccgcgccgaaccgatgccggtgtcgattatctatccacatcggcgcaatctctcccgccgcgtgcatctctttatggagtggctgggcggattgatgaaaggttatgtcgattaa

SEQ ID NO: 87661 - DNA, 759 bp, Enterobacter aerogenes
atgacacaacgtatcgctttagtaaccggcggcagccgcggtctgggaaaaaacgcggcgctgaagctggcggcgaagggaaccgatattattcttacttaccacagcaaccagcaggcggcgcgggaagtggtgcgcgaaattgagcaaacaggagcgaaagcggcagcattgccgctgaacgtcggcgataccgccagttttgcaggctttgtacaacagctgacgcaatgtctgaaggagaagtggcagcgcgacagcttcgattatttattgaacaatgccggcatcgggttgaccgcgccgtttagcgagaccagcgaagggcagtttgacgagttgatgaacatccactttaagggaccgttcttccttacccagcagctgctgcctttgcttaaagacggtgggcgcattctgaacgtctccagcgggctggcacgctttgcactaccgggctattccgcttatgcggcgatgaaaggtgccatggaggtgttaacccgttatcaggcgaaggagctcggcgctcgcggaatatcggttaatatcattgcccccggcgcaattgaaaccgactttggcggcggcgcggtgcgcgataatgccccgcttaaccagcatattgccgcccagacggcgctaggccgcgtcggcctgccggatgatatcggcgatgctatcgccgcgttgctgagtgacgagcttggctggatgaacgcccagcgcgttgaggtttccggcggcatgtttttataa

SEQ ID NO: 87662 - DNA, 609 bp, Enterobacter aerogenes
atgcaagtaatcatgtttgacaggcagtcaatatttattcatggaatgaaggtcggcttacaacaacgtattcctgaaattaatattcatagcacctgtcaggcagaacagctgtggcaactgctcacggctcatccgcaggcgcttcttatccttgatggcgacctgaatagtgaattttgttgctggttgctccaggagaagcagcagcgttttccgcatgccaaagtattattagtggtttcggatgataataaaagctggctgcaacgggcgctggcgtggaacgtgcgcgccattgcccaacgtgaggatagcgccgatatgtttgcccagatcattaatagcatcatgttgggcatgatgtgtctgcctggcacctggttaatgacttcggcggagcgcggaaagcacgctgtacatttaagtcgtcgccagcaggaaattttaaaactgctggcggaaggcagctctaataaggaaattagccgtacgttaaatatcagcgccgggaccgtgaaagcgcatcttgagtcgttatatcggcggctggatgtgaaaaatcggacccaggcggcgatggcatttaatagcgtcggtgaaaattaa

SEQ ID NO: 87663 - DNA, 423 bp, Enterobacter aerogenes
atgactatcaccacgctaagcctggcgggactgcgatttattcaacaaacacaagggctggcgctactgccgtatcaggaccagtttggccaatggcgggtcggctatggccacgctattgatgaatatgagaaagtgacgcccatcaccgctgaactggcgatgatgctattgacggtagacctgctgcagtgccaacagatactacagcgcaggttggtcgtggaactgactcagccgcagtgcgatgccctgctggcgctggtattcagtttagatggcagcgcccaaccggagttggaggctattttgcgttcacttaacagccacaacataacgcaggcgctggcgatatggcggaaaattgaccgcgataacgccttccgcctgcaggagtgcgagtggttttctcagaccagttaa

SEQ ID NO: 87664 - DNA, 528 bp, Enterobacter aerogenes
atgcccgaactgcttacgccgcggctgcgctgctcgccgctgcagcttgacgactggtctttttttctcagcctgcaacaggatccgcaggtgatgctctatgttgcggataaccggcccatcgccgatatccgcgccgcgtttgatgcacgcctgccgctctggtcgcctaagtcctcgcactggctatgcctggtggttcgcgatcggcaaagccatacgccctttggcctgaccggctattgccatcacgatgatgatatcgccgaagtgggctttctcttcgccccacaggcgcaggggctaggctatggatatgaatcactgtgtgcgctatgtgattacgcattttctacaggcggcattcgtcgtcttaccgccagcgtcaccgccggaaaccaggcctcaagacagctgctgctaaaaacaggttttatacaggaaggagagctacgcgagagctactggttacatggccgttggcacaatgactggctgtttggcctgatgcgccacgattaccaataa

SEQ ID NO: 87665 - DNA, 1659 bp, Enterobacter aerogenes
atgttcagccagaaactacgcaacgttgatgacgacgagttgaggatcgaaaacgatccgtgctacgaagccgatccgtatgagttaaaactggatgaaatgttcgacgccgaaccggagccggagatcatcgaagggctaccggcgtctgacgccctgacccccgccgaccgctatctcgagttgtttactaacgtacaaaagtcgcgcatttttcttgatagcaaaacctttcccgactgcgcgccaaaacacgatccgctggatatcctgatgcactaccggcgggttaagcgtacgccggagttcgatttgcgtcagtttgtggaagacaacttctggctaccggatagccacgccgatgattacacctctgacccgaaactgacgctaaaagagcatattgataagctatggccggtgctcacccgtgaaccgcaggatcatattccgtggtcatcgctgctggcgctaccgcagtcgtacatcgtccccggcgggcgttttagcgagacctactactgggattcctacttcaccatgctgggtctggcggaaagcggccgtgaagatttgctcaaatgtatggccgacaacttcgcctggatgattgaaacctacggccacattcccaacggcaaccgcacctactatctcagccgctcccagccgccggtattcgccctgatggtggagctgtttgaggaagatggcgttcgcggcgcgcgccgctatctcgaccatctcaaattagagcacgccttctggatggacggcgcggaatcgctgatccctaaccaggcctaccgtcacgtggtgcgtatgcccgatggttcgctgcttaaccgctactgggacgatcgcgatacgccgcgcgatgaatcctggcgagaagatgtagaaaccgcgaagcattccggtcgcccgccgaacgaggtctatcgcgacctgcgcgccggcgcggcttccggctgggactactccagccgctggctgcgcgatatcaccaggcttgcgagtatccgcaccacccagtttattcccatcgacctcaacgcttttctgtttaagctggaaaataccatcgccaatctttccggcctgaagggcgatcgcgaggctgaagccgaatttcgccgtaaagctaacgctcgccgggaggcggttacccgctacctgtgggatgaagagtgcggctgttttcgtgattacgattggcgccgtgagcagttggccttattctccgccgccagcatcgtcacgctgtatgtcgggatggcgacccacgcccaggccgaacggctggcggatgccgtacgcgcgcgtctgctcacccctggcggcatcatggcgacggaatatgaaagcggcgaacagtgggataaacccaacggctgggcgccgctgcagtggatggcggtacagggattcaaaatgtacggccacgacccgcttggcgatgaaatcgcccagagctggctgcagacggtgaatcaattttatctcaaacaccacaagctgattgagaaatatcatatcgccagcggcgtaccacatgagggcggcggcggggaatatccgctgcaggatggcttcggctggaccaacggcgtggtgcggcggcttatcagcctgtacggcgagccgaggtcttcgtaa

SEQ ID NO: 87666 - DNA, 1149 bp, Enterobacter aerogenes
atggtcactcccttcaacattttaacgcccggcaatatccgctttggccgcgggcaggcccgcagcgccgcgccgtggctggcgcaatatgatgccccggtgctgctggttcacggcgcgaccaaaaatcgcgcccaatttttactgaacgaactgaccgcattgcatcttcaggtcagcactgttgctatcgccaatgaacccacgctggacgatattgaacgcggcgtacggctggcgcgcgagcgcggcgtcggcgcggtggtcagcctcggcggcggcgcggtcattgatgccggtaaagccattgccgcgctggtcccggcaagcgggcctgccatcgactatctggaagtcgtcggaacggggagaatactggaagccagcccgctaccgtttgtcgctattcccacaacgtccggcaccggcgcggaggttactaaaaacgcggtcatcaacgtcccccagcagcagcgcaaagtcagcctgcgcgacgatcgcatgctgccgcaactggcgattgtcgatccggcgttaacggataacgccccccgcgccgtcaccctcggctccggccttgatgccttaactcaggttatcgaaccctggctgtgcacccgggcgacgcccttcaccgatgccctgtgccgggaggcgatcccccgcggcatcgccgcgttaaaaacgctgatggaaaaagagtgtgccgacagccgcgacgagctggcatgggtcagcctgtgcggcgggctggcgctcgccaatgccggcctgggtgtggttcacggtcttgcggggccgcttggcgggctaagcgatgcctcccacggcgcgctctgcggctgcctgctgccttttgggctggaactcaatgagtcgcaggtaaccaatccggcgctgcgccagcgtttcctcgacgtgcgccagtggatcgccgccggacttggcgtctcgccggatgacgcctggcaaagcctgcgcgaatggagccagcgctcagggctcggcaatttacgcgacctcggcgtaccgcgcgaagcgctggaacccgccgcgctggcggccagtagttcatcgtcgatgaaagccaatccggtcacgctggagtcagagcaactgctggagatgctggaagccgcctgggagtaa

SEQ ID NO: 87667 - DNA, 624 bp, Enterobacter aerogenes
atgataagaatcttgggtaaacgctcgtctattaacgtgcgtaaagtcctctggacctgcgaagaggcgggtatcgagtatcagcaggaagattatggcagcggctatagcccgcttgatacgccggaatttttggcgctgaatccaaatgcgttagtgccggtgctggtggatgacgattttgtcctttgggagtcgaacagcatctgccgctatctggcgcgtaaggtcggacgtgacgatttgctgccctctgagttacgtgccgcggcgcaggtagaacactggatggactggcaggcgacggagtttaacagcgcgtggcgctacgcgttcacggggctggtgcgtaaagatccgcgttttcaggatccggcggcaattaaagagagtattgccgcgtggacgcgctgcgtacagattgtcgacaatcagctacagcgcaccggcgcgtggctgaccggcgagacgtttacgctggcggatatcgtgctggggctttcggttcatcgctggaaaatgacgccgttcgcccatccggagatggcaaacgtcgaacgatggtatatggcccttaaccagcgcccggcatttatgcgccacggcaataacggcgtagcgtag

SEQ ID NO: 87668 - DNA, 1017 bp, Enterobacter aerogenes
atggcaggtcaaaacaaacgagcagtcaccagttacgatgtcgcgaaagcggctggcgtctcgcaatctgcggtatcccgcgcctttaccgaaggagcgaaaatttcgccagccaccaaagaaaaggtgcgtaagatcgccgccgagctgggttatcgtccgagctttatcgcccagtcgctgatcacccgccgctcaacgcttattggtgtcgtcgttccggggttggtgaatcccttctacgccgcggttctggatgaactgtcacaggcgttgaacctgatgggataccgggtactgttgttttcgatgtaccgcgatgatgacactacccccatcatggaagagattctgcgtcatcgtgttgaagcgctagtgctggtgtccagcagcctttcttcacactttgctcatgaatgccagcagctcggcctgccggtgctgctgctcaaccgcaaaaacgacagccggtcggtttccagcgtcaccagcgataatctggctggcggcgccgcgattgccgatttcctgctggatctcggccatcagcagctggcatttgttgccggtagagatacctcctctaccagccgcgaccgggagacaggctttcgacagcgtctggaggcccgcggcgcccgcccgatgctgcgcgatagcggaatgtggtcgatagaagaagcgatgaacgccacccgcaggctgatggcgctaccaacgccgccggacgcgctattttgcgccaacgatatgatggccatcgccgccctcaacgtggttgtcggcgaaatgggcatgaaggcgggcgaagatatctccatcgtcgggttcgatgatatcgccatggccagctggccgctgataaatttaaccacctgggtccagccgctatcggaaatggtggataccgccatcgccgtactgaaaacgcagctaggcgcggctgaaaccagtgccgttcagcacgttctgcaggggaagcttatcgtcaggggcagtacccgcccgcgacgctaa

SEQ ID NO: 87669 - DNA, 1308 bp, Enterobacter aerogenes
atggctatctggctcaagcgcggtgcggaatctgaagcagtgaaatctcacgaccgtacggttcgtgaagcagtagagaaaatcctggcggatattgaagcgcgcggtgacgcagcggtgcgcgagctgtcgattaagttcgataagctcgatcgcgcaaacttccgcctgtcgcagcaggaaatcgatgactgctatgctcagctgtcggatcgcgatattgctgatatccgctttgcgcaggagcaggtgcgtaacttcgctcagcaccagcgcgacagcctgaaagatatcgaggttgaaacgctgccgggcgtcattctgggacacaaaaatattccggtcagcgcggcgggctgctacgtgccgggcgggaaatacccgctgctggcgtcggcgcatatgtcgattatcaccgcgaaagtcgcaggtgtgccgcgcattgtcacctgtgcgccgccgtttaacggtaaaccggcgccggcgattgtggtggcgcagcatatggcgggggccgacgaaatctactgcctggggggtattcaggccgtggcggcgatggccgtcggtaccgagagcatcgcaccggtggatatgctggtggggccgggcaacgcctttgtcgctgaagccaaacgtcagctgtttggccgcgtcggtatcgatctgttcgccgggccgacggagagcctggttattgccgatgaaagcgtggatggtgaaatctgcgccaccgacctgttaggtcaggctgagcatggtcctgattctccggcgattttgttgacgacctcggaaacgctggcgcgcgaaacgctggcggaaatcgatcgtctgctggcggtgctgcccaccgcggaaatcgcgcgccagtcgtgggcgaagtttggcgaaatcattgtggctgaagaccgggaagaaatgctgaaaatcgccaatgagctggcgttcgaacatgtgcaggtaatgacccgcgacccggactggttcctcgaaaatatgcagaactttggcgcactgttcctgggacctcgaactaacgtggcctacggcgataaagtcatcggcaccaaccataccctgccgacgcgtaaagcggcgcgttataccggggggctgtgggttgggaagttcatcaaaacctgcacctatcaaaaggttcttaccgatagcgcctccgcgcagatcggcgagtactgttcgcgtctgtgcgccctcgaaggtttctccggccatggtgaacaggccaacgtccgcgtgcgtcgctacggcaataaagacgttccttacgctgggattcctgaataa

SEQ ID NO: 87670 - DNA, 1410 bp, Enterobacter aerogenes
atgctgacggataaccctatggacgtattgattgccttactggcgttaggattgctgatgctcgccgcctatcgcggctatagtgtgatcctttttgcccctttggttgcgctcggcgccgtattactcacccagccagccgccgttgccccggtattcagcgatatcttcatggataagctggtcgggttcgtaaaactctatttcccggtatttttactgggcgcggtcttcgggaaattaattgagttttccggattctcccgttcaatcgtgagtgctgttacccggctgatggggcaaaacaaggcgatgccggtgattattctggtctgcgcgttgttaacctatggcggggtttcgctattcgtggtggtatttgcggtctatcccttcgccgctgagatgttccgccagagccaaattccgaaacggctaatgcctgcgactatcgcgctgggcgccttcacttttacgatggatgcgctaccgggttcgccacagattcagaatattattccgactactttttacggtacgacctcctgggcagcgccctggcttggggtgctgggttccgcatttgtggctattggcggctggttatatctggaggcgatgcggcgtaaagcgcagcgcaggggagaaggttatggaagcgagttggtaaatgaacctgaaacaccggcagaccttaacttgccgcatccggtgatcgcgctgctgccgttgattatcgtcggcgtcgccaacctgctgtttacctggcttatccctcaggcgtacggtagccatttcctgattgacctgccgggactgaaagcgccgatggaaagcgacgtgaagaagatggtggcgatttgggcggtgatggcggcgttattgtgcggaattatcactatcttcttgtttgccgggcgtagcctgaagggtaagctggccgacggtagcaaagttgccgttggcggcgcgatgctggcggcgttgaatactgcatcagagtatggttttggcggggtgattgccgcgctgccgggctttgttcaggtggccgatgcgctaaaagcgatcccaaatcctttactcaatcaggcgattacgatcaatattttgtccgggatcaccggttcatcctccggtggaatgagtattgccctggcggcgatggcggatcgctttgtggagtcggcccatgctgcggggatcccgctggaagtgatgcaccgtgtggcgtcgatggcggcgggcggcatggatacattgccgcacaatggggcgatcatcactttgctggcggtgaccggactgacgcatcgccaggcctataaaccgattctcggcatcacgttgtttaaaatcctcggtgcctttttcattatcggcgtttactacgccaccggactggtataa

SEQ ID NO: 87671 - DNA, 1149 bp, Enterobacter aerogenes
gtgctattggcattactgttggtttcaggctgcgccggcacgctgtcgcaaatgagccctcccagcaatgaaaccagccaggtggggcataacgggcagcggctttccgtcgatactttcgtcagccaatacatgcgcgagaagcaggtcagcggcgtggtggtggcgattattcatcacaacggcccggcggagtttcactgcttcggcgtgacggatgataagcagcgctacccgataactccgcaaacgctttttgccctcggttcattaagtaaaggtgttaccgctgaagtggtgacgatgctggtcaacgaggggcgtttgcactggaacgatacgctgcaaaccctgctgccgccggggaccgtgctcagcgacgacgcccgcaagataaccttgctgcaactggtcacccatacctccgggctgccgcgtcagccgatgaacatgctgtcgcttgagcatctgttggcctatctcaacgacggtgagaatttctatcatgagctcgacgccgacggcgtgctgagctatctgagcaacttcaatgcgccgctggagcgcgagccgagttactccaacctgggctttgcgatacttgggtatcttctcaaataccaaaccggcgaatcgattgagacgctggcgtcacggatgatcttccggccattggcgatggggaataccagcttcctgccgcaaacgctgcatgaatatccgtggcgggcgctgggacacgcaggcgatcagccgaagtttaaaccgcgcggcgcgctgacgccggactggcagttcacgaataatatggttggcgcggcgagtctgtacagcgacgccggcgatctgattaactatgcccgcgctcacttcgcccccacggggcaggcggcactggatcgggcgtttaaagacgttagcgttgattattatccgcggcgggtcgaagcggcgaacattgcctgggtgaccgacacatttggtcggcagcgattaacttatcaggtgggttacatcggcggctattcgagctatatcggcttcgataaagcgaatcagaatgcggtggtggtgctgcaaaacagctttaactggagtaactacatcggccatcagatcctacgtaatctggtgacggagtcaaaatga

SEQ ID NO: 87672 - DNA, 1353 bp, Enterobacter aerogenes
atgagcaaacattatgattacctcgccatcggcggcggcagcggcggtatcgcctcgattaaccgtgcggcgatgtacggccagaagtgcgcgctgattgaagccaaagagctgggcggcacctgcgttaacgtcggctgcgtgccgaaaaaagtgatgtggcatgcggcgcagatccgcgaagcaatccacctgtatggcccggattacggtttcgataccaccatcaaccatttcgactgggataagctggttgccagccgcagcgcctatatcgaccgtattcatacctcttacgacaacgtgctgggtaagaataaagttgatgttatcaaagggttcgcgcgctttgtcgatgcccataccgtggaagtcaacggcgagaccattaccgccgatcatatcctaatcgccaccggcggccgcccgagccacccgaacattccaggtgtggaatacggtattgattccgacggtttcttcgaactgccggcgctgccgaagcgcgtagcggtagtcggcgcgggctatattgccgttgaactggccggcgtgattaacggcctcggcgcggaaacccacctgttcgtgcgtaaacacgcgccgctgcgcagcttcgatccgctgatcgttgagactctggtggaagtgatgaacgccgaaggcccacagctgcacacgaacgcaattccgaaggcggtagtcaagaatgccgacggcagcctgactctggcgctggaagatggccgcagccagaccgtagattgcctgatttgggcgattggccgcgaaccggcgaccgataacttcaacctggcggcaacgggcgttaaaaccaacgataaaggctacatcatcgttgataagttccagaacaccaacgtgccgggcatctacgcggtgggcgataataccggcgccgtcgagctgacgccggtcgccgtggccgcaggccgtcgtctgtccgaacgcctgtttaacaacaagccggaagagcacctcgactacagcaatatcccgaccgtggtcttcagccacccgccaatcggcaccgtcggcttaaccgagccgcaggcgcgcgagcagtacggcgacgacgccgtgaaggtgtacaaatcgtccttcaccgcaatgtataccgccgtgacctctcaccgccagccgtgccgcatgaagctggtctgcgtcggcccggaagagaagattgtcggtattcacggtatcggcttcggaatggatgagatgctgcagggctttgcggtggcgctgaaaatgggcgccaccaaaaaagacttcgacaataccgtcgccattcacccaaccgcagcggaagagtttgtcactatgcgttaa

SEQ ID NO: 87673 - DNA, 843 bp, Enterobacter aerogenes
atgctcagttatcgccacagctttcacgcaggcaaccacgccgacgtccttaaacacaccgttcagagtttgatcattgaatcgctgaaagagaaagaaaaaccgtttctctacctggacactcacgccggcgcgggccgctatcagctgagcggcgagcacgccgaacgtaccggcgaataccttgaaggcatcgcccgtatctggcagcaggacgatctaccgaccgagctggagccgtatatttcggtcgtcgaacacttcaaccgcagcggccaactgcgttactacccgggttcgccgcttatcgcgcgccaactgctgcgcgagcaggacagcctgcagatgaccgaactgcacccgagcgatttcccgctgctgcgcgccgagttccagaaagacagccgcgcgcgcgtcgataaagccgatggctatcagcagctgaaggccaagctgccgccggtttcccgtcgcggtctgattcttatcgacccgccgtacgaaattaaaaccgattatcaggcggtggtcaccgggatcaacgaaggttataaacgcttcgccaccggcacctacgcgctgtggtatccggtggtgctgcgcgcgcaaatcaaacgcatgatcaaagatttagaagccacaggtatccgcaaaattctgcaaatcgagctggcggtgcgtccggacagcgaccagcgcggcatgaccgcctccgggatgatcgtcatcaacccgccgtggaagctggaacagcagatgaataacgtgctgccgtggctgcacagcaaactggttccagccggtaccggtcacgcgaccgtgagttggatcgtaccggagtaa

SEQ ID NO: 87674 - DNA, 2043 bp, Enterobacter aerogenes
atgaccaatccattactgacgcctttttcattgccgccattttctgcaattaaaccggagcacgtggtccctgcggtcaccaaagcgctggatgattgccgggccgcggtggaaagcgcggtggcgcacggcgcgccgtatagctgggaaaatctttgccagccgctggcggaagtggacgatgtgctgggacgcatcttctcgccaatcagccatttgaattcggtaaaaaacagcccggagctgcgtgaagcctacgaacagacgctgccgctgctctccgagtacagcacctgggtcggccagcatgaaggcctgtataaagcctaccgcgacctgcgcgacggcgataactacgccacgttgaacaccgcgcagaaaaaggcggtcgataacgcgctgcgcgattttgaattatccgggattggcctgccggcagaagcgcagaaacgctacggtgaaatcgccgcgcgcctctctgagcttggcaatctgtacagcaacaacgtgcttgatgccaccatgggctggaacaagctggtgaccgacgtcgccgatctcgcaggcatgccggaaagcgcgctggccgccgctcaggcccaggcgcaggcgaaagagcaggaaggatatctgctgacgctggatattccgagctatctgccggtgatgacctactgcgacaatcaggcgctgcgcgaagagatgtatcgcgcctattccacccgcgcctccgatcagggcccgaacgccgggaaatgggataacagcccggtgatggcggagatcctcgcgctgcgtcacgagctggcgcaactgctgggctttgacagctacgcctttaaatctctggccaccaaaatggctgaaaatccgcagcaggtcctcgatttcctgaccgacctggcaaaacgcgcgcgtccgcagggcgaaaaagagctggctcagctgcgtgctttcgccaaagccgagtttggcgtcgatgaactgcagccgtgggatatcgcttactacagcgaaaaacagaaacagcatctctacagcattagcgatgagcaactgcgcccgtatttcccggaaaacaaagccgttaacggcctgtttgaagtggttaagcgtatttatggcattaccgccaaagagcgtaccgatgtcgatgtgtggcatccggaagtgcgtttcttcgagctgtatgacgaaaataacgagctgcgcggcagcttctatcttgacctgtatgcccgcgaacataaacgcggcggggcgtggatggacgactgcgtcggccagatgcgtaagctggatggttccctgcaaaaaccggtcgcttatctgacctgtaacttcaaccgcccggtaaacggcaaaccggcgctgttcacgcacgatgaagtgattaccctgttccacgagtttggccatggtctgcaccacatgctgacccgcattgatactgctggcgtttccggcatcagtggggtgccgtgggatgcggtcgagctgccgagccagtttatggaaaactggtgctgggagccggaagcgctggcgtttatctccgggcattacgaaaccggtgaaccgctgccgcaggaactgctggagaaaatgctggcggcgaaaaactaccaggcggcgatgtttattctccgccagctggagttcggtctgttcgatttccgtctacacgcggaatactcgccggagcagggggcgaaaatcctcgagaccctggccgagattaaaaagcaggtcgccgtggtgccgggcccaacctggggccgcttcccgcatgcgttcagccacatctttgcgggtggctacgcggcgggctactacagctacctgtgggccgatgtgttggcggcggatgccttctcgcgcttcgaagaagagggaattttcaaccgtgaaaccggtcaatcattcctcgacaatatcctgagccgcggcggttccgaagagccgatggagctgttcaaacgcttccgcgggcgcgagccgcagctggacgcgatgcttgagcattacgggatcaaaggctga

SEQ ID NO: 87675 - DNA, 753 bp, Enterobacter aerogenes
gtgaaaatctgcttaattgatgaaacaggcgccggtgacggcgccttatctgttttggccgcccgttgggggctggagcatgatgctgagaacccgatggcgctggtgctgacggacgagcatctggagctgcgtaagcgcgatgagccaaagcttggcggcatctttgtcgatttcgtcggcggcgcgatggctcatcgccgcaagtttggcggcggccgcggtgaagcggtagccaaagcggtgggtattaaaggcgattatctgccggacgtggttgacgccaccgctggcctggggcgcgatgccttcgtgctggcgtcggtcggctgccgcgtgcggatgcttgagcgtaacccggtggtcgccgcgctgctcgacgatggtttgaaacgtggctatgccgatgcggagatcggcggctggctgcaggagcgcttacagttgattcatgcatccagcctcaatgcgttgaccgatatcaccccgcgcccacaggtggtgtatctggatccgatgtttccccataagcagaaaagcgcgctggtcaaaaaagagatgcgggtatttcagtcgctggtggggccggatttagacgccgatggtctgttggcgccggctcgacagctggcaaccaaacgagtggtggtgaagcgtccggactatgcgccgccgttggcggatgtcgccacgcctaacgcggtagtgaccaaaggacatcggtttgatatttacgccggtactccggcgtaa

SEQ ID NO: 87676 - DNA, 1473 bp, Enterobacter aerogenes
atgaaaacaactgcacctacgggtttgctacagcaaccccgtccgttcttcatgattttttttgtagagttatgggagcgttttggctattacggcgtccagggcatcctggcggtgttctttgttaaacagcttggtttctctcaggaacaggcatttatcacctttggcgcctttgcggcgctggtctacggcctcatttccatcggcggctatgtcggtgaccatctgcttggaaccaaacgcacgctggtgctcggcgccatcgtgttggcaatcggctattttatgaccggtctgtcgctgctcaaacccgaccttatctttatcgcgcttggcactatcgccgtcggcaacgggctgtttaaagccaatcccgcgagcctgctatcaaaatgctatccgcctaaagatgcccgtctcgacggcgccttcaccctgttttatatgtcgattaacatcggttcgctgctctcgctgtcgctggcgccggttattgccgataagttcggctatgcggtgacctacaatctgtgcggcgccgggcttatcgtcgcgctgctggtctacttcgcctgccgcggaatggtgaaagatatcggttcaaccccggatcatcagccgctgagtttccgtaatctgctgtacgtgctggtcggcaccgtggtgatgattttcctctgcgcctggctgatgcataacgttaaaatcgccaacctggtgctgatcgtgctgtccatcgtggtgacgattttcttcttccgcgaagctttccgcctcgataaaaccggccgcaacaagatgttcgtcgccttcatcctgatgctcgaagcggtggtgttttatatcctgtatgcccagatgccaacctcgctgaacttcttcgccatcaataacgtgcatcacgacattctcggcatcgcaattaacccggtgagtttccaggcattgaacccgttctgggtggtggtcgccagcccggtactggcggctatctacacccgtcttggcaacaaaggtaaagacctgaccatgccgatgaaattcactctcggcatgttcctctgcgcgctgggcttcctgaccgccgcggcggccgggatgtggtttgccgacccgcaggggctcacctcgccgtggtttatcgtgctggtttatctgttccagagtctcggcgaactgctgattagcgccctgggcctggcgatggttgccgcgctggttccgcagcggctgatgggctttattctggggatgtggttcctgactcaggccgccgcgttcctgatgggcggctatgtcgcgaccttcaccgcggtaccggaaaatataaccgacccgctgcagacgctgccgatctacaccaacgtgtttagtaaaattggtctcgtgaccctggcggtgacggtggtgatggcctttatggtgccgtggctgaaccggatgattaataccccggccagcgccgagtaa

SEQ ID NO: 87677 - DNA, 438 bp, Enterobacter aerogenes
atggcttacaaacacattcttattgcagtagacctatcaccggaaagcaaagtgctggtagagaaagcggtttctatggcgcgtccctacaatgcgaaagtttccctgattcacgtggatgtgaattactccgacctctacaccggtcttatcgatgttaatctgggcgacatgcagaaacgcatctctgaagagacgcaccacgcgctgaccgagctttccactaacgctggctacccgattaccgaaaccctgagcggcagcggcgatctgggacaggtgctggtcgatgcgattaaaaaatatgatatggacctggtggtctgcggtcaccatcaggacttctggagcaagctgatgtcctccgcgcgtcagctgatcaacaccgttcacgttgatatgctgatcgtaccgctgcgcgacgaagaagacgaataa

SEQ ID NO: 87678 - DNA, 336 bp, Enterobacter aerogenes
atgatcagcactgttgcgctgttttgggccctgtgtatcgtttgtgtggtgaatatggcacgttacttctcatcgttgcgtgcattattggttgtgctacgtggttgcgatcccttgctctatcaatatgttgatggcggaggttttttcacctcgcatgggcagcccagtaaacaaatgcggctggtttggtatatctatgcccaacgatatcgcgatcatcatgatgacgagtttattcgtcgctgtgagcgtgttcgccggcagttcatcctgaccagcgcgctgtgtggtctggtgctggtgagtatgattgcactgcttatctggcattga

SEQ ID NO: 87679 - DNA, 1497 bp, Enterobacter aerogenes
atgctacatttatttgccggtctggatttacataccggactattattattgcttgctttagcttttgtactgttttacgaagcgattaacggttttcatgataccgcaaacgcagttgcaacggtgatttacactcgcgcaatgcggtcgcagcttgctgttgcgatggcggcactcttcaactttttcggcgttctgctgggcggtctcagcgtagcctatgccatcgtgcatatgctgccaacggacctgctgcttaacatgggttccgcacatggcctcgccatggtgttctctatgctgctggcggcaatcatctggaacctcggaacctggtatttcggcctaccggcctccagttctcacaccctgattggcgccatcatcggtattggtttaaccaatgcgctgatgaccggtacttcagtggtggatgcgctgaatatcccgaaagtcatcggcatttttgcctcacttatcgtctcgccgattgttggcctggtggtagcgggcggcctgattttcattctgcgtcgttactggagcggtaccaaaaaacgcgctcgtatacacctgaccccagcggaacgcgaaaagaaagacggtaagaaaaaaccgccgttctggacccgtatcgcgctgatcctgtccgctatcggcgtgtcgttctcgcacggcgccaacgatggacagaaaggcattggtctggtcatgctggtactgattggcgtcgcgccggcgggcttcgtggtcaacatgaacgcgtctggttacgaaatcactcgtacccgcgatgcagtcaacaacgtggaaaccttcttccaacagcgccctgagctgctgaagaaagccaccggcgttgatcaactggttccgtcaccggaaaccaataccgcggccaacggcgagtttcactgccatccggcgaacaccatcaacgcgcttgaccgcgtgaagacaatgctcaccggtacggaaagctacgatacactgtcagtggatcagcgcggccagctgcgtcgcattatgctctgcatctccgacaccactgacaaagtggccaagctgccggatgtgagcactgacgaccagcgcctgctgaagaaactgaaaaccgatatgctgagcaccatcgagtacgcgccaatctggatcattatggcggtcgcgctggcgctgggtattggcaccatgatcggctggcgccgcgtggcgaccactatcggcgagaagattggtaagaagggtatgacctacgcgcaaggtatgtccgcccagatgaccgccgcggtttctatcggccttgccagctacaccggcatgccggtttccaccacccacgtgctctcttcctcggttgcggggacgatgctcgttgatggcggcggtctgcagaagaaaaccgtcaccagcatcctgatggcatgggtactcaccctgccggcagccattttgctgtcaggcgtgctgtactggctggctctgaagcttatctaa

SEQ ID NO: 87680 - DNA, 1194 bp, Enterobacter aerogenes
gtggaaaggtttgatgccattgtgatcggcgccggtgcggcgggaatgttttgtgcggcgcaggcggggcagttgggctgccgggtgctgctgctcgataatggcaaaaagccggggcgcaaaatcctgatgtccggcggcggccgctgcaactttactaacatgtatgtcgaacccgcggcatatctcagccaaaacccgcatttttgcaaatctgcgctggcgcgctatacccagtgggactttatcgagctggttggcaaatatggtattgcctggcatgagaagaccttaggtcagctgttttgcgatgattccgcggagcaaatcgtcaatctgctgctgtcggaatgtgaaaaaggcggcgtacagatccgtctgcgcagcgaaattctcatcgtcgaacgcgatgaacaaggctaccggctacaggtgaacggcgaaatgctgacggcgaagaagctggtgatcgcttccggcggcctgtcgatgccggggctgggcgcgtcgccgtttggttacaaggtggccgaacagtttgatctgaaggtgctgccgacccgcgcgggtctggtgccgtttaccctgcataaaccgctgcttgagcagctgcaggtgctttccggcgtttcggtgccctctacgattaccgccgagaacggtacgctgtttcgcgaaaacctgctatttacccatcgtggcctttccggcccggcggtgctgcagatttccagctactggcagcccggcgagtttgtcaccgtcaacctgctgccggactgtgatcttgaggcgttcttcaacgagcagcggggcgctcatcccaaccaaagcctgaaaaacaccctcgcgatgcagctgccgaagcggctggtcgaatgtttacagcagcttgggcagatacctgatgtgacactgaagcaactgaacgttcgcgatcagcaggcgctggtggagacgctaaccgcgtggcgcgtgcagccgaacggaactgaaggttatcgtaccgcggaagtgaccctcggcggcgtggataccaatgagctttcgtcacgcaccatggaggcgcgcaaagcgccggggctttactttatcggtgaagtgatggacgtcaccggctggcttggcggctataacttccagtgggcgtggtcaagcgcctgggcctgcgcgcaggcgctggcggaagcttaa

SEQ ID NO: 87681 - DNA, 1014 bp, Enterobacter aerogenes
atgtcttccattcaactctgcgccgcgcatcaggcgacctctggcttcgacggcgatgcgatcgcccagtacatgcgtaccgactttattacgctgcaggaacatttcagcgtccatgaggcgcgtgaacactttatctcgcagctcgccagcgacgatattcccggccaggtatttgtcgtcgccggtaacaagctgcgcggcagcttatcagtcaaaaaacttttgcaggaggcagaggtaggccagtctattcgctacctgatggatagctgtctgtttcgcgtcaaacccgacgatgagcgccctcaggttattgccgaactcaccgagcgcggcctcgatctggtgccggttgtcgataaaggcgagctggtcggctgcctgatggaaaaagaaattgcccatctgctggaggatgacgtcaccgaagacgcccagctgcagggggcgacgctaccgctggaaaaaccgtatctggaaatcagtccgtggacgctgtggaagaaacgctcggtctggctgctactgttatttgttgccgaagcctacaccagcagcgtgctgcagcattttgaagaggcgctggaatcggccatcgcgctggccttcttcatcccgttactgatcggcaccggcggcaacagcggaactcagatcacctcaacgctggtgcgttcgatggcgctgggtgaagtccgtttacgtgacatgggacgggttatccgcaaagaggtgtcgacctcgtttctgattgccctgaccctgggtctggcgggctgcctgcgcgcctggatgatggggattggcatggaaatcacgctgatcgtcagcctgacgctggtctgcattaccctgtggagcgcggtggtgtcttcggttattccgatgttgcttaagcggatcggtatcgacccggcggtggtttccgcgccgtttatcgccacgctgatagatggcaccgggctgattatctatttcaaaatcgcccagtattttcttgggttgaactga

SEQ ID NO: 87682 - DNA, 276 bp, Enterobacter aerogenes
atggagcagcaggttttatctttacgtaaaaaacagcgcaacacgctggagcagctgtttaaaacccccgtgccgcagggtattaaatgggccgacattgaatcgctaattaaagcgttaggtggggagattaaagaaggacgcggctcgcgctgtaaatttttgttgaaccacagcattgccagctttcacaggcctcacccttcgccggatactgacaaaggcgccgtggagagcgtgcgcgattggttaatcactataggagtaaaaccatga

SEQ ID NO: 87683 - DNA, 360 bp, Enterobacter aerogenes
atgatcaaacctaaaacgccaaattcaatggagattgccgggcagcctgctgttatcaactacgtgcctgaactcaatgcattccgcggtaagttcctgggattatcaggatattgcgattttgtttccgatagcattcaagggttacaacaggagggcgagatatcattacaggaatatcttgctgattgtcgtgaagcgggcatcgagccttatgctcagccggaaaagctgaaaaccttcacattgcgctatcctgaatcatttggtgagcgtcttagctccgccgctgcagaggagcaggtttccgtaaatacctggatccttgagacgctcaatgaacgtctcaaacaggcttaa

SEQ ID NO: 87684 - DNA, 402 bp, Enterobacter aerogenes
atgcagcgcgtaaccctgactctggatgatgatctgctggccgcgctcgacgctcacagcgcccaccgcgggtaccacaaccgctcggaagcggtgcgcgatattctgcgtgacgcgctccaccacaatccgctacagcaggcggcgcagcgcggctatgcggtcctgtcgtacgtgtatgagcatgaaaaacgcgaactggcgagccggctggtcgcctcttcgcatcagcatcacgatctctcggtcgccacgttacatgtccacatcaatcatgatgactgtctggagatcgcggtgctaaaaggcaacatggacgaagtacagcattttgccgacgaggtgattgcccagcgcggcgtgcggcatgggcatttgcggtgtttagcggatgataattaa

SEQ ID NO: 87685 - DNA, 792 bp, Enterobacter aerogenes
atgaatttactcagcgtgaacgcagtgagccacgattatccccaccacggtgcggtattgcgcgatatccagttcgacatcgccctcggtgaaacggtggcgctgctcgggcgcagcggctgcggcaaaagtaccctggcgcggatgctggtcggtctcgaaacgccgcggtatggcgatgtcgcctggcgcggcgcatcgctgacctccctgaagggggaggcgatcggcgcctttcgccgcgatattcagctggtgtttcaggatgccattagcgcggtgaatccgcgcaaaacggtgcgcgagattatcagcgagccgctgcggcacctgtttagtttatcgcgtgaagagcgtacgcagcgggtggaggagatgctgctggcggttgacctcgccccggcgctgctcgacaagcgtccggcgcagctcagcggcggacagctgcagcgcgtgtgcctggcgcgggcgctggtggtccggccgcagctattaattctcgacgaagcggtatcgaatctcgatctgatgcttcaggcggatattatcgccctgctcaaacgcctgcaggcgcagttcgccaccgcctgcctgtttatcacccatgacctgcggctggtggagcgtttttgccagcgggtactggtgatggatagtggacgcctcgtcgaaaccgccgcggttagtctgccgctgcgccttacatccgctgccggacaggcgctacaacgcgcggtactcccgccctttccccgcactctgcttaacgaggccatgctatgcagcgcgtaa

SEQ ID NO: 87686 - DNA, 765 bp, Enterobacter aerogenes
atgccgcaaaagatccaactggaacaactttcgctcgtcgccgaccgtccgctggtcagcgacgtttccctaaccctgcgtcgcggtcaggtactggcgctgctcggcagtagcggcagcggtaaatcgctgacctgcgccgccacgctcggcattttaccgcccggcgtcagacaaaccgcgggccgggtgctgctcgacggtatcccggtatacggtgaacagctgcgcggcgcgaccatcgccaccattatgcaaaacccgcgcagcgcctttaatccgctgcactccatggcggcgcatgcgcgggaaacctgccgggcagcgggccacgaggccaataacgtcgcgctgctggcagcgatggaagaggtggggctggaaaatccgctctcgctgctcaagcgctatcccttcgagatgagcgggggcatgctgcagcggatgatggtggccctggccctgctcagtcgcgcgccgtttatcatcgccgacgaaccgaccaccgaccttgatgccgtcgcccaggcgcgcattctcgacctgctggcggatatcgtcgccaaccgcgggcaggggctgctgctggtgacccatgatatgggcgttgtcgcccggctggcgcatgacgtggcggtgatggaaaacggccgtcttgttgaacgctgcgacgttaacacgctatttagcgccccacagcacccgctcagccagcgcctgctggccgcccatctggcgctatatggcctggagaaaacaccatga

SEQ ID NO: 87687 - DNA, 834 bp, Enterobacter aerogenes
atgacgctgttcgcgaccttccgctggccggtaaaactggcgctactcactattgcgctgctggcggcaatcgccatgagcagcggctggtggctgccctatgacccggcggccatcgatctccatcaacgtctgctctctccgggcgacgcccactggctcggcaccgatcatctcgggcgggatattttctcgcgccttctcgccgccacccgcgtctcgctgggcgcggtgatggcctgcctgctgctggtgctgctgatcggccttacggtgggcggcgccgccgggatggtgggcggacgtgtcgatcgcggcctgatgcgcctggccgagctgtttatgaccttcccgacttcaatactgtcattctttatggtcggtgtactcggtaccggtcttagcaacgtgattatcgccattgcgctgtcgcactgggcctggtacgcaaggatggtgcgcaatctggtggtctctctgcgccagcgcgagtttattctcgccgcgcgcctgagcggcgcgggacattggccattgtttcgtgaccatctggccggcgcggtgatcccttcgctgctggtgctcgcctcgctggatatcggtcatatgatgctccacgtagccgggatgtcattcctcggcctcggcgtcagcgcgccgacggcggaatggggagtgatgatcaacgacgcccgccagtacatctggacgcagccgctgcaaatggtctggcccggactggcgctgtttatcagcgtgatggcttttaatctggtgggcgacgcgctgcgcgatcgtctcgatcctcagctgatcgcggagcataaccactga

SEQ ID NO: 87688 - DNA, 948 bp, Enterobacter aerogenes
atgatgctgaaatatcttcttcgccgcctgctaccgctaccgctgatgctgcttgccgcctcggcgatcatcttcctgttattacgtcttggcgccggcgacccggcactggactatctgcgcctctctaacgtgccgcccaccagcgaaatgattgccgctacccgcgagcagctcgggctcaatcagccgctggcgctgcagtatctacactggctgtggcgcgcgctgcatctcgattttggcgtctcctacgccagccagcgcccggtgctggacgacctgctgcattttctgcccgcgacgctgcagctcaccggcgcggcgctggtgattattctgctgacctcgctaccgctggggatctgggcggcgcggcatcgcgaccgcttacctgatttcgccgtacgattgattgccttcctcggcgtctcaatgcccaacttctggctggcatttttgctggtaatgctcttttccgtccatctgcgctggctaccggcgatgggctacggcggctggcgacatctgctgctaccggcgttttccatcgccctgatgtcgctggcgatcaatgcccgtctgctgcgcgccagcatgctggaagtgtccagccagcgccacgtggtctgggcgcgtctgcgcgggctgagcgagggtcaggtggagcggcgacacgtgctgcgtaacgcgacgttgccggtagtgacggcgctgggtatgcacatcggcgagctaatcggcgggacgatgatcatcgaaaatatcttcgcctggcccggcgtcggtcgctatgcggtttccgcgattttcaaccgcgactatccggtgatccagtgctttaccctgatgatggtggcggtgttcgtgctggccaatctggcggtcgacctgcttaacgccgcgctcgatccgcgcctgcgccgccatgaggaggccgccgtatga

SEQ ID NO: 87689 - DNA, 1569 bp, Enterobacter aerogenes
ttgtctattttccgcaccaccttgctggcgctctgcgcctgcattcctctgctcgcgcccgccgccatgcatgaaatcgccatcgcctggccggttaacgtcggtcctctcaatccacatctgtatacgccgaaccaaatgttcgcccaaagtatggtgtatgagccgttagtcaaatatcaggccgatggccgggttacaccctggctggctacccgctggatccactcagccgatggtaaaatctggcgtttcaccctgcgcgatgatgtctacttctccaacggcgaaccgtttaacgcccaggccgcagtggccaatttccaggcggtgctggccaaccgccagcggcacgcctggctggagttgaccaatcagataaccgacgttcaagcgctcagcgataacgaactacaaatcaccctgaaaagcgcctactacccgttcctgcaggaactcgcccttccccgcccgtttcgttttatcgccccctcgcagtttgttgacggtagtacgcagcgaggcatcaaggcgcccatcggcaccggtccgtggatgctgtccagttcgcagcttaatcagcaggatgtgctggtacgcaacccgcgctactggggcaaaaaaccggcgcttgagaaagtcaccgtgaaagtgatccccgacgccaccagccgggcggtcgcctttgaaaccggtgaagttgatctgctgtacggtgatgaagggctactgccgctggatacgttcgcccgttttcgccagcaggacgagtatcgcacgcgtctttccgccccgacgcaaaccgtgatgctggcgctcaatacgctgcaagcgccaacgaatgaactggcggtacgcgaggcacttaactatgccgtcaataaacaggcgctcattgacggcgtgctgtacggcacccaacaggttgccgacacgcttttcgcgccctcggtaccttacgcgccggatgacctgccgccgcgccgcttcaatccggataaggcccgtacgctgctggaaaacgccggctggacgctaacgcccggcaaggatattcgtgaaaaagacgggcacccgttgcatcttgaactggcgtttatcggcaccgatgcgctggccaaatcgatggcggaaatcatccaggccgatctgcgccaggtagggatcgatgtcgggctggtcggcgaagaggagagcagtatctatgctcgccagcacgatggccgcttcacgatgatcttcaaccatacctggggcgcgccgttcgacccgcacgcgtttatgagctcaatgcgcgtcgcttcgcacgccgactatcaggcgcagcgcggactgccggataaagccgtgattgataaagagatcggcgaggtcctgactaccaccgacgagggccgccgtcgcgaactgtatcgcgatatcctcacccgtctgcacaacgaagcggtctatctgccgataagctacgtctcgctgatgtccgtcgcccgcaaaacgctgggcgaagtgcccttcgcgccggtgaccaccgatctgccgttagagctgattacgccggtggcgccatga

SEQ ID NO: 87690 - DNA, 861 bp, Enterobacter aerogenes
atgcacaagaccacgctggaacaatgggcgctattggaaaaggtgattgagctgggcagttttgccaaagccgcggaagagaccaaccgcagccagtcttcggtgagctataacctggcgctgctgcaggaacgtttaggggtggcgctgctggcgccgtccgggcgacgggcggtgctgacgcccgctggcgaactgctgcttaatcaggtgaaaccgctactgaaggccttttcgtgggttgagacccacgccgcgacgctgcgcaacggcgcgcgcacccgcctggatctggtcgtcgacagcatttttccccgccagcggctcttcgccattttgcgacagtttcagcaacgctacccgcaaactcaggtccggctgaccgaagtgctggaaaacatcgatgaggctagcgccgcccgcagcgaggccgacgtgatggtcttaacgcgtcgccaggatattaccggacgcggcgaatggctgatgaatatcgattttatcgcggtcgcccatcgcgaccatccgctgtcgcaatcggaagaaccgctggacgacaacgcgctggccccctggccgctgatccgcattgccgaccgtagcggcgacgcctcatccacgcgcgatgcctggaccttttctaccattgatgccgctatcgatgcggtgctgtatcaggtgggattcggttggttgccggaggaacgaatccgcgcacacctggaacagggcgtgctgaaagcgctgccgttgagccatggcgctcgccgcgccacgccgctgcatttgatagtgaagcgggatctggcgccgctcgatgaacaggtcaccaccctgctggatttgttcagacaatcgtaa

SEQ ID NO: 87691 - DNA, 504 bp, Enterobacter aerogenes
atgagcacttttgacaaacatgacctcagcggttttatcggtaaacatctggtttatacctacgacaacggctggaactacgaaatttacgttaaaaatggcaccactctggactatcgtattcacagcggtatcgttgctaatcgttgggtgaaagaccagcatgcgtacatcgtgcgggtaggcgaaagcatttataaaatttcctggactgaaccaaccggtaccgacgtcagcctgatcgtcaacctgggcgacaaactgttccacggcaccatattcttcccccgctggatcatgaataacccggaaaaaaccgtctgcttccagaacgatcatattccgttaatgaacgcttatcgtgacgccggcccggcctacccgaccgaagtgattgatgaattcgcgactatcacctttgttcgcgattgcggcgcggataataacgatgtaattaattgcccggctaatgaattacccgcagattttcctgcaaatttgtaa

SEQ ID NO: 87692 - DNA, 1140 bp, Enterobacter aerogenes
atgagcgaatttctgccgttttcgcgcccgtcgatgggcgacgcagagctggctgcgctgcgtgaagttttgcaatcaggatggatcactaccggtcctaaaaaccaggcgctggaagaggcgttttgccaactgaccggcaaccgccacgccatcgccgtcagctccgctaccggcggtatgcacgttacgctaatggcgatgggcattggccctggcgacgaagtgatcaccccttcgcaaacctgggtctcgacgctgaacatgatctgtctgctgggcgctacgccggtgatgatcgatgtcgaccacgacaatctgatgattacccctgaggcggtggaagcggcgatcacttcgcggacgaaagcgattatacctgtccactacgcgggcgcgcctgcggatatcgatgcgatccgcgccgttggcgagcgccacggtataccggtaatcgaagatgccgcgcatgccgcgggaacgcactataaaggccgccacgtcggctggcgcggcaccgcgattttctcgttccacgcgatcaaaaatatgacctgcgccgaaggggggcttatcgtcaccgatgatgacgagctggcttcccgcatccgcagcctcaaattccacggcctgggcgttgacgcctacgaccgccagacccacggccgcgcaccgcaggcggaagtgattacccccggcttcaaatacaatctggccgatatcaacgccgcgctggcgctggtgcagctggataagctggcgcaggcgaatcaacgtcgcgctgaaatcgcccaacgctacctgcgcgagctggcggataccccctttaagccgctgaccattccggcatgggatcaccaacacgcctggcacctgtttattatccgcgttgatgaagcggcctgcggcatcagccgcgatgtcctgatggaaaaactcaaagccatgggcataggcaccggtctgcacttccgcgcggcccatacgcaaaagtattaccgcgagcgttttcctgaagtttcgttaccgaataccgaatggaacagcgcgcgcatttgttctatcccgctgttcccggatatgaccgacgacgatgtcacccgcgtcattaccgcgctgcatcagttgtcaggacgttga

SEQ ID NO: 87693 - DNA, 984 bp, Enterobacter aerogenes
atgcttacttatcctcccgtaaaaaaagtctcggtggtgatcccggtttataacgaacaggatagtctgccggagctgctgcgtcggaccgacgccgcctgtgcgacgctagggcgccaatatgaaattctgctgatcgacgacggcagcagcgacgattccgcgcgcatgctgaccgaggccgccgaagccgaaggcagccacgtggtggcggtgctgttgaaccgcaactacggccagcactcggcgattatggccggtttcagccatgtcaccggcgatctgatcatcaccctcgatgccgacctacaaaatccgccggaagagatcccgcggctggtggcaaaagccgatgaaggctatgacgtggtcggtaccgtgcgccagaaccgtcaggacagcatcttccgtaaatctgcctcgaagatgattaaccgcctgattcagcgaaccaccggtaaagccatgggcgattacggttgcatgttgcgtgcctatcgccgccatatcatcgacgccatgctcaactgccatgagcgcagcacctttatcccgattctggcgaataccttcgcccgccgggcggtcgagatcccggtgatgcacgccgagcgcgaattcggcgactccaaatatagcttcatgcgtctgattaacctgatgtatgacctggtgacctgtctgaccaccaccccgctgcgtttactgagtattttcggcagcgtgatagccctgttgggcttcgccttcggcctgctgctggtggtgctgcgtctggccttcggtccgcaatgggcggcggaaggggtgtttatgctcttcgccgtgctgttcatgttcatcggcgcccagtttgtcggtatgggcctgctcggggaatatatcggccgcatctataacgatgttcgcgcccgtccccgttactttattcaacgtgttgttcgccagccggaaacggcgtctcaagaggaagatcgttcatga

SEQ ID NO: 87694 - DNA, 1986 bp, Enterobacter aerogenes
atgaaagcagtagtcttcgcttatcacgatatgggttgcgcaggtattcagtcactgctgggtgccgggtatgacatcgccgctattttcacccatccggataaccctggcgaaaaccaattctttggttccgttgcccgcattgccgccgagcaaggtatcccggtatgggcgccggaagatgttaaccatccgctgtggattgaacgtattcgcgagatgaagccggatgtgctgttctcgttctactaccgcaacctgctgtgcgatgagatcctcaatatcgcgccgaagggggctttcaacctgcatggttctctgctgccgaaataccgcggtcgcgcgccgctgaattgggtactggtcaacggcgaaagcgaaaccggagtgaccctgcaccggatggttaaccacgccgacgcgggcgatatcgtcgctcaacaagctgtggctatcggcccggatgacgcggcgctggcgctgcaccgtaagctgtgtgccgctgcctccgatctgctgggccaggcgctgccggctattcgtgagggtaagactgaggagcgggcgcaggaccacagccaggcgacctacgttggccgtcgtaccccggaagacgggcgtctcgattgggacaaaccggcgcagactctgcacaacctggtgcgcgcggtatccgatccgtggccgggcgccttcgcctatgccggcgcgaacaaatttatcgtctggaaatcccgcgtgcgcgccgatctgccggcggcgaaacccggcaccgttatctccgtcgcgccgctagtggtttcctgtcagcagggggcgctggaaatcgtcaccggccagaccgaacgcggcgtttacatgcagggcgcccagctggcgcaggcgctggggctggtgagcagcgcggtgctgagcagcaaaccggtggtggcggtgaagcgccgtacccgcgtgctgatcctcggcgtcaacggctttatcggtaaccacctgaccgagcgcctgttgcaggacgacaactatgagatttacggcctggatatcggctccgacgccatcagccgtttccttgactgcccgcgtttccacttcgttgaaggcgatatcagcattcactccgagtggatcgaataccacattaagaaatgcgatgtggtactgccgctggtcgcgatcgcgacgcctatcgaatacacccgtaacccgctgcgcgtgttcgaactggatttcgaagagaacctgaagatcatccgtgactgcgtgaaatacaataagcgcattatcttcccgtcgacctcggaagtgtacggcatgtgcaccgacaaaaacttcgacgaagataattccaatctggtggtcgggccgatcaacaaacagcgttggatctactcggtttctaaacagctgctggaccgcgtgatctgggcctatggcgataagaacggcctcaagttcaccctgttccgtccgttcaactggatggggccgcgtctggataaccttaatgccgcacgtatcggtagctcccgcgccatcactcagctgatcctcaacctggtggaaggttcgccgattaagcttatcgaaggcggcaaacagaagcgctgcttcaccgatatcagcgacggtatcgaagcgttgttccgcatcattgagaacaaagatggtcgctgcgatggtcagatcatcaacatcggtaacccggaaaacgaagctagcatcaaagagctggcggaaatgctgctcgcctgcttcgagcgccatccgctgcgcgatcgcttcccgccgttcgccggcttccgcgaagtggaaagcagcgattactacggtaaaggctaccaggacgttgagcatcgtaaaccgagcattcgcaacgcgaaacgctgcctgaactgggaaccgaccgtcgagatggaagagaccgttgaacacactctggacttcttcctgcgcaccgttgagctcacggacgataaaaactcatga

SEQ ID NO: 87695 - DNA, 903 bp, Enterobacter aerogenes
atgaaacaagtcggcttacgcatagatgtcgatacctttcgcgggacgcgtgatggcgtaccgcggctgctggccctgctgggcaagcacgggattcaggcaagcttctttttcagcgtcgggccggacaatatggggcgccatttatggcgcctggtaaaaccgaagtttctgtggaaaatgctgcgctccaacgcggcctcgctgtatggctgggatattctgctggccggcaccgcgtggccggggcgcaggattggcgcgggtaacgaagaggttattcgcgccgccgcgcacatccatgaagtgggcctgcacgcctgggaccactacagctggcaagcgtggagcggcgtctggccgcaggaacgtctgacgctggaaattgaacgcggtctgctcgaactggaacgcattatcggccgcccggtgacctgctccgccgtcgccggctggcgtgccgaccagcgggtggtaaaagcgaaagaatccttcgatttcctctacaacagcgattgtcgcggcacgcggccattcctgccgcagattggcggcgggggctccggcaccgtacaaattccggtgacgcttcccacctgggatgaagtcgtcggtagcgctgtggataccgccggcttcaaccgctatctgctggactgcattcatcgtgacaagggaacgccggtctataccatccacgccgaagtggaaggcattgcctacgccgatcagttcgatgcgctgctgaccatggcggaggaagaagaaatacaattttgcccactgagccagctgctgcccgctgactttagcgagctgccgtcaggcaaagtggtccgtggtgagctggctggccgggaaggttggcttggacgtgaacaattactgggctcgggtgtatga

SEQ ID NO: 87696 - DNA, 1656 bp, Enterobacter aerogenes
atgaaaagcattcgttatggcatctctctggttgtactctttgcgctgtattacttattgccgttaaatttccgtttgctgtggcagcctgatgaaacccgctatgccgagatcagtcgtgaaatgctggcctccggcgactgggtggtgccgcatctgctgggcctgcgttactttgaaaagccgattgccggttactggattaacagtattggccagtggctatttggtcataataactttggcgtgcgtttcggttcggtcttcgccattaccgtcagcgcgttgctggtggcgtggctggcgtggcgtattttccgcgataaacgcgtggcgatcctgtcgccggttatcttcctgaccgcgatgctggtatacggtatcggaacctatgcggtgctggatccgatgatcaccatgtggctggcgctggcgatgtgcagcttctggggagcctcccaggcgcagagccgcagcgggaagatgttgggttatgtcctgctgggagtcgcctgcggtatgggggtgatgaccaagggcttcctcgcgctggcggtaccggtggttggcgtgctgccgtgggtgatggcgcgtaaacgctggcgcgaagtgctgacctacggctggctggcggtggcggtctgtacgttggtggtgctgccgtggggattggctattgccaatcgcgaacccgatttctggcgctatttcttctgggtcgagcatattcagcgtttcgctgagaaagacgcgcagcataaagcgccgttctggtactacattccgttcctgattgccggtagcctgccgtggttggcgctgttaccgggcgcactgaagcgcggctggagcgagcgcgatgatgcccgcggcgcgctgtatctgttaggctggatagcgatgccgttcctgttcttcagcatcgccaagggaaaactgccgacctacattctgccgtgctttatgccgctgtcgattttgatggcccgctacgcgctggatgccgcgaaggcgggggcgaaagcgctgcgcatcaacggcatgatcaacctcggttttggtctggtcggcctggtcgccgtgctggtggtctcaccgttgggcgtcatgcataagccggtgtggaccaggatagagttgtataaatgtctgctggcggcgattgcctttgccgtatgggcgctgatgggctggctggcgataaaagacaacggtcgtcgctggacgctggccgccatctgtccgctgggagtggcgctgctggtgggcttcgctatcccggatcgggttatcgacagcaaacagccgcagtttctggtggatattgttagcgaatcgctggcgccaagccgctatgtactgaccaacagcgtcggtatcggcgcggggctggcgtgggagctcaagcgtgacgacatcatcctgtatgaaaggcagggggagctaaaatatggcctcggatggccggatgcgcagagcaaattcgtgtcgactcaagcttttgctgattggctggcggcgcaccgccagcagggaccgatctcactggtgctgctgatggataaaggtgaaacgatgaacgaactggcgttaccgaaacctgataactcctacgagctggggcgcgtggtgtttattcagtatctgccgcaatga

SEQ ID NO: 87697 - DNA, 339 bp, Enterobacter aerogenes
atgagtgtctggttctgtctgatactcgccagtctgcttagctgcgccggtcagctgtgccagaagcaggcgacccggccgtcccgtagcgggcggcgcgggcggcatattttgctgtggctgggcttagccctgttggcgctcggcggcagtatgctgctgtggctgggggtgctgcaggcgatcccggtcggtatcgcttatccgatgctgagcctcaactttgtctgggtaacgctggcggcatggggtatctggcgcgagccggtggcgcgccgccactggcttggcgtcgggctgatcgtcgtcggcatcgccgttctggggagtagcgtctga

SEQ ID NO: 87698 - DNA, 384 bp, Enterobacter aerogenes
atggggttaatctgggcgttattgagcgtcgggctggtcagcggcgcgcagctgttactgcgcagcgcgatggttgagctgccgccattgaccgatatcctggctttcctcaatcatctactgcatatgcgcaccggtaccttcagcctgggttttggcctggttggctatctgctgtcgatggtctgctggtatttcgcgctacaccgcttgccgttggccaaagcttacgcgctgctcagcctgagctacattctggtgtgggccgccgccatctggctgcccggttggcacgagccgttttactggcaatcgctgctgggcgtgctgattattatcgccggcgtgctgactatcttctggccggccaagccgcgccgttga

SEQ ID NO: 87699 - DNA, 603 bp, Enterobacter aerogenes
atgtatcagcttatccttggccaaatctcaacgcttagcgccctaccgttaccgactgggttagcggctcaggcccctgacggcccgcggcgggccagctggcttgccgggcgcgcgctgctggcgcatgcggcggccccgctggcggatattgcgtatggcgagcagggcaaaccggctttcccgcccggctgcgggcggtggtttaaccttagccacagcggcgaccatattgccctgctgctgagcgatgaaggcgaggttggctgcgatatcgaagtgattcgtccgcgcaacggctggcagcggttggctaacgccctgtttagcgagggcgagcatcaggaactggagcgcgaaccgccggagcggcagctagccgccttttggcgaatctggacgcgcaaagaagcgctggtaaagcaacgcggcggcagcgcctggcaaatggcctctgttgacagcgcctttcgcggcgcgctgtcattaagccagattcagtatcaagggttaagtattgcggtctgtacgccaacgccgttctcgctgacggcggcgcacattcaaggtttcaacggcgcggcttggccggccagaagatag

SEQ ID NO: 87700 - DNA, 1230 bp, Enterobacter aerogenes
atgacacgccgtgtggtcattaccgggatgggtggcgtcaccgcatttggcgaaaaatggcaggatgtctcggcggggctgaagagatataaaaacgccgtacgcgccatgccggagtggcgtatttacgacgggctgcatacgctgctgggcgcgccgatcgatgatttcaccctgcccgaccactatacccgcaagcgcattcgcgcgatggggcgcgtatcgttgctctccacccgcgccactgaactggcgctggagcaggccgggcttatcgacgatgccatactgagtaacggcgaaaccggcatcgcctacggttcatcaaccggcagtaccgccccgatgagcgaatttgccaccatgttgacggaaaagcacaccaataatattactgctaccacctacgtgcagatgatgccgcataccaccgccgtcaatacggacctgttttttggcctgcgcggccgcgtgatcccgacgtccagcgcctgtacctccggaagccaggcgattggttacgcctgggaagcgattcgccacggctatcaaacggtgatggtcgccggcggcgcggaagagctttgcccgtcggaggccgcggtattcgatactctgtttgctaccagccagcgcaatgagcagcccgacattaccccctccccctttgatgtgctgcgcgatgggctggtgattggcgaaggggccggtactctcattctggaagaactggagcacgccaaagcacgcggggcgaccatttacggcgaaatcatcggtttcgccaccaactgcgatgccgcgcatatcacccaaccgcagcgtgaaaccatgcagatctgcatggaacaatcattaaaaatagcaggcctgagcgcccgggatatcggctacatttcggcccacggcaccgcgaccgaccgcggcgatatcgccgaaagccaggcgacggcggcgatttacggcgatagcgtgccgatctcctcgctgaaaagctatttcggccatacccttggcgcctgcggggcgctggaagcgtggatgagtctgcagatgatgcgtgagggctggttcgcgccaacgctgaatttgcataatccggacgccaattgcggagaactggattacatcatgggcgaagcgcgccagattgattgtgaattcctgcagagtaacaacttcgccttcggcggtattaacacctcaatgattattcagcgctggtcctga

SEQ ID NO: 87701 - DNA, 732 bp, Enterobacter aerogenes
atgagtcgttcagttttggttaccggcgccagcaaaggtatcggtcgcgccatcgcctgccagctggcggcggacggttttatggtaggcgtccactatcatcgcgacgcgtcaggcgcgcagcagacgctggaggcgattaccgccgccggcggcgcgggacgtctgctgagctttgatgtcgccaatcgcacgcagtgccgcgaagtccttgagcaggatatggccgaacacggcgcgtggtacggcattatcagcaacgccggcatcgcccgcgacggcgccttcccggcgctcggcgaagacgactgggacgcggtgatccacaccaacctcgacagcttctacaacgtcattcatccgtgcatcatgccgatgattagcacacgccagggcgggcgtatcatcacgctctcgtccgtatccggcgtgatgggcaaccgcggtcaggtcaactatagcgccgccaaggcggggatcatcggcgccaccaaagcgctggcgattgaactggcgaagcgcaaaatcaccgtgaactgcatcgcccccgggcttatcgacaccgggatgatcgaaatggaagaggccgcgttgaaagaggcgatgtcgatgatcccaatgaaacgcatgggacaggcggaagaagtggcggggctggcgagttatttaatgtcggatgtggcgggttatgtcacccggcaggtcatttccatcaatggagggatgttatga

SEQ ID NO: 87702 - DNA, 477 bp, Enterobacter aerogenes
atgaaccactatttatcgcccggcgactatctaccgcacgatgcaccgatgctgctgctggaagaggtcgtcaatgtgaccgatgaaaccgcgacctgccgggtcacggtctcgccccatagcgtcctggcgccatttctcgatgccgagggcaatctccccggttggttcgcccttgaattaatggcgcaaaccgtcggcgtctggtccggctggcaccgcctgcaaaaagggcaagcgtccatctcattaggtatggtgcttggcgcgcgagaattagtctgcgcggccggctccctgccgcgcggcaaagcactgtccattaccgttaaactgctcatgcaggacgagcgtttcgctagcttcgaaggcgccgtgatggcggacgatgacctgctggccagcggaagggttaataccttccagccaacgccaacagaacttaacaccctatttcaacaaggagcgtcagaatga

SEQ ID NO: 87703 - DNA, 1170 bp, Enterobacter aerogenes
atgatctacatttccgccgtcggcatgattaacgcgctgggccgcgataacgatgaaatcgccgccaatttggctcgcggtattgcgcccggcatgcgtccgcgcgaggggtggctacaggggcatccgcaggcggtgttcgcgggcgtggacggcgaattgcccgccattcccgatacctttagcgcccatcgttcgcgcaataatcagctgctgctggcggcgctggcgcaaattcagccgcaggtggatcgcgccatcgcccaatacggacgagagcgcgtggccgtagtgctcggcaccagcacctcggggctggatgagggtgacgcgcatgtcaccctgacgcttggcggcaaggaaagcgcggcctggcaatatccgcaacaggagctgggcgacccatcgcgttttctcagccactggctggcgctggatggcccggcatttacgctgtcaaccgcctgctcctccagcgccagagcgattatcagcggacgccgactaattgaagccgggctggcggatgtggcgatcgtcggcggcgcggacaccctcagccgaatgccgatcaacggctttcacagtctggaatcgctctccacgacgcagtgccagccatttgcccgcgaccgtaacggtatcactatcggcgaaggggcggcgctgatgctgttgacccgcgaaccgcagccagtcgcgctactgggtatcggcgagtccagcgacgcctggcatatttccgccccgcatcctgaaggagagggggcgatccgcgccatccagcaggcgctgggggatgcgggcatcgcccctgaacaagtgggttatatcaacctgcacggcaccgccacgccgcttaacgatagaatagagtctcacgtcatcaacgcgctatttggcgttcgggtaccctgtagttcaacgaaacacctgaccggacacacgctgggcgccgcggggatcaccgaagccgccatcggcatgctgattctgcagcgaaacctgccgctgccagcgcaggatttcagccagtcgccgcgcgatgaaacactaccgccatgcgggatcatcgaacatccccagccgctgccgcgaccgattatcctgtcgaactcttttgcttttggcggtaacaacgccagcatcctgctcgggagcattcaatga

SEQ ID NO: 87704 - DNA, 585 bp, Enterobacter aerogenes
atgagaagaccatcattctggcgcgccttcgcgctactcgccgccttattgctggccggctgcagccgttcgcagccggagccgcaaggccgcccgcaggcgtggctggaaccgggtacgcgcgtcacgttgccgccgcctggtatctcgccggacatcagctcgcagcagttgctcaccggcagcttcaacggccaaacccagtcgctgctggtcatgctcaatgccgatgataaaaagctcacgctggcgggtctgtcgtccgtcggtatccgcctgttcctggtgacctatgatgaaagagggctgcgcgctgaacagtcgatggtggttccgcaactgccgccagccagccaggtgctggccgatgtgatgctcagccactggccggttagcgcatggctgccgcagttgccaaaagggtggacgttgaccgagcgcggcgacaaacgcgaactacgtaacgcgcgcgggaagctggtcaccgaaatcacctatatcaaccgcaaaggccagcgcgtgccgatcagcatcgaacagcacgtctttaaataccacatcaccattcaatacctgggtgactga

SEQ ID NO: 87705 - DNA, 2319 bp, Enterobacter aerogenes
atgacgaacgccaacgctttgccgcccagtaaacgccccgcgctgttatgggccgtcgtctgccttctcctggcgggcgcgctgctggcgctgctgccgcaggcccggctcaacagcagcgtactggcgatgctgccgaagcagacgcttggcgcaatcccgcccagcctgaacgacggttttatgcagcgccttgaccgccagctggtctggctggtcagccccggtaaacaggccgacccgcaggtggccggcgactggctgcgtctgctgcaaacctcgaaggcgctggcagacgtcaaaggcccaatcaatgccgataatcagcaggcctgggggacctttttctggcagcatcgtaacggtttaattgaccccgctacccgcgcgcgcctgcaaaacggcggcgaagcgcaggcgcaatggatcctctcacagctctattcggcattttccggcgtcagcggcaaagaactgcaaaacgatccgctgatgctgatgcgcggctcgcagctggcgatggcgaaaggcggccagcggatgcaactgcaggatggctggctggtgaccaaagatgcccagggcaacctctggtatctgttgcatggcgaactggcgggttcctcattcgatatgcagaagacgcaccggctggtcactacgctcggagagctggagaagcagtggaaaacgcggtatccgcaggcgcagctattgtcacgcggcaccgtgttctatagcgattacgccagccagcaggcgaagcacgatatttctacgctcggcgcggcgacgctgttcggcgtgatcctgctgatcgtcgcgacgtttcgctcgctccgcccgctgttgctatgtctgctctctatcacgatcggcgcgctggccggcaccgtcgtcacgctgctgctatttggcgagctgcatctgatgaccctggtgatgagcatgagcatcatcggcatctccgccgactatacgctctattatctgaccgaacggatggtgcatggcgcggaattaaccccgtggcagagtctcgccaaagtgcgtcatgcgctgctgctggcgctgctcaccaccgtcgtggcgtatctgattatgatgctggccccctttccggcgattcgccagatggcgctcttcgcggcggtcggcctgagcgcctcgtgtctgacggtaattttctggcatccatggttgtgccgtggacttcccgtgcgcccggttccggcgatggcattgttgttacgctggcttgccgcctggcgacgccataaaaagctgtccatcggcctccccgtcgcgctggccctgttctcgctggcgggtctcgcgacgctgcgggtggatgatgatatttcgcagctccaggcgttgccgcaggatatcctggcccaggaaaaagccatcaccgcgctcaccgggcaaagcgtcgatcaaaagtggtttgtgatttacggcaaaacggcccagcagacgctgcagcgcctggaggcatttatgcccgcgctgacgcaggcgcaaagcgacggcctgctcggcggatatcgcgctatccccctgaattcactcgctcgccaacagcaggatcttgccctgctgcaacgcgccgcgcccaccgtcagtaacgtgctgaaccacgccggactggcaacgatcaatcccgatctcaacccgatgccagtgaccgtcgacgtctggcttgccagcccggccagcgaaggttggcgactgctgtggctgacgctgccggatggcgaaagcggcgtactggtcccggtgagcggcgtgaaagacagcgcggcgctaaaaacgcttagtacacaacaggctggcgttgcgtgggtcgatcgcaaaagcgatttcgaccagttgttcgcgctctaccgccacattctaaccggcctgctgggcgttgcgctggcggtgattgcctgcggcgctatgctccgccttggctggcgcaaagggctggttagcctggtgccgtcggtattgtcgctgggatgcgggctggcggtgctggcatttagcggccacgcggttaacctgttctccttgctggcgctggtgctggtactgggcatcggcattaactacacgctgtttttcagcaacccgcgtggtacgccgctgacatcgctgctggcggtcaccctggcgatgatgaccaccttattgacgctcggcatgttggtgtttagcgccacgcaggccattagcagttttggtattgttttggtaagcggcattttcgccgccttcctgctttcgccgttagcgatgccgaccaaaaaagagaaaaaaagacgatga

SEQ ID NO: 87706 - DNA, 606 bp, Enterobacter aerogenes
atgagattactgctgctgttagggctgtttatcagcccgctggtcagcgccctcacgcttgatgacctgcaaaaacaatttagcgaacagccggtggtacgcgcccacttcgatcaagttcgcacgattaaggatctgccgcagccgctacgatcccaggggcagatgttgatcgcccgcgataaggggttgctgtgggatcaaacctcgccgttccccatgcagctgttgctggatgacaaacggatggtgcaggcgatcaacggccagccgccgcaaaccattactgccgaaaacaatccgcaaatgttccagttcaaccatttgctgcgcgcgctgttccaggcggatcgaaaagtcctggaagataacttccgcgtggaatttgccgataaaggcgaaggccagtggacgctgcgcctgacgcccataactacgccgctggataagatttttgcccgcatcgatttggccgggaaagactatctggaacatattcagctcaacgacaagcaaggcgatcgcaccgagatcaccctttcccaacaccaattgacgcctgcgcaactgaccgatgacgaacgccaacgctttgccgcccagtaa

SEQ ID NO: 87707 - DNA, 423 bp, Enterobacter aerogenes
gtgcttaacgatccccgttttactgctgaagtagagctgactattccgtttcatgacatcgatatgatgggcgtcgtgtggcatggcaactatttccgctacttcgaaattgcccgtgaggcgctgcttaaccagttcaactacggctaccggcagatgaaagcctcaggctatttgtggccggtggtcgatacccgcgtaaaataccgcgacgttatcaccttcgagcagcgcattcgcgtgcgcgcgcggatagaagagtttgagaaccgcctacgcattggctacgaaatttttgatgtcgatagcggcaagcgcaccaccaccggctacaccatccaggttgcggtggatgaaaacagccgcgagatgtgtttcgtcagcccggatatcctgtttgaacgcatgggggttacgccatga

SEQ ID NO: 87708 - DNA, 1692 bp, Enterobacter aerogenes
atgccgctagctttctctccctgcgtgctgatcccctgctataaccacggcgccatgatgccacgggtgctggcgcgcctgcagccctttggcctgccttgcatcgtggtggacgacggcagcgatagcagtacgcggcagcagttggagcggctggcggcggaaaccgctaatctgaccttaatccgcttaccacagaacgcgggcaaaggcgcagcggtgatccgtgggctacaggccgcagcgcaagccgggttcagccacgcagtgcaggtcgatgccgatggtcagcacgccatcgaagatattccgcaactgttggcgctggcgcaggcccatcccgaagcgctgatttccgggcaaccgatttacgacgactccatcccgcgttcccgcctctacgggcgctggataacccacgtctgggtatggattgaaacgctgtcactgcagttgaaagacagcatgtgcggttttcgcgtctacccggtgacgccaacgctacagctggcacagcgcgtgtcgctcggccagcgaatggattttgataccgaagtgatggtgcgcctctactggcagggaaataccagctattttgtgccaacccgcgtgacctacccgccggacggtttgtcgcattttgatgccatcaaagataactgccgcatctcgctgatgcacacgcgtctgttcctcggcatgctgccgcggatcccctcgctgttgtttcgccgcgcctcgccgcactgggcgcgtcagcgggaggtaaaaggattatggggaatgcgcctgatgctactggtgtggcggctgctggggcgcaaggcgttctcgttgctgctttatccggtggtcggcgtgcactggctgacggccgcaacggcccgccgtgcttcgcaacaatggataacccgcgtgcgcgaacagttcgccgctcgccagatgccgataccgccaacgctaaccagctatcggcacttccagcgcttcggcgaggcgatgctggataaaatcgccagctggcgcggcgaattgcagttcggccgcgacgtggtttttaccgcaggcgccgaggagacgctaaatatcagcgatccgcgggggaagctgctgttggtttcgcatctcggcgatgtcgaagcctgccgcgcgctggcgcaactacagggcggcaaaaccatcaacgctctggtattcagcgaaaatgcgcaacgttttaaacagattatgacggaaatggcccctcaggccgggctcaacctgatgccggtgaacgatatcggcccggataccgccatcctgttgcaagaaaagctggatcgcggcgagtggatcgcgattgtcggcgaccgtattgcggttaacccgcagcgcggcggcgaatggcgtgtctgctggagccgttttatggggcaagccgcccccttcccgcaggggccatttatcctcgccgccattttgcgctgcccggttaatttgcttttcgctctccgccagcagggcaaactgcgcatttactgcgagccgttcgccgacccgctgctattaccgcgcgccgatcgccaacaggcattgcaacacatcatcgaccgctacgccgaacggctggaacactacgcgctgcagtcgccgctcgactggtttaactttttcgatttctggcgtttgccggatcccaaaaacaaggagtaa

SEQ ID NO: 87709 - DNA, 354 bp, Enterobacter aerogenes
atgaagccccatgaaattgagcgccgtcagccgcaagccgatcgggttgaaatcgtgctctctctcgacccggcgctattctggtttcgcggccattttgccgtgcagccgctgctacccggcgtcgcacagatcgattgggcgatgcattacgccacccgcctgctcgcgcccggctggcgctttcatgacattcagaacgtgaaatttcagtcgccgctgctgccgggcgcgatcgtcacgctcaccctgacatggcaggaggcgcgccagaccctgacctttagctatcagcgccacgacggtgaaacccggcacaccgccagcagcgggaaaattcgcttatgccgctag

SEQ ID NO: 87710 - DNA, 1350 bp, Enterobacter aerogenes
atgatgcagcccctcacgctggcccagtggctcagcgccccgcgtccgccgcaaacgctgattgcgtggcaggaagcgcacagctggacgctggcgcatctgcgctatgatgtcgctcacctgcttaacaacctgcaacaacagccaggcgagcgttgggcgctctgttttgacaacagctacctgtttttggtcgcgctgttggccacgctgcatgcggggaaaacgccagtgcttcctggccatagccgagcggcgctattacacgaacagcgagcgcttttcgacggcatcctgagcgataagccgctgccatggcgcgggccgctgcgggttatccagtccgccatggcgaccgcatcccacgaatacgcgttcccggcgatcggcgataacgcctgcattgagctttttacctccggttctaccggtgaaccaaagcgaattagtaagcctgttaagagtctcgaccgcgaggcggcgctgatagccgcgcactatgccgggcgcctgacaggcagtcgggtagtggcatcagtggcgccgcagcacttgtacggcctgacgttccgtctgttcctgccaatggcgctggggttgccgctgcacgcggcgatgattgagtacgccgagcagttggcggcattaagccatgaccatcattatttatttatcagtagcccggcttttctcaaacgtctcgactatcggcttaccccgccgccggtcgcgatgattttgtccgccggcggcaagctgccctggcaggatgctatgcacaccgctaactggttcaattgctggccggatgaaatctacggcagcacggaaagcggggttatcgcctgccgccagcgcctgcaggataatgcgccgtggcagccgttcccaggcatccgctttcagccgcagggcaacacaattcgtctattttcgccgcttatcgccgacgataacggcctggttatcgatgatattttgcatttcaatgaaagcggtcaattccagctggcaggtcgtcgcgaccgggtagtgaaaattgaagagaagcgcatttcgctaagcgaagtggaataccggttactgcaactggatggcattcttgaggccgccgtcctgccgattacccgcggcagccgccagagcgttggcgcgttgttagtgctcgatcatgacgcccgtcgccgctgggggaaaagccaggaattacaatggcggaaagcgctgcgcgcctctctggaacctgtggccatccctcgctactggcgggtggttgacgagatccccgttaatagcatgaataagcgtgtctacgcgcaattacaggagttatttcatgaagccccatga

SEQ ID NO: 87711 - DNA, 582 bp, Enterobacter aerogenes
gtgtcgggcatccgctcgctgccggtcgtttcaattatgacggggttattactgctgacctggccatttttgatctggtttggcctcgcgcataacagcctgccatggctgttgccgctaatggcgctactgctgtttttacgctttcgccagacccggcgacagtcagggccgttgagcgtggtcactcagatcgttgcggtagccggcatgacgctgtgcattgccagctacctgctaaagacccatcagctactgctattttacccggtggtggtaagcggcgtaatgctagcggtgtttggcggttcgctgtggtcaagtatgcctgtagtcgagcgcctggcgcggttgcgggacccagttcttcctgagcaagccgtgcgctacacccgccgggtcacccaaatttggtgcgcctttttcatcggcaacggcggtatagcgctggttaccgcgttatatggcgatatgtcgctatggacggcgtggaacggcatgatttcctatctgctgatgggcatgttgatggccggagagtggctggtgcgccagcgggtgattaaacgagataaaccatga

SEQ ID NO: 87712 - DNA, 252 bp, Enterobacter aerogenes
atgaccgaacaaaaagctatttacgaagaagtctccgcgctgctggtgaaggtgtttgaaatcgatccgcaggatattaaacctgaggcccgcctgtacgaagacctcgaactggacagcatcgacgccatcgacatgatcgtccatctacaaaagaaaatcggcaagaaaatcaagccagaagactttaaaaccgtacgcaccgtgcaggacgtggtcgatgcggcggatcgcctgctgaaagaagcgtaa

SEQ ID NO: 87713 - DNA, 258 bp, Enterobacter aerogenes
atggaagcgctctatcttgaaattaaaaatctgattatcagtacattgaacctggacgagttgtccgctgatgatatcgacaccgatgccgcgctgtttggcgatggtctgggtctggactccatcgatgcgctggagctgggtctggcggtgaaaaaacagtacggcgtggtgctgtcggcagaaagcgaagagatgcgccagcacttcttttccgtcgccacgctggcatcctttattcaagcgcagcgtgcctga

SEQ ID NO: 87714 - DNA, 816 bp, Enterobacter aerogenes
atgacgccgcttttccaacggttaaatcgcctgtggcgcgcggcgatgaccggtttttgtttcgcgctgtttggcgtcggtgggctgctgctctcgctgatctggttcaatctgctgctgatcgtggtgcgcgataacacccgccgtcgtcgtctcgcgcggcgcagcatttccgccagctttcgcgtttttcttaacgtcgtgaaagccgtcggcgtactggactaccagattaaagggcgcgagattttacgtcaggagcgcggttgcctggtggtcgctaatcatcccagcctcatcgactacgtgatgctggcctcggtgatgccggaaaccgactgtctggtgaaaagcgcgttgctgaaaaacccatttgtcagcggcgtgatccgcgcggcggattatttgattaacgatcgcgccgataccctgcttccggccagtcggcaacgcttacagcagggcgatactattttgattttcccggaaggaacccgaacggtgccgggagaaaaaatgcagctgcagcgcggcgcggccaatatcgccgtgcgctgcggcagcgatttacgcgtcgttgttatccgctgtaccgagcatatgctgggcaaacagagcaaatggtacgacccgccgcgaacgaagccgttatttaccgttgaagtcggagaacggctacgaatagaccaattttacgatgccaacacacaagaaccggcgctggccgcacggcagttaaaccggcatattttgcttaaattagaatcaggcgttgcgcctgaaacaggaattaatgatggaagcgctctatcttga

SEQ ID NO: 87715 - DNA, 723 bp, Enterobacter aerogenes
atgaattttaccctgaacattatcgactggcaggcgagagcgcctgggctttgcgaagccgaacagtggcagcaatggtcacggtattcgcacaccatcgatccggcggccccggtggccaaactcaacgaactgccaatgatgaccgctcgccgacttagctccggcagcaagctggcggttgagtgcgggctggcgatgctgcgccgccatgggatcgacgccgttctctataccagccgtcacggcgaactagagcgcaactatcggatcctccacgccctggcgatggagcaagcggtatcgcctaccgatttcgccctatcggtacataattccgccgtcggtaatctgacgattgcggcgaaaaagcctattgcgtcgtcatcgctttctgccgggcgcgacactttccagcagggattatatgaggtcatggggcttctgcaggcaggttatcaacgcgtgttgatggttgattttgatggttttctgccggagttttaccattcgcagctgccgacggctatgccgacctggccctatgcgacggcctgggttattgagtccggcggcgaatggcagtgccaggctgagcgctatgatgccgttcctgaaagccccctaccgcaaagcctgctgtttttacggcactatctgcagaattcccgtacgttcaccctgcccggcgagcgcgtgcagtggcgctggagccgcgcatga

SEQ ID NO: 87716 - DNA, 1221 bp, Enterobacter aerogenes
atgcccgaacccgtcgccgaaccggcgctcaatggactgcgccttaatctgcggattgtctccgtcgttattttcaactttgccagctatctcactatcgggctgccgttggcggttctgccgggctacgttcacgatgtgatgggttttagcgccttctgggccgggctggtgattagtctccagtatttcgccacgctgctgagccgaccgcacgccgggcgctacgccgatctgctcgggccgaaaaagattgtcgttttcggcctgtgcggctgtttcctgagtggtttgagctacctgctggcagcctggagcagcagctggccactgctgagtctgctgctgttatgccttggacgagcgatcctcggcattggccagagctttgccggcacggggtcgacgctatggggcgtaggcgttgtcggctcgctgcatatcgggcgggtgatttcgtggaacggcattgtgacctacggcgcgatggcgatgggcgcgccgctgggcgtgctgtgctattcatacattggcctcagcggcctggcgatggtcattatggcggttgctctggtggctatcatttgcgcgctaccgcgaacggcggtgaaggcaacgaaagggaaagcgatgtcatttcgcgcggtgctgggccgggtttggccttacggcatggcgctggcgttggcttctgccggctttggggttatcgcgacctttattaccctgttttatgacgcgaaaggctgggacggcgcggcctttgcgttaacgctgttcagctgcgcgtttgtcggcacgcggctgctttttcccaacggtattaaccgcctcggcggcctgaacgtggcgatgctctgttttagcgtggaggttattggcctgctgctggtgggctttgcacagacgccgctgatggcgaaagtcgggactttcctcaccggcgcggggttctcgctggtcttcccggcgctgggtgtggtggcggttaaagccgtaccgcagcacaatcagggctcggcgctggcgacctataccgtatttatggatttgtcgttggggataaccgggccgctggccgggcttttgatggcgtggaccgggataccgacgatttatctggcggcggcagggttggtgatggccgcgctactgttgggctggcggttaaaaaaacggcccccggtggttgaaccggaggccgctgcatcagggcaataa

SEQ ID NO: 87717 - DNA, 558 bp, Enterobacter aerogenes
atgcgcaatttggttaaatatgtcggtattggcctgctggttatggggcttgcggcctgtgataacagcgattcaaaagcgccgaccgtcggggcggcagcagagagcaataccagcggccaggcgattagcctgctggatggtaaactgagcttcactctgcccgcgggcatggccgaccagagcggtaagctcggtacccaggccaacaatatgcatgtctattctgacgccaccggccagaaagcggtgattgtgattgtcggcgacaacactaatgaagatctggcggtgctgtccaaacgtctggaagatcagcagcgcagccgcgacccgcagctgcaggttgtgtctaacaaatcgattgagattaaaggccacaccttacagcaactggacagcatcatctccgccaagggtcagaccgcatggtcttccgtgctgctcggtaagatcgatgacaaactgctgaccctgcaggtcactctgccagcggacaaccagcagcaggcgcagaccgaagcggaaagcatcgtcaacacgctggtcatcaactaa

SEQ ID NO: 87718 - DNA, 666 bp, Enterobacter aerogenes
atgaatccctttactaccgtacagcgtaagaaagcgctcgtctggctttcgctatttcatctgctggtgatcacctccagcaactatctggtccagctgccgatctccatttttggtttccataccacctggggggcgttcagttttccctttattttcctcgccaccgatctgacggtacgcattttcggcgccccgctggcgcgacgcatcatcttcgcggtgatgatcccggcgctgattatttcctatggcatttcggcgctgttttatatgggcgaatggcagggctttgccgcgctgggcacctttaatctgttcgtcgcccgtatcgccgccgccagctttatggcttatgcgctggggcaaattctcgacgtccacgttttcaaccgcctgcgtcagaatcgtcgctggtggctggcgccgacggcgtcgaccctgttcggtaacgtcagcgataccctggccttcttcttcatcgccttctggcgcagcccggatccgtttatggccgcccactggggagaaatcgccatggtcgactactgcttcaaagtgcttatcagcattgtcttcttcttgccgatgtacggcgtgctgttgaatatgctgttgaaaaaactggcggataaatctgatttgtcggcattgcagccaggttaa

SEQ ID NO: 87719 - DNA, 246 bp, Enterobacter aerogenes
atgagcgaacttttttccagtcctgaccatacgctggacgccctggggcttcgctgcccggagccggtgatgatggtgcgtaaaaccgtgcgtaccatgccggtgggcgagaccctgctgattattgccgacgatccggccaccacccgcgatattcccggtttttgcctctttatggagcatgaactggtggcgcaggaaaccgaagccctgccgtaccgctacctgatccgcaaaagccactga

SEQ ID NO: 87720 - DNA, 2208 bp, Enterobacter aerogenes
atgtcgacaccagaatctcaggacaaaaaagtcccccagttctcgtcattcaaatttaccccggcgacagcgcccgcggaaagctgctgtaccgatcataactgcgccggagaaaccgcctccgctgagcagccgctcaatggcgcccgctatagctggcaggtggaagggatggactgcgcggcctgcgcccgtaaggtggagaccgccgtgcgccaaatcgacggggtcaggcaggtacaggtgctattcgccaccgagaaactgctggtcaatgccgacagcgatatccgttcgcaggttgaaaacgcggtgcgcgccgcgggttataccctgcgcgatgctgacgcgccgcaggaagagaaaccgcaaggttcatggctgcaggaaaacctggcgttattgagtctggtagtgatgatggcgctcagctgggggctagagcagtttaaccacccgttcggcaaactggcgtttgtcgccactaccctcgtcggcctgtggccggttgcccgtcaggcgctgcggttaattaaaagcggcagctggtttgccatcgaaacgctgatgagcgtcgccgccattggcgcgctgtttatcggcgccaccgccgaagcggcgatggtgctgctgctgttcctgatcggcgaacgacttgaaggctgggccgccagccgcgcgcgtcagggcgtgagcgccctgatggcgctcaaacctgataccgccgttcgcctgcgcaacggcgagcgtgagaccgtctcccagcgcgacctgcgtcctggcgacgtgattgaagtcgccgccggcgggcgtctaccggccgatggcgagctgctatcgccgtttgccagctttgacgaaagcgcgctgaccggcgaatcggtaccggtggaacgtaaagccggcgagcgcgtagccgctggcgccaccagcgtcgatcgcctggtgcaattgagcgttatctccgaaccgggagacagcgccattgaccggatcctcaaactgattgaagaagccgaggagcgccgggcgccgattgagcgcttcatcgatcgcttcagccgaatctacactccggccattatggtagtcgccctgctggttgccatcgtaccgccgctattcttcgccagcgcctggctgccgtggatctataaaggcttaacgctgctgctgatcggctgcccttgcgcgctggtcatctctaccccggcggcgattacctccggcctggcggtcgccgcacggcgcggggcgctgattaaaggcggcgcggcgctggaacaattgggccaggtgcgccaggtggcgttcgataaaaccggtactctgaccatcggccaaccgcaggtcacccacgttatcaccaccgccgacgttgatgaaaacggcctgctggcgctggcggcagcggttgaacaaggctccagtcatccgctggcgcaggctatcgtccgcgaagcgcagcagcgtaagctgacgattcccgttgcgcgcaaccagcgggcgctggccggttccgggatagaagccgaggtcaacggcagccgcatcttaatctgcgcggccagtaaggccgcccccgctgagcatgaggcgcagatccagcaactggagagcgccggacagacggtggtgctggtgatgcgcgatgataccttgctcggcattctggcgctgcgcgataccctgcgcgacgatgcgcgtcaggcggtggaagaactgcatcaattgggcgtacaaggggtgatcctcaccggggataacccgcgcgctgcggcggctatcgccaatgaactgggtctgcagttccgcgccggattgctgccggcggacaaagtgaacgcggtgatggcgcttaacgccaacgcgccgctggcaatggtcggcgacggtatcaacgatgccccggcgatgaaagcggcgaccatcggtattgcgatgggcagcggcaccgatgtagcgctggagaccgccgacgcggcgttgacccataaccgcctcaccggcctggcgcagatgatttcgctggcgcgcgccacccatgccaatattcgccagaatatcgccatcgctttagggttgaaggggattttcctcgtcacgacccttctcggcctgaccggtttgtggctggcggtgctggcggataccggcgcgacggtgctggtaacggctaacgccctgcggttattgcgtaaaaagtaa

SEQ ID NO: 87721 - DNA, 627 bp, Enterobacter aerogenes
atgctttggtcgtttattgctgtctgtttctccgcatggctttacgtcgatgcttcctatcgtgggccggcctggcagcgctgggtctttaaaccggtcaccctgcttctattgctgctgttagcctggcaggcgccaatgttcaacgccattagctacctggtgctggcgggcctgtgcgcttcgctgctcggcgatgcgttaaccctgctgccgcgccagcgggtgatgtacgcggttggcgcattcttcctctctcatctgctgtatacgatctggttcgccagccagatgacgctttcgttcttctggccgctgccgctggtactgctggtgctcggcgcgctgctgctggcgattatctggacccgactggaagagatgcgcatgccggtgctgacctttatcggtatgactctggtgatggtgtggctggcgggcgaactgtggttcgtgcggccgaccgataccgcgctctccggcttccttggcgccgcttcgctgctgttgggtaacgccgtctggctgattagccactatcgccgtcgcttccgcgccgataacgccatttccgcggccttctactttgccgggcacttcctgatcgttcgcgcactgtatctgtaa

SEQ ID NO: 87722 - DNA, 372 bp, Enterobacter aerogenes
atgggtacgcaaatgagtaaagttccgctattttttgtgctggtggtcgcggtgattgtggtggcggcctcgtttcgctacgtgcagcagcgccgggagaaaatggataacgacgccgcgccgctgctgcagaagcgggtggtggtcagcaataagcgggaaaaggtgattaacgatcgccgttcgcgccagcagacggtgacgccagccggcagcgagatgcgttatgaagcgagcttccgcccggaaaatggcgatctggaagtggtgttccgccttgatgcgccgcaataccacgcgctgagcgttggcgaccggggaatgctgagctataagggctctaaattcgtcgactttgttgccgataactga

SEQ ID NO: 87723 - DNA, 279 bp, Enterobacter aerogenes
atgctgattaatttaggccgcctgctgatgctatgcgtttgggcgtttttgctgttgaacctgtttcaacctttcccaaaaccgctgaatatcttcgttaacgtggcgctgatttttatgattctgatgcatggcctgcagctgacgctgttgaaagcgacgcagacgaaagatgcgccgccgctgagccgttttgagcagattcgtattttcatcttcggcgtatttgaactggtggcctggcagaaaaagctgaaggccacgctgaagaagaagtaa

SEQ ID NO: 87724 - DNA, 597 bp, Enterobacter aerogenes
atgaagaaaccaaatcacgcaggcagcggccagatccgcattatcggcggacagtggcggggccgtaaattaccggtgccggagagcccgggtctgcgcccgaccaccgaccgggttcgggaaacgctttttaactggctggcgccgtcgatggtcgacgcccactgccttgactgcttcgccggcagcggcgcgctggggctggaagcgctgtcacgctatgccgccagcaccacgctactggagatggagcgcggcgtcgcgcagcagctacaaaaaaatctcgcgacgctgaaagccagcaacggcaaggtggtcaacaccaacacgctggcgtttctcagccagccgggtacgccgcaccatattgtcttcgtcgatcctcccttccgcaaagggctgctggaagaaacgctcagcctgctggaaaaaaaccactggctcgcagatgaagcgctgatttatgtcgagagcgaagtagaaaacggactaccgccggttccggcaaactggcagctgtatcgcgaaaaagtcgccggacaggtcgcctaccgcctgtatcaacgcgaggcacaaggagaaaaccatgctgattaa

SEQ ID NO: 87725 - DNA, 1494 bp, Enterobacter aerogenes
atggcaaaagagaaaaaacgtggcttcttttcctggctgggctttgggcaaaaagaacaggctcaggaaagcgaaacagaacaaaaagtagaagaacaacaagaggttgcggaacaggctccggcggcggaaatgcctgcggaagccgtacccgcggcggaaacggtaaaagaagaccccgaggcctttgccgctgaggtcgtagaggttaccgaacaagttgttgaaagcgaactgtcgcatccggtggcggaagagaccgcggcgtcggaaatcgtagttgaagaagcgccggttgttcctgcggtagaagaaaaagtcgctgaaccgctggttgaagaggtgatagccgagccggttatcgccgaagcggtcgctgaacagacgccggaagaggttatcgtcgcggagcctgaagtcatcgaagatgaggtcctcccggaagagtctgaagccgaattaagcgatgaagagcttgaagcgcaggcgctggcggcgcaaggcgtagaagagacgccagaagaagaagcggaaactcaggaagcggcgccgcaggagcaggaaaaaccgaccaaagaaggtttcttcgcccgcttaaaacgcagcctggtgaaaaccaaacagaatctgggttccggatttatcagcctgttccgcggcaaaaaaatcgacgacgatctgtttgaagagctggaagaacagctgctgattgccgacgttggggtggaaaccacgcgtaagattattaccaatcttaccgagggggccagccgtaagcagctgcgtgatgccgaagcgttatacggtctgctgaaagaagagatgagcgagatcctgacgaaagttgaggaaccgctgaatgttgaagggaaaacgccatttgttattctgatggtcggcgttaacggcgtgggtaaaaccaccaccatcggtaagctggcgcgtcagtttgagcagcagggtaaatccgtgatgctggcggcgggggatactttccgtgcggcggcggtggaacagctgcaggtctggggccagcgtaacgagatcccggtgattgcccagcataccggcgctgattcagcctcggttatttttgacgccattcaggcggcgaaagcgcgcaatattgatgtgctgattgccgataccgcggggcgtctgcagaataaatcgcatctgatggaagaactgaagaagattgtccgcgtaatgaagaaactggatgtcgacgcgccgcatgaagtcatgctaaccatcgacgccagcaccgggcagaacgcgattagccaggccaaactgttccacgaagccgtggggctgaccggcattacgttgactaagcttgacggaaccgcgaagggcggggttatcttctcagtggctgaccagttcagtattccgattcgctatattggcgtcggcgaacgtattgaagatctgcgtccgtttaatgcgggcgactttattgaggcactttttgcccgagaggattaa

SEQ ID NO: 87726 - DNA, 669 bp, Enterobacter aerogenes
atgattcgctttgaacaagtcagcaaagcctatctcggtgggagacaagcgctgcagggggtgacgttccacctgcagcagggcgagatggcgttcctgaccggccattccggcgcggggaaaagtaccctgctgaagcttatctgtggtatcgaacggccgagcgccgggaaaattctgttcagcggccatgatatcagccgcctgaagagccgcgaggtgccgttcctgcgccgccaaatcggcatgattttccaggaccaccacctgctgatggatcgcaccgtgttcgataatgtggcgatcccgctgattatcgccggcgccagcggcgatgatattcgccgccgcgtatccgcagcgctggataaagtcgggctgctggacaaagcgaaaaatttccccatccaactctccggcggtgagcaacagcgtgtgggcattgcccgcgcggtggtcaacaagccggcggtgctgctggcggatgaaccgaccggtaacctcgatgaggcgctctcggaagggattttacgtctgtttgaagagtttaaccgcgtaggtgtaacggtactgatggcgacccacgacctggggcttatttccagccgtccgtaccgtgtcctgacgctaagcgacggtcatatgcatggaggccatcggggtgaataa

SEQ ID NO: 87727 - DNA, 1056 bp, Enterobacter aerogenes
gtgaataagcgcgacgcagtgaaccagattcgccagttcggcagcaagttcgatcgtctccgtaacgccaccggcggcggcaacggcgggcgcaatgcgccaaaacggtcaaaagcggcgccgaacccggcatcgcggaagagtaacgtctttaacgagcaggtgcgctacgcctggcacggcgcgttacaggatttaaaaagcacgccgctggcgaccttcctcaccatcatggtgatcgctatttcgctgacgctgccgagcgtctgctatatggtctacaaaaacgtcaacagcgcggcgtcgcagtattatccgtcgccgcagatcaccgtctatctggaaaaaacgctggatgatgatgcagcggcgcgggtggttggccaactgcaggcggagcagggcgttgagaaagtaaattacctgtcgcgcgatgaggcgctgggcgagttccgcaactggtccgggtttggcggcgcgctggatatgctggaagagaacccgttgccggcggtagcgattgtggtgccgaagctcgatttccagaataccgattcgcttaacaccctgcgcgatcgcgtctcccgtattcagggagtcgacgaagtgcgcatggacgatagctggtttgcgcgcctggcgtcgctgaccgggctggtcggccgggtgtcggcgatgatcggcgtgctgatgattgccgcggtgttcctggtgattggcaacagcgtacgtctgagcatcttcgcccgtcgcgataccattaacgtccagaagctgatcggcgctaccgacggtttcatcctgcgtccgttcctctatggcggcgcgctgttgggcttcgccggggcgtttttgtcgctgattctgtcggagattctggtgatgcgcctctcctcggcggtgaccgaagtggcgaaagtgtttggtactaaatttgaactcagcggcttaggcttcgatgaatgcctgctaatgctaatcgtctgctcgatgattggctgggtcgcggcatggctggcgacggtgcaacatttacgtcactttacccccgactaa

SEQ ID NO: 87728 - DNA, 855 bp, Enterobacter aerogenes
atgaccaaagaaatgcaaactttagctttagcccccgttggtaacctggaatcgtacatccgggctgctaacacttggccgatgttatcggctgatgaagagcgggagcttgctgaaaagctgcattaccagggcgatctggaagcagcgaaaaagctgattctgtctcacctgcgctttgttgttcatattgctcgtaactactcgggctatggcctgccgcaggcggaccttattcaggaaggtaacatcggtctgatgaaagccgtacgtcgtttcaacccggaagtgggtgtgcgactggtttccttcgccgtgcactggattaaagcggaaatccacgaatacgtgctgcgtaactggcgtatcgttaaagtcgcaaccaccaaagcgcagcgtaagctgttcttcaacctgcgtaaaaccaagcagcgtctgggctggtttaaccaggacgaagtagagatggttgcccgcgagctgggtgtgtcgagcaaagacgtacgtgagatggaatcacgtatggcagcgcaggacatgacctttgatatgtcgtccgatgacgaatccgatagccagccgatggcgccggtgctctatctgcaggacaaaacgtctaactttgccgacggcatcgaagacgataactgggaagagcaggctgctaataaactgactgatgcgatgcagggcctggacgagcgtagccaggacatcatccgcgctcgctggctggacgaggacaacaagtccacgctgcaggagctggcggatcgttatggcgtctcagctgaacgtgttcgtcagctggaaaagaacgcgatgaaaaaactacgcgccgctatcgaagcttaa

SEQ ID NO: 87729 - DNA, 1098 bp, Enterobacter aerogenes
atgaagggtaaagcgttactggcaggatgtattgctttaattatgagcggttccgcgctggcggaagacattaaaattgccgtcgtgggagcgatgtccggcccggttgcccagtatggcgaccaggagtttaccggcgcggagcaggcggtagctgatatcaacgccaagggcggtatcaaaggcaataaattgcagatcgtaaaatatgacgatgcctgcgacccgaaacaagcggtggctgttgcgaacaaagtggtgaatgacggcattaaatacgttatcggtcacctgtgttcctcatccacccagccggcatctgacatctatgaagacgaaggcatcctgatgattaccccggcggcaaccgcgccggagctgacggcgcgcggctataagctgattctgcgcaccaccggtctcgactccgatcagggaccgacggcggctaaatatattctcggcacggtgaagccgcagcgcatcgctgtggttcatgacaaacagcaatatggcgaagggctagcgcgctcagttcaggaaaacctgaagaaaggcggcgccaacgtggtgttctttgacgggatcaccgccggtgagaaagatttctctaccctcgtggcgcgcctgaagaaagaaaatatcgacttcgtctactacggcggttatcacccggaaatggggcagatcctgcgccaggcgcgcgcagccggtctgaaaacccagtttatgggcccggaaggcgtggctaacgtttccctgtctaacatcgccggcgagtcggcagaaggcctgctggtcaccaaaccgaagaactacgatcaggttccggcaaacaaaccgattgtggatgctatcaaagcgaagaaacaggatccgagcggcgccttcgtgtggaccacctatgcggcactgcagtcgctgcaggcggggttaaatcagtctgaagatccggcggaaatcgcgaaatacctgaaaggggcgaaggtggataccgtcatggggccgctgtcgtgggatgagaaaggcgacctgaaagggttcgagttcggcgtgtttacctggcatgctaacggtacggcaaccgacgccaaataa

SEQ ID NO: 87730 - DNA, 384 bp, Enterobacter aerogenes
atgaagctcaccattatccgtttacagcacttcagcgatcaggatcgcattgatttaggcaaaatctggccgtcgcaggatcctgcggcgctgatgctggacgataaccatcgtatttacgccgcccgctttaacgaacgtctgctcggcgccgtacgcgttaccctgcgcggcgtcgaaggcgagctcagcgatctgtgcgtgcgtgaagtcacccgccgccgcggcgtggggcaatatttagtggaagagacgttaagcgataacccgaatatcaatagctggcgcgttgccgatagcggggtggaagaccgcggcgtgatggcggcatttatgcaggcgctgggtttcagcgcccagcagaatggttgggagaagcattaa

SEQ ID NO: 87731 - DNA, 1110 bp, Enterobacter aerogenes
atgaaaaggaacgcgaaaacgatcgtcgcgggagtcgttgcattagcgatttcccacgcggcgttggcaaaggatattaaagtcgccgtcgtcggcgcgatgtctggcccggttgcccagtggggcgatatggaattcaacggcgcgcgccaggcgattaaagacattaacgccagcggcggcattaaaggcgacaaactggttggcgtcgaatatgacgacgcctgcgatccgaaacaagcggtcgcggtcgccaacaaaatcgtcaatgatggcattcagtacgttattggccacctctgttcctcctccacccagccggcgtctgacatctatgaagatgaaggcatcctgatgatctcccctggggcgaccaatccggaactgacccagcgtggttaccagtacatcatgcgtaccgcaggtcttgactcttcccagggaccgaccgccgcgaaatatatcctcgaacaggtgaagccgcagcgtattgcgattattcatgacaagcagcagtacggcgaagggctggcgcgttccgtgcaggacaacctgaagaaagccggcgccaatatcgtcttctttgatggcatcaccgccggtgagaaagacttctccgcgctgctggcgcgcctgaagaaagagaatatcgacttcgtctactacggcggctactacccggaaatggggcagatgctgcgccaggcgcgctccgtcggcctgaaaacgcagtttatggggccggaaggcgtcggtaacgcctcgctgtccaacatcgccggcgcggcggcggaaggtatgctggtgacgatgccaaaacgctatgaccaggatccggccaacagcgctattgttgatgcgctgaaagcggataaaaaagatccgagcggcccgtacgtctggatcacctatgccgccgttcagtcgctggcgcaagcgatggacagaaccggcagccagcagccgctggatttaattaaagatttgaaagctcacggcgcgaagaccgtgattgggccgctgaattgggatgaaaaaggcgatctgaagggatttgaatttggtgtcttccagtggcacgcggatggttcatccaccgtcgctaagtaa

SEQ ID NO: 87732 - DNA, 927 bp, Enterobacter aerogenes
atgtccgagcagtttctctattttctgcagcagatgtttaacggcgtcacgctgggcagtacctatgcgctgatcgccatcggctatacgatggtgtacggcattatcggcatgattaacttcgcccacggcgaggtctacatgatcggcagctacgtctcgttcatgattatcgccgccctgatgatgttgggtatcgataccggctggctgctggtcgccgcaggctttattggcgctatcattatcgccagcgcctacggctggagtatcgagcgcgtggcctatcggccagtgcgcagctccaaacgtctgatcgcgctgatttccgccatcgggatgtcgatattcctgcagaactttgtcagcctgaccgaaggctcgcgcgatgtcgcgctgccgagtctctttaacggccagtggattgtcggccacagcgataatttctccgccactatcactaccatgcagttggtcatctgggtcgttacctttatcgccatgctggcgctgacgctgtttattcgctattcgcgaatgggccgcgcctgccgcgcctgtgcggaagatctgaaaatggcgagcctgctgggcatcaataccgaccgcgttattgcgctgaccttcgtcattggcgcagcgatggcggcggtcgcgggcgtcctgctggggcagttctacggcgtaattaacccctacatcggttttatggccgggatgaaggcctttaccgcagctgtgctcggcggtatcggcagtatccctggcgcgatgattggcggcctgattctgggtatcgccgaggcgctctcttctgcttatctcagcaccgaatataaggacgtcgtctccttcgcgctgctgattctggtgctgttagtaatgccgaccggcattctgggccgcccggaggtagaaaaagtatga

SEQ ID NO: 87733 - DNA, 1278 bp, Enterobacter aerogenes
atgaaaccgatgcaaattgcgatggcgcttctttccgccgcgatgttctttgttctggcgggcgtctttatgggcgtgcagctggagctgaatggcaccaaactggtggtcgataccgccgccgatattcgttggcagtggattttcatcggcaccgcggtggtctttttcttccaactgctgcgcccgctgttccagaaagcggttaagaacgtttccgggccgaaatttattatgccggcgattgacgggtcgacggtcaagcagaagctgtttctgatagccctgctggtgattgccgtggcctggccgtttatggtgtcgcgcggtacggtggatatcgccaccttgacgatgatttatatcatccttggtctcggactgaacgtggtggttgggctttccggcctgctggtattgggctacggcgggttttacgccatcggcgcctatacctttgcgctgcttaaccactattacggtctcggtttctggacctgcctgccgctggccggcctggtttccgcggcggccggcttcctgctgggcttcccggtgctgcgtctgcgcggcgactatctggcgattgtgaccttaggcttcggcgagatcgtgcgcattttgctgcttaacaataccgagatcaccggcgggccgaacggtatcagccagatcccgaaaccgactttctttggtcttgaatttagccgtaccgcccgtgaaggcggctgggataccttcagcaacttcttcggtctgaagtacgatcccagcgatagggtgattttcctctatctggtagcgttgctgctggtggtgctcagcctgttcgttattaaccgtctgctgcggatgccgctcgggcgggcgtgggaagcgctgcgtgaagatgaaatcgcctgtcgttcgctgggcctgagcccgacgcgcatcaagctgaccgcctttactatcagcgccgcgtttgccggatttgccggcacgctgttcgccgcgcgccagggcttcgtgagcccggagtcctttaccttcgccgagtcggcctttgtgctggcgatcgtggtgctggggggtatgggctcgcagtttgcagtgatcctggcggctattctgctggtggtatcgcgcgagctgatgcgtgatttcaacgaatacagcatgttaatgctcggtgggttgatggtgctgatgatgatctggcgcccgcaggggctgctgccgatgacgcgcccgcagctgaagctgaaaaacggtcaggcgaaaggagagcaggcatga

SEQ ID NO: 87734 - DNA, 768 bp, Enterobacter aerogenes
atgagtcagccaatattatccgtaaacggcctgatgatgcgttttggcggcctgctggcggtcaataacgtctcccttgagctgcgcccgcaggagatcgtttccttaattggcccaaacggcgcgggaaaaaccaccgtttttaactgcctgaccggtttctataaacctaccggcggcaccattatgctgcgcgaccagcatctggaagggctgccggggcagcagattgcgcggatgggggtggtacgaaccttccagcacgtgcgtctgttccgcgaaatgacggtgattgaaaatctgctggtggcgcagcatcaacagctgaaaaccggcgtcttctccggtctgctgaaaacgccggccttccgtcgcgcacagagcgaagcgctggatcgggccgccacctggcttgagcgtatcggcctgctggagcatgccaaccgtcaggccagcaacctggcctacggcgaccagcgccggctggagattgctcgctgtatggtgacgcagccggagatcctgatgcttgatgaaccggcggcggggcttaacccgaaagagaccaaagagctggatgagcttatcgccgagctgcgtagccatcacaacaccaccatcctgcttatcgaacatgatatgaagctggtgatgggcatttccgatcgcatctacgtcgtgaaccaggggacgccgctggccaacgggacgccggaagagattcgtagtaacccggacgtgatccgcgcctatttaggtgaagcataa

SEQ ID NO: 87735 - DNA, 732 bp, Enterobacter aerogenes
atggtggtgacgcataagatggaaaaagcgatgttaacttttgacaatgtcagcgcccactacggcaagattcaggcgctgcacaacgtcagcctgcatatcaaacagggtgagatcgtcacgcttatcggcgccaacggcgcagggaaaaccaccctacttggtacgctgtgcggcgatccgcgggcttccagcgggcgcattgtctttgacggtaaggatattaccgactggcagacggcgaaaatcatgcgtgaagcggtggcgatagtgccggaagggcgacgcgtcttttcgcgcatgacggtggaagagaatctggcgatgggcggtttctttgccgaccgcgaccagttccatacccgcatcaaatgggtgtatgagctgttcccgcgtctgcatgaacgccgtattcagcgcgccggcaccatgtccggcggcgagcagcagatgctggcgatcggtcgcgctctgatgagccagccgcgcctgctgctgcttgatgagccctcattggggctggcgccgattatcattcagcagattttcgataccatcgaacagctgcgtgagcaggggatgacgatcttcctggttgagcagaacgccaaccaggcgctgaagctggccgatcgcggctacgtactggaaaacggtcacgtggtgctggaggataccggcgacgcgctgttggccaacgaggcggtgcgcagcgcctatctcggcggttag

SEQ ID NO: 87736 - DNA, 222 bp, Enterobacter aerogenes
atgagaacggttaactatagcgaagcccggcaaaatctggccgatgtgctggaaagcgcagtgacaggtgtacctgtgaccattacccgtcgtgggcataaatctgcggtcatcattagtgcagaagagtttgaacgctaccaggcggccagaatggatgatgagttcgcggctatcatggcggttcatggtgatgagatcagggagcttgcggataaatga

SEQ ID NO: 87737 - DNA, 369 bp, Enterobacter aerogenes
atgacgctgcagattatctcagcggaagagataatacagtttcacgacaggctgctccgcgtcacgcctggcgttgccggtatgcccgatccggggcgtgccgaagcgataatgtatagggtgctaaacaaaattgaatatgaaggtgtgacagacgtgtggcgactcgctgcgatgcatctgctggcgatttctcgcggtcatatatttaatgatggtaataagcgtacggcactgtttatcaccctgctttttttaaagcgaaatggaattatattgccggcgaatccggacttcgtcggcatgaccgtcgaggcagcagcagggaaacttaccctggaacagattgtcgcgcgtttgcgcggatga

SEQ ID NO: 87738 - DNA, 1317 bp, Enterobacter aerogenes
atgatatcgttacgacatacagctttaggactggcgctgagcctggcatttgctggccaggcactggcagtaaccaccatccctttctggcactcgatggaaggggaactgggtaaagaagttgattctctggcgcaacgtttcaacgcggccaatcctgattacaaaattgttccgatgtacaaaggcaactacgagcagagcctgagcgccggtatcgccgccttccgtaccggcaacgcgccggcgattctgcaggtgtatgaagtcggcaccgccactatgatggcgtcaaaagctattaagccggtgtaccaggtctttagcgatgcgggtattaagttcgatgaatcgcagttcgtaccgacggtgtccggttattacaccgattcaaaaaccggccatctgctctcccagccgtttaacagctccacgccggtgctgtactacaacaaagacgccttcaagaaagcgggtctggaccctgagcagccgccgaaaacctggcaggatttggcggcttacaccgccaaactgaaagcggccggaatgaagtgcggctacgccagcggttggcagggctggatccagattgagaacttcagcgcctggaacggcctgccggtcgccacgaaaaataacggctttgacggtaccgacgcggttcttgagttcaacaagccggagcaggtgaagcatatcgcgctgctcgaagagatgaacaagaagggcgatttcagctatttcgggcgtaaggatgaatccaccgagaagttctataacggcgactgcgcgatgactaccgcgtcatccggctcgctggcggatattcgtcagtacgcgaaattcaactacggcgtcggcatgatgccttacgacgctgatgtgaaaggcgcaccgcagaacgccatcatcggcggggccagcctgtgggtgatgcagggcaaggacaaagagacctacaccggcgtggcgaaattcctcgacttcctgaccaaaccggaaaacgccgccgagtggcaccagaaaaccggttacctgccgattaccaccgcggcctacgatctgacgcgccagcagggtttctatgataagaacccaggcgctgatatcgccactcgccagatgctgaacaagccgccgttgccgttcaccaaaggcctgcgcctgggcaacatgccgcaaattcgcaccatcgtcgatgaagagctggagagcgtgtggaccggcaagaaaaccccgcaacaggcgctggactccgccgttcagcgcgggaatcaactgctgcgccgtttcgagcaagccaccaaatcgtaa

SEQ ID NO: 87739 - DNA, 888 bp, Enterobacter aerogenes
atgtcatcatcccgtccggtattccgctcgcgctggctgccctatgtgctggtcgcgccgcagctgattatcacgctgattttctttatctggcccgcgggcgaagcgctgtggtactcgctgcagagcgtcgatccgtttggcctttccagccagtttgtcggcctggataacttcgtcacgctgttccacgacccgtactatctggactcgttctggacgaccataaaattcagcaccctggtaaccgtcagcggcctgcttatttcgctgttttttgccgcgctggtcgactatgtggtgcgcggcagccgcttttatcaaacgctgatgctgctgccgtatgccgtggcccccgctgtcgcggcggtgctgtggatcttcctcttcaatcctggacgcgggctgatcacgcatttccttggcgaattgggttacgactggaaccacgcgcaaaacagcggccaggcgatgttcctggtggtcttcgcctcggtctggaagcagataagctacaacttcctgttcttcttcgccgcgctgcagtcgatcccgcgttcgctggttgaggccgccgccatcgacggcgccgggccgattcgccgcttcttcaagctggcgctgccgctgattgcgccggtgagcttcttcctgctggtggtcaacctggtttacgccttcttcgataccttcccggtgatcgatgccgccaccgccggcggcccggtgcaggcgaccaccaccctaatctacaaaatttatcgcgaaggtttcgccgggctcgatctttccgcttccgccgcgcagtcggtggtgctgatgttcctcgtcattatcctgacggtggtgcagttccgttacgttgaaagtaaggtgcgttaccaatga

SEQ ID NO: 87740 - DNA, 846 bp, Enterobacter aerogenes
atgattgagaaccgtcgcgggctgacgattttcagccacaccatgctgattctgggcattgccgtcattttattcccgctgtacgtcgccttcgtggcggcgacgctggataacaaatcggtgtttgaaacgccgatgacgctgatccccggcggacatctgctggagaacatgaagaccatctgggtgaacggcgtcggcgtcaacagcgcgccgttctggctgatgatgctcaacagcttcatcatggcgttcgccattacggtaggcaaaatcgtggtgtcgatgctttcggctttcgccatcgtgtggttccgctttccgctgcgtaacctgttcttctggatgatcttcatcactctgatgctgccggtcgaggtgcgtattttcccgacggtggaagtgatcgccaacctcaaaatgctcgacagttatgccgggttaacgctgccgttgatggcttcggctaccgccaccttcctgttccgccagttctttatgactctgccggacgagctgattgaagcggcgcgtatcgatggcgcttcgccgatgcgcttcttccgcgacatcgtgttgccgctgtcgaaaaccaacctcgccgcgctgttcgtcatcacctttatctacggctggaaccagtatctatggccgttgctgattattcaggatgtgaatcttggcaccgccgtcgccggtattaaaggcatgatcgccaccggtgaaggtactactcagtggaatcaggtgatggcggcgatgctgttgaccctgatcccgccggtcgtcatcgttttagccatgcagcgcgcgtttgtgcgcggcctggtcgatagtgagaaataa

SEQ ID NO: 87741 - DNA, 1071 bp, Enterobacter aerogenes
atggctggtttaaaactacaagcagtaagcaaaagctgggatggcaaaacccaggtaattcaaccgctaacgctggacgtggcggacggggagtttatcgtcatggtcggcccgtcgggctgcgggaaatcaacgctgctgcggatggttgccggacttgaacgggtgaccagcggcgatatctggattgatcgtaaacgggtgaccgagatggagccgaaggatcgcggcatcgcgatggtgttccagaactatgcgctttatccgcatatgagcgtggaagagaacatggcgtgggggctgaagattcgcggcatgggtaagggattgatcgccgagcgcgtgcaggaggcggcgcgtattcttgagctggatggcctgctcaagcgccgcccgcgggaactgtccggcggtcagcgccagcgcgtggcgatgggccgcgctatcgtgcgtgacccggcggtattcctgttcgacgaaccattgtcaaacctcgacgccaagctgcgcgtgcagatgcgtctggaactgcagcagctgcatcggcgcctgaaaacgacttcgctgtatgtcacccacgatcaggtcgaagcgatgacccttgcccagcgggtgatggtaatgaataaggggattgccgagcagatcggcacgccggttgaggtgtatgaaaagcccgccagccgctttgtggcgagctttatcggcagcccggccatgaacctgctggaggggcgggtgagcgatgatggcggccgctttgagctggaaggcggcatacagctgccgatgaatcacgagcatcggcgccacgccgggcgtaaaatgactctcggtattcgcccggagcactttattttaagctcgcaggcgcaaggtggcatcccgctgctgatggatacgctggaaattttaggtgccgataacctcgcccacgggcgctggggcgagcagaagctggtggtcagattgccgcatcagcagcgcccggcgggcggcagcacgctatggctgcatctgcctttggaacatctgcacctctttgatggtgaaacaggacaacgcgcatga

SEQ ID NO: 87742 - DNA, 741 bp, Enterobacter aerogenes
atgagtaactggccttatccccgcatcgtcgcccatcgcggcggcggtaaactggcgccggagaacaccctggcggctatcgacgtcggcgcccgctacgggcacacgatgattgaatttgacgccaagctgtcgaaggacgggcagatctttctgctgcacgacgataatctcgaacgcaccagcaacggctggggcgtggcgggcgagctggcgtgggacgatctgctgaaggtcgatgccggcagctggtacagccgtgaatttaagggcgaaccgctgccgctgctctcccaggtagcggaacgctgccgccgtcacgacatgatggccaatatcgaaattaagccgaccaccgggcaggggccgcagaccggcaaagtggtggcgctggccgcgcgcgatctgtgggccgatatgaccgcgccgctactctcatcctttgaaatcgacgcgctggaagcggcgcaggaggccgcgcccgagctgccacgcgggctgctgctggatgagtggcgcgatgactggcgcgaattgaccgcccggctgggctgcgtatctattcatctcaaccacaagctgctggatgcggctcgggtagcgagcctgaaacaggccggcctgcatattctggtgtatacggtcaataaaccccagcgcgccgctgaactgctgcgctggggtgtagattgcatctgcaccgatgctattgacgtcatcgggccgaatttccagccttaa

SEQ ID NO: 87743 - DNA, 321 bp, Enterobacter aerogenes
atgaaagcgattttattcctggcggcgctgatgccgctcggcgttttagcacagccgattaacatcgataacaaccctaaccagccgggttatgtggtacccagccagcagcgtatgcaaaatgagatgaaggtgcagcaacagcagcagcaaagcatgctgaagcagaatctgaataatcagacgcatatgcagcaacagcatttgcaaaatcagctgcagaccaatcagcagcgcgcggcgcagggcggcaatctcaattcgcagccgcaggtactgccgaacaacaacggcgggatgctgcggcagactaacccgtaa

SEQ ID NO: 87744 - DNA, 1746 bp, Enterobacter aerogenes
atgataaaaacaacaatatggcgtcaggtggtcatcgcagcgttactggcggggggcagctttaccgtcgccgccaatccgccacccccgccgccggtctcgtatggcgttgaggaagatgtgtttcacccggtgcgcgcccagcaggggatggtggcctcggtggatgcgctggcgacccgcgtcggcgtggatattttgcgtcagggtggcaacgccgtcgatgcggcggtggctgtcggctacgcgctggcggtcacgcatccgcaggccggtaatatcggcggcggcgggtttatgatgctgcgtactaaagacggtaaaaccacggcgatcgatttccgcgagatggccccggaacaggccacccgcgatatgttcctcgatgaacatggcaatcctgacagtaaaaaatcgctgacttcacatctcgcttccggtacgccaggcagcgtcgcgggcttctctctcgcgctggaaaaatacggtaccatgccgctgaacaaggtgatccgcccggcgattaagctggcggaagagggctttatcgttaacgatgcgctggctgacgatttaaaaacctatggcagcgaagtgatcccgcagcatgaaaacagcaaagcgattttctggaagaacggcgagccgctgaaaaaaggcgaccggctggtgcaaaagaatctggggaaaagcctggagctgattgccgagcacggcccggacgccttctataaaggggctatcgccgaccagattgccggtgagatgaaaaaacacggcgggcttatcaccaaagccgacctcgccaactacaaggccgtggagcgtacgccgattagcggtgaatatcgcggctatgaggtttactccatgccgccgccgtcctctggcgggatccacatcgtgcagatcctcaatatcctcgaaaacttcgatatgcagaaatatggctttggcagcgccgacgccatgcaggtgatggcggaggcggagaaacatgcctatgccgaccgttcggaatatctcggtgatcctgacttcatcaaagtgccgtggcaggcgttgaccagcaaggcttacgccaaagcgattgccgccgagattgacgtgaacaaggcgaagccttccagccagatccgtccgggcaagctggcgccgtatgaaagcaaccagactacccacttctcggtagtcgataaagacggcaatgcggtggctgtcacctatacgttgaataccacctttggcaccggcatcgtggccggcgactccggcattatactcaacaaccagatggatgatttctcggcgaaacccggtgtgcctaacgtttatggtttagtcggcggcgacgccaacgcggtagggccgaaaaagcgtccgctgtcgtcgatgtcgccaactatcgtggtaaaagacgggaagacctggctggtgaccggtagcccgggcggtagccgaattatcaccaccgtgctgcaaatggtggtcaacaccattgattttgggatgaacgtcgcggaagccaccaatgcgccgcgcttccaccaccagtggctgccggatgaactgcgggtggagaaaggttttagcccggataccgtgaaattgctggaagcaaaagggcagaaagtcgcgctgaaagaggcgatgggcagtacccagagcattatggtggggccggacggcacgctggatggcgcttccgatccgcgttcgcccggtgatttgaccgcggggtattga

SEQ ID NO: 87745 - DNA, 489 bp, Enterobacter aerogenes
atgagtgacatcgtgatacgccatgctgaaccgaaagatgttgacgcgattcgtcaaattcacgcccagccggaggtgtatcacaacacgctacaggtccctcatccatcggagcatatgtggcgggagcggctaaccgatacgcccggcgtgaagcagctggtggcctgtatcgatgggcaagtcgtcggccatttaagcattgccgtcgtccaacgccctcgccgtagccacgtcgccgattttggtatcagcgtggattcgcgctggcataaccgcggcgtcgccagcaccctgatgcgcaccatgattgatatgtgcgacaactggctgcgcgtcgagcgcattgagctgacggtgttcgccgataacgccccggcggtcgcggtgtataagaagtacggctttgagatcgaaggcaccgccaagggttacgcattgcgcaacggcgagtatgtggatgcgtattatatggcgagaatgaagtag

SEQ ID NO: 87746 - DNA, 648 bp, Enterobacter aerogenes
atggaaaaaaagtatctcgccataaactgcgccatttttttctggcttctcgcactgatcgcctggtttagcgatgaggccgcgctggcgcgcctggcagcggcctgtacccttttcgctttccttactcatacccaacgggaaaaaattaacgctatgtttatgaagaaaaataaaaccgaagcgcaggctgctgcagtcgcggcgccagccgtggcggcaacagagccagaaacggcaagcgtcaaaaaacaggaaaccacggtgatcgccagcggcgtgcattttgtcggcaacatcgtcgccagcggccatgtctatatccacggccaggtcaccggcaacattgaggccaaagaacatctcattaaggtgatgcgcgaaggtgaggtcgagggcaatatcagttgccgcgagctgatcgtcgacggcaaggttcatggccagtgccgtggcgatagcattgctattgaggaacatggcaacctcgacggcaccctcgcctatcgcgcgctggcgattaaaaagggcggcctgtttaccggcagcgcggaggtgttggccgcggcggagagcaaaaataaaggtaatatcgtcggcctggtcgcggaagaaggggcgaaacccgtaaaatcgcaacatgcctga

SEQ ID NO: 87747 - DNA, 1038 bp, Enterobacter aerogenes
atgattctgcactgcgcatttattggctttggtaaaagcacgacccgctatcatcttccttacgtcctgcatcgcaaagaccgctggcacgtcgcgcatatttatcgccgcagcgccaggccggaagaacaagcgccggcgtattcccatatccacttcaccagcgacctcgatgaagtgctgaacgacccgcaggtcaaactggtggtggtctgcacccatgccgatagccacttcgaatatgcgaagcgggcgctggaagcggggaaaaacgtactggtcgaaaagccctttaccccgacgctggcagaggcgaaagccctgtttacgctggcgaaaagcaaagggttgacggtgacgccttaccagaaccgccgcttcgattcctgtttcctgaccaccaaaaaggtgattgaaagcgggaagctcggcgaactggtggaaattgaaagtcattttgataactaccgaccggtggcggaaaccatccaggggggaccgcaaagcggcgatttctatggcctcggggtgcataccatggaccagatcatttcgctgtttggtcgcccggatcatgtttcctacgatctgcgctcactacgtaataaagccaatcccgatgacacgtttgaagctcaactgttttatggcgacctgaaagcgatcgtcaaaaccagccatctggtgcagattgactacccgaaatttatcgttcatggccataaaggctcgtttgtgaaatacggcattgaccagcaggagaccagcctgaaggccaacattatgccgggcgacgcggggttcggcgctgatgacagcgtagggcaactggtctatatcaacgaggcgggcgtggaggtacgtgaagaggtgccgctggaaaccggcgactacggacgagtgtatgacgcgctgtatgacaccctcgttaacggccagccgaattacgtcaaggaatctgaagttctcaccaatatggagattcttcagcgcggttttgaacaaccttctccggctactattaccctcgcaaaataa

SEQ ID NO: 87748 - DNA, 696 bp, Enterobacter aerogenes
atgatctacttacgcaaagctaacgaacgtggccacgctaaccatggctggctggattcctggcatactttctctttcgccaactactacgacccgaactttatgggtttctccgcgctgcgcgtgattaacgatgacgtaattgacgccggccaggggtttggcacccacccgcacaaagatatggaaatcctgacttatgtgctggaaggcgcggttgagcaccaggacagcatgggtaacaaagagcaggttccggctggcgagttccagatcatgagcgcgggtaccggcgtgcgtcactctgagtacaacccgagcagcaccgaccgcctgcgtttgtatcagatctggattattccagaagaaaccggcattacgccgcgctacgagcagcgccgctttgatgccgcgcagggcaaacagctggtgctgtcgccagatgcgcgcgaagggtcgctgaaagtgcatcaggatatggaactgtatcgctgggcgctgctgaaagatgagcagtcggttcaccagattgccgcggaacgtcgcgtgtggatccaggtagtgaaaggcgaagtgacgattaacggcaccaaagccaccaccagcgatggtctggcgatttgggacgagcaggcgatttcggttcacgccgacagcgatagcgaaattctgctgttcgatctgccgccggtttga

SEQ ID NO: 87749 - DNA, 996 bp, Enterobacter aerogenes
atgaaaaagaaaagacccgtacttcaggatgtagccgatcttgtcggcgtgaccaaaatgacggtcagtcgctatttacgtaacccggaacaggtttctgaggccctgcgtggcaagattgccgttgcactcgatgagctgggttatattcccaatcgcgctcctgacattctctccaacgccaccagccgcgccatcggcgtgctgctgccctcgttaaccaaccaggtcttctcggaagtgttgcgcggcattgaaagcgtcaccgacgccttcggctatcaaaccatgcttgcgcactatggttataagccggagatggaagagaagcgcctcgaatcgatgctctcctggaacattgatggcctgatcctcactgaacgtacccatacgccgcgcacgttgaaaatgattgaagtggccgggatcccggtggttgagctgatggacagccagtcgccgtgcctcgacattgccgttggtttcgataacttcgaagcggcgcggcagatgacggcggcgattatcgcccgcggtcaccgccacgttgcttatctcggcgcgcgtcttgatgaacgtactatcatcaaacagaaggggtacgagcaggcgatgctcgatgccggcatgacgccctacagcgtgatggtggagcaatcctcttcctactcgtcagggattgagctgatgcgtcaagcgcgtcgcgaatatccgcagctcgacggcatcttctgcaccaacgatgacctcgcggtcggcgcggcgttcgagtgccagcgtctggggctgaaaatcccggacgacatggcgatagccggtttccacggtcacgatatcggtcaggtgatggagccgcgtctcgccagcgtactgaccccgcgtgagcgcatggggcgcatcggcgccgagcgtctgctggcgcgcatccgcggtgagacgattacccctaagatgttagatttaggtttcacattgtcaccgggtggatctatttaa

SEQ ID NO: 87750 - DNA, 531 bp, Enterobacter aerogenes
ttgagcacgactaaccatgatcaccacgtctatgtcctgatgggcgtttccggcagtggtaaatccgccgtcgccagcgaagtggcgcatcaactgaaagccgcgtttctcgatggcgattttctgcatccgcgcagcaacatcaccaagatggcttccggcgagccgctgaacgacgatgatcgcaccccgtggctgcaggcgttgaatgacgcggcatttgccatgcagcgcaccaacaaagtttcgctgatcgtctgctcagcgctgaaaaaaagctaccgcgacattctgcgcaagggcaatccgaacctctcctttatctacctgaaaggcgacttcgacgtgattgaaagccgtctgaaggcgcgtaaagggcacttcttcaaaacccaaatgttggtgacgcagtttgaaacactgcaggaaccaggcgctgacgaaagcgatgtgcttatcgtcgatatcgaccagtcactggaaggcgtggtcgccagcaccattgaggtgattaacaaaggcagtaactag

SEQ ID NO: 87751 - DNA, 1341 bp, Enterobacter aerogenes
gtgagtactttaacgcttgttttaacagcagtcggctcggtattgctgctgctgtttttagtcatgaaggcgcgtatgcacgccttcgtggctttaatggtggtttctattggcgcaggtctcttttccggtatgccgctggataaaatcgcggcgacgatggaaaaagggatgggcggcacgctgggcttcctggcgatagtcgtcgcgctgggcgcgatgttcggtaaaattttgcatgaaaccggcgcggtcgaccaaattgcggtaaaaatgctgaagtccttcggccacaaccgcgcgcactatgcgattggcctggccggccttatctgcgcgctgccgctgttcttcgaagtggcgatcgtgctgctgattagcgtcgcgttctccatggcgcgccataccggcactaacctcgtgaagctggtgatcccgctgttcgcaggcgtagccgccgccgcggcattcctgctgccggggcccgcgccgatgctgctggcttcgcagatgcacgccgatttcggctggatgatcctgattggtctctgcgccgctattccggggatgattatcgccggcccgctgtggggtaacttcatcagccgctatgttgagctgcacattcctgacgatatcagcgaaccgcatctcggcgaaggtaaaatgccgtccttcggctttagcctctcgctgatcctgctgccgctggtgctggtcggcctgaaaaccatcgccgcgcgctttgtgccggtgggatccaccgcctatgaatggttcgagtttatcggccacccattcaccgcgattctggttgcctgcctggtagcgatttacggcctggcggtacgtcaggggatggcgaaagatcgcgtgatggagatctgcggcgcggcgctgcagccggcgggtattattctgctggtgattggcgcaggcggcgtcttcaagcaggtgctggttgactccggcgtcggcccggcgctcggcgaagcgctgactggcctgggtctgccgattgcgattacctgcttcgtgctggcggctgccgtacgtattattcagggctccgcgaccgtggcgtgtctgacggcggtcggcctggtaatgccggtcattgagcaactgaactacagcggcgcgcaaatggcggctctctccatctgtatcgcgggtggttcgatcgtagtgagccacgtgaacgatgccggcttctggctgttcggtaagtttaccggcgccagcgaagcgcagacgctgaaaacctggacgatgatggaaaccatccttggcaccaccggcgccatcgtcgggatgattgccttccagctgctgagctaa

SEQ ID NO: 87752 - DNA, 1107 bp, Enterobacter aerogenes
atgaaaaatgttggttttatcggttggcgtggaatggtcggctctgttctcatgcaacgcatggtggaagagcgtgatttcgacgccattcgccctgttttcttctccacctctcagctgggacagcccgcgccgtcattcggcggcagtaccggggggacgcttcaggatgcattcgatctggaagcgctgaaggcgctggacattattgttacctgccagggcggcgattacaccaacgagatttacccgaagctgcgcgaaagcggctggcaggggtactggattgacgcggcgtcttcgctgcgcatgaaagacgatgcgatcattattctcgacccggttaaccaggatgtcattaccgctggcctgaataacggcatcaaaaccttcgtcggcggcaactgtacggtgagcctgatgctgatgtccctcggcggcctgtttgcccatgacctggtagagtgggtcagcgtggcgacttaccaggcggcttccggcggcggcgcgcgtcatatgcgcgaactgctgagccagatgggccaactgcatggccacgtggcaagcgagctggcgaacccggcttccgcgattctcgatatcgagcgcaaagtgacgtcgctgacccgcagcggcgacctgccggtcgataactttggcgtgccgctggcgggcagcctgatcccatggatcgacaaacagcttgataacggccagagccgcgaagagtggaagggccaggcggagacgaacaaaattctcgccaccgcgtcgccgatcccggtcgatggtctgtgcgtgcgtgtcggtgcgctgcgctgccacagccaggcgtttaccatcaagctgaagaaagatgtttctatcccgaccgttgaggagctgctggccgcgcataacccgtgggctaaagtggtgccaaacgatcgcgacatcaccatgcgcgagctgaccccagccgcggtgaccggcaccctgaccaccccggtagggcgcctgcgtaaactgaacatgggtcctgagtacctgtcggcctttaccgtcggcgaccagctgctgtggggcgccgccgaaccgttgcgccgcatgctacgacagctggcgtaa

SEQ ID NO: 87753 - DNA, 2184 bp, Enterobacter aerogenes
atgtcgaatcgaatcgatagagacgtgattaatgcgctgattgcaggtcatttcgcggatcccttttccgtgcttggcatgcaccgcaccgaggcggggctggaagttcgcgcattattaccagatgccaccgaagtgtgggttattgaaccgaaaaccgggcgtaaagtcggcaaactcgaatgcctcgactcgcgcggattctttagcggcctgctgccgcggcgtaaaaacgcttttcgctaccagctggccgtcacctggcacggacagcaaaacctgattgacgacccttaccgttttggcccgctgctgcaggacgttgatgcctggctgttgtccgagggaacgcacttgcgcccttacgaaaccctgggcgcgcacgccgacactatggatggcgtcaccggtacgcgcttttcggtctgggcgccaaacgcccgccgggtctcggtggtggggcaatttaactactgggatggccgacgccatcccatgcgcctgcgtaaagagtccggtatctgggaactcttcattcccggcgcgcttaatggccagctgtataaattcgagctgatcgacgctcatggcaatctacgcgtcaaatccgatccttacgcctttgagtcgcagatgcgcccggaaagcgcgtcgcttatctgcgatttgccgccaaaagtcgaacagccggcggcgcgcaaagccgcgaaccagtttgatgcgccgatctctatttatgaagtgcacctcggttcctggcgccgccataccgacaataacttctggcttagctaccgcgaactggcggaccaactggtgccttacgcaaaatggatgggtttcacccacctcgaactgctgccggtgaacgaacacccgttcgacggcagctggggctaccagccgaccggcctctacgcgccgacacgccgcttcggcacccgtgaagatttccgctatttcatcgatgccgcccacgccgcaggccttaacgtgatactcgattgggttccgggtcattttccggcggatgattttgcgctggcctcatttgatggcacctcgctgtatgaacacagcgatccgcgcgaaggttatcaccaggactggaatactcttatctataactatggccgccgcgaagtcagcaattacctggtgggtaacgcgctgtactggatcgagcgcttcggcattgatgcgttgcgcgtcgacgcggtggcgtcgatgatctaccgcgactatagccgtaaagcgggcgagtggatccccaacgaatacggcgggcgggaaaatctcgaagcgatcgagtttctgcgtaacaccaaccgtattctcggcgagcagacgccaggggcggtaacgatggcggaagagtccaccgattttgccggcgtgacgcgcccgcccgccgacggcggcctcggcttctggttcaaatggaatctcggttggatgcacgacacgctggactatatgaagctcgatccagtccatcgtcgctaccatcacgacaaaatgaccttcggcatgctctacaactacaccgagaacttcgtgctgccgctctcccacgatgaagtggtgcacggcaaaaaatcgattctcgaccgcatgccgggggacgcatggcagcgctttgccaacctgcgcgcctactacggctggctgttcgcctttccgggcaaaaagctgctgtttatgggcaatgaattcgcccagggccgcgagtggaaccacgacgccagtctcgactggcatctgctggagggcggcgacaactggcaccacggcgtccagcgactggtgcgcgacctgaaccacacctaccgtcaccataaagcgctgcacgagcttgatttcgatccctacggcttcgaatggctggtggtcgacgatcatgagcgttcggtatttatctttgtgcgccgcgataaagccggcaatgagattatcgtcgccagcaactttaccccggtgccgcggcactactaccgtttcggcatcaaccagccgggacgctggcgtgaagaattgaacaccgactcgatgcattatcacggcagtaacgccggaaatggcggcgtggttgagagcgagcccgtcgccagccatggccgtcagcattcgttgtcgattaccctgccgccgctggcgaccatctggctggtacgggaggcctga

SEQ ID NO: 87754 - DNA, 1977 bp, Enterobacter aerogenes
atgacgacgcttgccgcgggaaaaccgacgcctttgggcgccagctatgacggcaaaggggtgaacttcaccctgttttccgcccacgccgagcgggtggagctctgcgtgttcgaccagcagggcaacgagcggcgctacgacctcccggcgcgcagcggcgacatctggcacggctggctggccgatgcgcgtccagggttacgctacggttatcgggtgcacgggccgtgggatccggcgcaggggcatcgcttcaatccggccaagctgctgctcgacccttgcgcgcatcaggtggcgggtgaactgctggacgacgagcgtctgcatggcggtatgcatgaaccggatgcccgcgacagcgcagccattgcgccaaaatcccaggtggtcgatctgcattacgactggctcggtgataaaccgccgcgcacgccttggggcgaaacggtcatttatgaagcccacgtcaaagggttgacctggctgcatccggagctgccggaggcgatccgcggcacctatcaggcgctgggccacccgctgatgatcgattattttcgccgtctgggtattaccgcgctggagctgatgccggtggcgcagttcgccagcgaacctcgcctgcagcggatggggctgagcaactactggggctacaacccgctggcgctgtttgcgctggagccgcgctacgccagccagccgcagcgggcgctcgatgagttccgcgatgcggtgaaggcgctgcacgcggcgggcatcgaggtgatcctcgatatcgtgctgaaccatagcgcggaaatcgatcttgaagggccgacagtctccctgcgcggtatcgataaccgcagctattattggatcagggacgacggcgattatcacaactggaccggctgcggtaacacgctcaacctcagtcatcccggcgtggtggagtatgccctgcagtgcctgcgcttttgggttgatgaatgccacgtcgacggttttcgcttcgacctggcgtcggtgatggggcgtacgccggaatttcgtcaggacgcgccgctgtttgaggccattcgccgcgacccggtattgtcggcgctcaagctgattgccgaaccctgggatattggccagggcggttatcaggttgggaatttcccaccgctgtttgccgaatggaacgaccattttcgcgataccgcgcgccgtttctggttgcaacaaaacgtgtcgttgggtgacttcgcccagcgcttcgccgcctccagcgatctctttgcccgcgatggcaaacggcctgcggcgacgatcaatctgatcacggcgcatgatggattcaccctacgtgattgcgtctgtttcaatcagaaacacaatcaggcgaacggcgaagagaatcgcgatgggactaacaataactacagcaataatcatggtatagagggattagaagccaatcttgccgtgattgagcggcggcgcgatagcgtacatgcgctcctgaccacgctgctgctgtcgcaaggaacgccgatgctgctggcgggcgatgagcatggccacagccagcatggcaacaataatgcgtattgtcaggacaatgccttgacctggctggactggcggcgggcaaatcacgggttaaccgcttttgtcgccgcgcttatccacctgcgtcggcgcattccggcattaacccgtaatcagtggtggcaggagcaggacggcaacgtgagctggctcaatcagcgcggagaaccgttaaacgccgacgagtggcaacatggcgccgcgcggctgcaaatcctgttatccgatcgctggctgatcgcgctgaatgccaccgcggaggtggcggatatggttttacccgcgggggagtggcgcgccattcctccattcgccggagaggataatccggtcatcatggctgtctggcatgggcccgcgcacggagtttgcgtatttcaaaggtcgtag

SEQ ID NO: 87755 - DNA, 1296 bp, Enterobacter aerogenes
atggttgggctagaaaagaacgatccgttgatgctggcgcgtcaacttcctctcaaatcggtggcgctgatccttgctggcgggcgtggtacccggcttaaggatttaaccattaagcgcgcgaagcctgccgtccactttggcggtaagttccgtattatcgacttcgcgttatctaactgtcttaactcaggtattcgccgcatcggcgtgattacccagtatcaatcgcacactctggtgcagcatatccagcgaggctggtctttcttcagcgaagagatgaacgagttcgtcgatctgctgccggcgcagcagcgggtacacggtgaaaactggtatcgcggtacggccgatgcggtgacgcagaacctcgacattattcgtcgctataaagccgaatatgtggtgatcctcgccggcgaccacatctacaaacaagattactcgcgcatgctgatcgaccatgtcgaaaaaggcgcgcgctgcaccgttgcctgtatgccggtgcccatcgaagaagcatccgcctttggcgtgatggcggtcgacgaaagcgagaagatcatcgagttcgtcgagaaaccggccaacccgccggcgatgccgaacgacgctacccgctcgcttgccagtatgggcatctatgtctttgatgcggattacctttatgaactgctggccgccgacgatctcgacgaaaactccagccacgacttcggcaaagatatcatcccgaaaattaccgaagctggcatggcttatgcacatcctttcccgctctcctgcgtgcaatccgacccgcaagccgagccgtactggcgcgatgtcgggacactggaagcctactggaaggccaacctcgatctggcctcggtgacgccggagctggatatgtacgaccagcactggcctatccgtacccatatggaatcgctgccgccggcgaagttcgtccaggaccgctccggcagtcacggcatgacgctgaactcgctggtttccggcggctgcattatctcgggctcggtggtggtgcagtcggtgctgttcccgcgagtgcgggtgaattcgttttgtaacattgattcggcagtcttattgccggatgtctgggtcgggcgctcgtgccgcctgcgccgctgcgtgatagatcgcgcctgcgtcatcccggaagggatggtcattggggagaatgcggaagaagatgccagccgcttctatcgttcagaagaagggatcgtgctggttacgcgcgacatgctgcggaaactggggcacaaacaggagcgataa

SEQ ID NO: 87756 - DNA, 1434 bp, Enterobacter aerogenes
atgcaggttttacacgtatgttcagagatgttcccgttgttaaaaaccggcggtctggctgacgttatcggcgcgctgcctgcggcgcagatcgcagacggcgtggatacccgcgtgctgctgccggggtatccggatatccgccgcgggattaccgacgcgcaggtcgtcacccgccgggatacctttgccgggcgcatcaccctgctgttcggccattttaacggcgtcggtatctatctgatcgacgcgccgcatctctacgatcgcccggggagcccgtatcacgacgccaacatgaacgcctataccgacaacgtgctgcgctttgcgctgctcggctgggtggggagcgaaatggcctgcgggctggatccattctggcgcccggaggtggtgcacgcccatgactggcacgcgggcctgacgccggcctatctggcggcgcgcggccgtccggcgaaatcggtgtttacggtgcacaatctcgcctaccagggaatgttttactcctggcatatgaatgagatagagctgccgtggtcgttctataacatgcacggcctcgaatttaacggtcagatctcgttcctcaaagccgggctgtactatgccgaccatatcacggcggtgagtccaacctacgcgcgggaaatcaccgaaccgcaatatgcctacggcatggaagggttgctgcgccagcgccaacacgagggccgcttgtccggcatccttaacggtgtcgatgatgctatctggaatccgcaaagcgatctgctgctggcggcgcgctatgaccgcgatagcctggaagagaaagccgagaataaacggcagctgcaaatcgccatggggctgaaggtggatgacaaagcgccgctgttcgccgtggtgagccgcctgaccagccaaaaagggctggatctggtgctggaggcgctgccgggcctgctggagcagggcgggcaactggcgctgctcggcgccggggatccggtcctgcaggagggcttcctcgccgccgccgccgaacatccgggccaggtcggcgtgcagattggctatcacgaggcgttttcgcaccgcatcatgggcggcgccgatgtgattctggttcccagccgctttgaaccgtgcggcctgactcagctgtatggcctgaaatacggcaccctgccgctggtgcgccgcaccggcggtctcgccgataccgtggccgactgttcgctggaaaacctcgccgacggcgtcgccagcggctttgtctttgaggacagtaacgcggtgtcgttgctgcgggccatccggcgcacctttgtgttgtggtcgcggccatcgctgtggcgctacgttcagcgtcaggcgatgaatatggactttagctggcaggtggcggcgaaatcctatcgtgaactctatcaacgcttgatgtaa

SEQ ID NO: 87757 - DNA, 2448 bp, Enterobacter aerogenes
atgaatgcaccctttagttatgcatcacccacgctgagcgttgaggcgttaaagcattctatcgcgtataagctgatgtttatcatcggcaaagatccggcgatcgccaacaaacacgaatggctgaacgccaccctgttcgccgttcgcgaccgcatggtcgagcgctggctgcgttcaaaccgcgcccagctgtcgcaggaagtgcggcaggtttactatctgtcgatggagtttttgattggccgcaccctctctaacgcgctgctgtcgttagggatttatgaagatgtgaataatgcgctggccgatatggggctcgatctggaagagcttattgatgaagaaaacgaccccggtttaggcaacggcggtttagggcgcctggccgcctgcttcctcgattctctggcgacactgggcctgccgggccgcggctacggtatccgctacgactatgggatgtttaaacagaacattgtcgacgggcggcagaaagagtcgccggattactggctggagtacggcaacccgtgggagttcgaacggcacaatacgcgctataaagtgcgtttcggcggccgcgtgcagcaggaagggaaaaatacccgctggatagagaccgaagagattatcgccgaagcctacgatcagattatccccggtttcgataccgatgccactaacaccctgcgtctgtggagcgcgcaggccagtagcgaaatcaacctcggtaaattcaaccagggcgactactttgcggcggtggaagataagaaccactccgagaacgtttcgcgggtgctgtacccggatgactccacctattccgggcgcgagctgcgcctgcgtcaggagtatttcctggtctcggcgacggtgcaggatatcctcagccgccactaccagctgcaccgcacctacgacaatctggcggcgaaaatcgccattcacctcaatgacacccacccggtgctgtcgattcctgagctgatgcgtctgctgatcgatgagcacaaatttagctgggatgaagccttcgaggtgacctgccaggtcttctcctataccaaccatacgttgatgagcgaagcgctggagacctggccggtcgatatgctggggaaaatcctgccgcgccatctgcagattatcttcgagattaacgattacttcctcaagacgctgcaggagcagtatcccaacgataccgcgctgctgagccgtacctcgatcattgatgaatccaatggtcgccgggtgcgcatggcgtggctggcggttgtcgtcagccataaagtcaacggcgtgtccgagctgcattcgcgcttaatggtcgagtcgctgtttgccgagtttgcgaagattttcccgatgcgctttaccaatgtcaccaacggcgtcacgccgcggcgctggctggcgttggcgaacccgccgctgtcgcaggtgctggatgagaatatcggccacacctggcgcaccgacttaagccaactaagcgatctgcagcagcatattgattatccgacggtgaaccaggcggtgcgccgcgccaagcttgagaataagcagcggctggcgaactatatcgcccagcagttgaacgtggtggtcaatcctaaggcgctgtttgatgtgcagatcaaacgcatccacgaatataaacgccagctgatgaatatcctgcacgtcatcacccgctacaatcggatcaaagccgatccgcaggcggagtgggtgccgcgggtgaatatcttcgccggcaaggccgcgtcggcttactacatggcgaagcatattattcatctgatcaacgatgtggcggcggtggtgaacagcgatccgcagattggcgataagctaaaagtggtgtttatccccaactacagcgtgagcctggcgcagctgattatcccggcggcggatctctccgagcagatttcgttggcgggaacggaagcgtccggtaccagcaatatgaagtttgcgctcaacggcgcgctaaccattggtacgctggatggcgctaacgttgaaatgctggagcacgtcggcgaggacaatatctttatcttcggtaataccgcggaacaggtagaagccctgcgcagtaacggctataaaccgcgcgactattatgagcaggatgaggagctgcatcaggcgttgacgcagattggcaccggcctgttcagtccttcggagcctggccgctaccgcgacctgctggattcgctgatcaactttggcgaccactatcaggtactggcggactaccgcagctacgttgattgccaggataaggtggacgagctgtaccgccatccggaggagtgggccaataaagcgatgatgaacatcgccaacatgggctatttctcatccgaccgcacgatccaggagtacgccaaacatatctggcatatcgacccggttcgtttgtaa

SEQ ID NO: 87758 - DNA, 1509 bp, Enterobacter aerogenes
gtggaaatcaaagatctgattgtgataggcggaggcatcaacggtgccggtatcgcggcagacgccgccgggcgcggtttatccgtgctgatgctggaagcgagagaccttgcctgcgccacctcgagcgccagctcaaaactgattcacggcggcctgcgctacctggaacactacgaattccgcctggtcagcgaagcgctggcggagcgtgaggtgttattaaaaatggcgccgcatttggccttcccgatgcgctttcgcttaccacatcgcccgcatctgcgcccggcgtggatgattcgtatcggtctgtttttatacgatcacctcggcaaacgtaccagcctgccgggctcgaccggtttgcgctttggcgcggaatcggtacttaagccagaaatcgtgcgcggtttcgaatattccgactgctgggtcgacgatgcgcgtctggttcttgccaacgcccagatggtggtacgtaaaggcggcgaggttcgcacccgcacccgcgctatctcggcaaaacgcgaaaacggcctgtgggtggtggaagcggaagatatcgatagcggcgaaaaattcacctggcacgcgcgcggcctggttaacgccaccggcccgtgggtgaaacatttcttcgacgaaggcatgcatctgcgctcgccctatggcatccgtctgatcaaaggcagccatatcgtggtgccgcgcgtgcacacccagaagcaggcctatatcctgcaaaacgaagataaacgtatcgtgtttgtcatcccgtggatggatgaattctcaattatcggtaccaccgacgtcgagtacaacggcgatccaaaagaggtggcgatcgatgataaagagatcaactacctgctgaacgtctacaacgcgcactttaaaaagacgctgtcgcgcgacgatatcgtctggacctactccggcgtgcgtccgctgtgcgacgatgaatccgactcgccgcaggcgattacccgcgactataccctcgatattcacgatgagaacggtcaggcgccgctgctgtcggtattcggcggcaagctcaccacctaccgtaaactggcggaacatgcgctggaaaaactgacgccgtattatcaggggattggcccggcgtggaccaaaaccgccgttctgcccggcggcgatatcggcggcgaccgcgatgactacgcggcgaaactgcgccgtcgcttcgcgtttatcagcgaatcaatggcccgtcactacgcccgcacctacggcagcaacagcgagtggatccttggcgaagcgacttcgcttgccgatctgggagaagattttggccacgagttttatgaagccgagctgaagtacctggtcgaacacgagtgggttcgcagcctggatgacgctatctggcgccgtaccaaacaggggatgtggctgaatgccgagcagcaggcgcgtatcagcgagtggctggcgcaacatacgggaaagtctgaactgtcgttagcgtcctga

SEQ ID NO: 87759 - DNA, 330 bp, Enterobacter aerogenes
atggaacaatttgaatgtatcaatgtagaagaagcgcatcagaaactgcatcagcagaaggcggtgctggtcgatatccgcgatccgcaaagctatgccatggggcacacgccgggcgcgtttcatctgaccaacgataccctgggcgcttttatgcgcgataacgactttgagacgccggtgatggtgatgtgctaccacggcaacagcagtaaaggcgccgcgcagtatctgctgcagcagggcttcgagaacgtctacagcgtcgatggcggttttgacgcctggcatcgtcatttcccggcggaagtcgcgcacggctcgctataa

SEQ ID NO: 87760 - DNA, 831 bp, Enterobacter aerogenes
atgttaatgattacctcttttgccaacccgcgcgtggcccaggcgtttgtcgactatatggcgacgcagggggtcatcctgactatccaacagcacacccagagcgatgtctggctggcagatgaaagccaggccgcgcgggtgcaggccgagctggcccgttttctcgaaaacccggccgacccgcgctatctcgccgccagctggcaatcggggcataccaacagcggattgcattatcaacgcttcccgtttttagctaccctgcgtaacaacgccgggccgtttacgtgggcgattttgctggcctgtatcctggtcttcatactgcaaaacgttttgggcgatcagacgatgatgatctggcttgcctggccctacgatccttcgctgaaattcgaagcctggcgctatcttacccatgctttcatgcacttctcgctgatgcatattctgtttaacctgctatggtggtggtacctcggcggtgcggtggagaagcgcatcggtagcggcaaactggtggtgattaccattatcagcgctctgctgagcggatttgtccagcatcaggttagcggcccgtggttcggcggtttttcgggggtagtctatgcattaatgggctatgtctggctgcgcggcgagcgcgacccgcagagcggtatttatctgcaacgcggtctgatcctcttctctttagtgtggttagtggcaggatggtttgatgttttcggcatgtcgatcgccaatggcgcgcacgtggcgggcctggcagtcgggctggcaatggcgtttgtcgatacgctaaatgtgcgaaaacgaacgtag

SEQ ID NO: 87761 - DNA, 759 bp, Enterobacter aerogenes
atgaaacaaacacaacgtcatgacgcgattatcgagctggtaaaaaaacagggatacgtcagtaccgaagagctggtggagcagtttgccgtcagcccgcagactattcgtcgcgatctgaatgatttagcggaacaaaaaatgatcctccgccaccacggcggcgcggcgatgccttcaagctcagtcaacacctcgtggcacgacaggaaagcgacccagacggcggaaaaagagcgcatcgcgcggaaagtggcgagcgaaatccccgacggcgcaaccctgtttatcgacattggcacgacgccggaagcggtggcccatgcgttgctcgatcataatgacctgcggattgtgaccaacaatctcaacgtcgcgaatacgctgatggtgaaagacgattttcgcattatcctcgccggtggcgagctgcgtagccgcgacggcgggatcatcggcgaagcgacgctcgattttatctcccagttccgcctcgacttcggcattcttggtattagcggtattgatagcgacggttcgctgctggagtttgattaccatgaagtgcgcaccaagcgggcgattatcgaaaactcgcgccacgtgatgctggtggtggatcactcgaagtttggccgtaatgcgatggtgaacatgggcagcattagtatggtcgatgcggtttataccgatatcatgccgcccgcaggcgtgctgaaggtgattaaagacaacaacctgcagctggagctgtgctaa

SEQ ID NO: 87762 - DNA, 2706 bp, Enterobacter aerogenes
atgttgattccgtcaaaattaagtcgtccatcccgtcttgaacacactgtggttcgcgaacggttgctggcgaaactttccggcgcgaacaattatcgtctcgcgttggtgaccagcccggcaggttacggcaaaaccacgctcgtttcgcagtgggcttcgggtaagcatgaccttggctggttttcgctcgatgaaggcgataatcaacaagagcgcttcgccagctatctgattgcggcgattcaacaggcgacaggcggccactgcgccgccagcgaagccatggtgcaaaagcgccagtacgccagcctgccatcgctgtttgcgcagctgtttatagagcttgccgactggcagcgcccgctgtacctggtcattgatgactatcacctgatcaccaatccggtaatccacgatgccatgcgcttcttcttgcgccatcagccagagaccatgacgctggtagtgctgtcgcgcaacctgccgcagttggggatcgccaacctacgggtgcgcgagcagttactggaaatcggcagccaacagctggcttttactcatcaggaggcgaaacagttctttgactgccgcctcgcctcccccattgaagccgatgacagcagtcgcctgtgcgatgacgtcgccggctgggccaccgccctgcagctcatcgccctctccgcccggcagaaaaacacctcagcccagcactccgcccgtcgtctcgccgggattaacgccagccacctttccgactatctggtcgatgaagtgctggataacgtcgatgcccgtacccgcagcttcttgttaaaaagctcgctgctgcgctcgatgaatgacgcgcttatcgtccgcgtcaccggcgaagagaacggccagatgcagctggaagagatcgaacgtcaggggctgtttctgcaccggatggatgactccggcgagtggttccgctaccacccgctattcggcaacttcctgcgccagcgctgtcagtgggaaatggccaccgagctaccggaaattcaccgcgccgccgccgaagcgtggatggcgcagggattccccaccgaagccatccatcatgcgcttgccgctggcgatgccgccatgctgcgcgatattttgctcaaccacgcctggggcatgttcaaccacagcgagctgggtctgctggaacaatcgctggcggcgctgccgtggtcgaacctgctggaaaatccacggctgatcctgctgcaggcctggctgatgcagagccagcatcgctatagcgaagtgaataccctgctggcccgcgccgaacaggagatggatgtcgaaatggataccgcaatgcacggcgatttcaacgccctgcgcgcgcaggtcgctatcaacgccggcgatcaggacgaagccgagcgtctggcgatggtggcgctggatgaactaccgctggcgagctattacagccgcatcgtcgccacttccgttcacggcgaagtgctgcactgcaaaggccacctgagcaaatcgctggcggtgatgcagcaaacagaacagatggctcgccgtcatgacgtctggcactacgccctgtggagcatgatccagcagagcgagattctgtttgcccagggcttcctgcaggcggcatgggagattcaggataaagctttccagcttatccgcgatcagcatcttgaacagctgccgatgcatgagttcctgttgcgcatccgcgcgcagctgctgtgggcgtgggcgcgtcttgatgaagcagaagaaagcgcccgcagcggcatcgctgtgctggcaaactaccagccgcagcagcagttgcagtgcctggcgttgatggtgcagtgctcgctggcgcgcggcgatctcgacaacgcccgcagcttattaaaccgcctggaaaatctgctgggcaacggccactatcacagcgattgggtctctaacgccgacaaagtgcgggtgatctactggcagatgaccggtgataaaaccgcagcggccaactggctgcgccagacgccgaaacctgaattcgccaataaccacttcctgcaaagccagtggcgcaacattgcccgcgcacagatcctgctcggtgattttgattccgccgaaatggtactggaagagttaaatgaaaatgcccgctcgctgcggctgatgagcgatatcaaccgtaacctgctgctgttgaaccagctgtactggcaggcggagcgcaagggcgaggcgcaaaaagtgttaatggaagccttaaccctcgctaaccgcaccggctttatcaaccacttcgtgattgaaggcgaagccatggcccagcagctgcgccaactgattcaactgaatacgctgccggagctggagcagcaccgcgcccagcgcatcctacgcgatattaaccagcatcatcgacataaattcgcccatttcgacgagagcttcgtcgaacggctgctgaaccacccggaagtgccggagcttatccgcaccagtccgctgacccagcgcgagtggcaggtgttagggcttatctattccggttacagcaacgagcagatcgccggcgaactggatgtcgcggccaccacgattaaaacgcatattcgcaatctatatcagaaactgggcgtcgcgcaccgccaggatgccgttcagcatgcccagcggttgctcaaaatgatgggatacggcgtataa

SEQ ID NO: 87763 - DNA, 2391 bp, Enterobacter aerogenes
atgtcacagacttcttttaaccaggctcagtttcaggctgcactgacgcgtcagtggcagcgtttcggtttatcgtcagccgcagagatgacccaacgccagtggtggcgcgcggtcagcggcgcgctggcggagcttttggcggcgcaaccggcggcggaagccgttaaaggacagcgccacgttaactacatttcgatggagttcctgatcggtcgcctgaccggtaataacctgctcaacctgggctggtatgaaggagtgagcgagacgctgaaggcgtacgacatccagttgaccgacctgctggaagaagagaccgatccggcgctgggcaacggcggcctgggccgtctggcggcctgcttcctggattctatggccaccgtcggccagtcggcgaccggttacggcctgaactaccagtacggtctgttccgtcaatccttcgctgacggtcagcagatggaagcgccggatgactggggacgcggcagctatccgtggttccgccacaacgaagcgctggatgtgcaggtgggcatcggcggtaaagtcagcaaaagcggcgaatggcaaccggctttcgtgattaccggcgaagcctgggatctgccggtgcttggctatcgcaataacgtcgcgcagccgctgcgtctgtggcaggcgaagcatgcccatccgttcaacctgaccaaattcaacgacggcgatttcctgcgcgcggagcaacagggtatcgacgccgaaaaattgaccaaggtgctgtatccgaatgacaaccacctggcggggaaaaaactgcgcctgatgcagcagtacttccagtgtgcctgctcggtggccgatattctgcgtcgtcaccatctggctggccgcaagctgcatgagctggcggattatgaagtgatccagttgaacgacacccacccgaccatcgctatcccggaactgctgcgcgtgctgcttgatgagcaccagatgagctgggacgatgcgtgggccatcaccagcaaaaccttcgcttacaccaaccatactctgatgccggaagcgctggagtgctgggatgagaagctggtcaaggcgctgctgccgcgccacatgcagataatcaaagagattaacgacagatttaaactgctggtggagaaaacctggccgggcgataagcaggtgtgggcgaagctggcggtggtccatgataaacaggttcgcatggccaacatgtgcgtggtgagcggctttgcggtgaacggcgtcgcggcgctgcactccgatttggtggtgaaggatctgttcccggaatatcaccagctgtggccgaacaaattccataacgtgaccaacggcattacgccgcgtcgctggattaaacagtgtaatccggcgctggctgccctgcttgataagacgctgaagaaagagtgggccaacgatctcgaccagttgatcaagctggagaagtacgccgacgatgccaaattccgtcaggtttatcgtgacattaagcaggcgaataaagtgcgtctcgctgagttcgtgaagcggcgtaccggtatcgatatcaacccgcaggcgatttttgatatccagattaagcgcctgcacgaatacaaacgccagcacctcaacctgctgaatattctggcgcagtataaagagatccgcgaaaacccgcaggccgaccgcgtaccgcgcgtcttcctgtttggcgctaaagccgcgccgggctactacctggcgaagaatattattctggcgatcaacaaggtggccgaggcgatcaataacgatccgctggtgggcgataagctgaaagtggtcttcctgccggattactgcgtatcggcggcggaaatgctgatcccggcggcggacgtctccgagcagatttccacggcgggtaaagaggcctctggtaccggcaacatgaagctggcgctgaacggcgcactgaccgtcggcactcttgacggcgccaacgttgaaatcgccgagcaggttggcgaggacaatatctttatcttcggccataccgtggaagaagttaaggcgctgaaggcgaaaggctacgatccgctgaaatggcgcaagaaagataagctgctggacgcggtgctgaaagagctggaaagcggtaaatatagcggcggcgacaaacacgcctttgatcagatgctgcatagcctgctgcaaggcggcgatccgtacctggtgctggctgactttagcgcttacgtcgcggcgcagaagcaggtagacgaactgtatcgcgaccaggaagcctggacccgtgcggcgatcctcaacaccgcgcgctgcggcatgttcagctccgaccgctctattcgtgattatcagcaacgtatctggcaggcaaaacgctaa

SEQ ID NO: 87764 - DNA, 2076 bp, Enterobacter aerogenes
atggagaataaacgccttgataatgccgcgctggcggcggggatcagccccagctatatcaacgcgcacggccagccgcagtcgatcgcggcggccaccaaacaacgtttgctggatgctatgcatcgtacttctactgccgcgaaagcggcagtagaaccgctgcccagcgtcaaggtttttacccacggtaaaaaaatgcagttgccggtagcgggaagcggcgcgtttcactggctgctgacgaccgaagaaggtaagcagtatcagggtgagacgcgcggcggcgaagcgctcaccctgcctgggcgattgccgacgggctatcacaccctgaccctcacgcgggacggcgaacgctggcactgccgggcgatcgtcgccccggcgcgctgctacgaaccgcaggcgctcaaagagggcaaaaagctatggggcgcctgcgtccagctctacaccctgcgttctgagaacaactggggcattggcgacttcggcgatctacgcgccatgctgccggaaatcgcccgtcgcggcggcgcgtttatcggcctcaacccgattcacgcgctctatccggcgaacccggagagcgccagtccgtacagtccgtcctcgcgccgctggcttaacgtcatctatatcgacgttaacgcggtggaggatttccagcgtagccctgccgcgcaggcatggtggcagcttgcggaaacccagcaggccttgcaggccgcgcggcagaccgctgatgtcgactataccgctgtcaccgcgctgaagctgaccgcgctgcgtctggcgtgggccgagttttctacgcgtgaagatgagcaaatggcggagttccgtcagttcgtgctgcgcgagggtgaaagtctctactggcaggcggcgtttgatgcgctgcatgcctggcaaagccgtcaggatccgatgcgctggggctggccggcatggccggaagcgtatcagagcacgagcagcccgcaggtgaaaaccttctgtgcggagcatgccgatgaggtgagcttttatctatggctgcagtggctggcatatacgcagttcgccgcctgttggcacaccagccagcaggacgggatgccgattggcctgtatcgcgatctggcggtcggcgtcgccgaaggcggatcggagacgtggtgcgatcgcgagctgtattgcctcaaggcttccgtcggcgcgccgccggacatcctcggcccgctgggacagaactggggcctgccgccgatggatccgcatgtaatggttgcccgcgcctacgagccgtttatcgaactgctacgggcgaatatgcaaaactgcggcgcattgcgtattgaccacgtgatgtcggtgctgcgtttgtggtggataccgtatggcgaaaccgccgaccatggcgcctatgtgcagtatcccgtggatgacctgctggcgatcctggcgctggagagccagcggcaccgctgcatggtcattggcgaagacctcggtaccgtaccggttgaaatcgtcggcaagctgcgcaaaagcggtgtttactcgtataaagtgctctatttcgaaaatggccctgataaaacgttccgcgcgccgaaggcttatccacagcagtcgatggcggtcgcaacgacccacgatctccctacgctgcgcggctattgggagagcggtgatttgacgctcgggaagacgctgggtctgtatccggatgaagtggtgctgcgcggcttatatgccgatcgcgaacaagcaaagcaggggttgctggatgcgctccatcggcacggctgtttgccgaagcgcgccggacataaagcctcgctgatggcgatgacctcaacgctcaatcgcgggatgcagcgctacattgccgacagcaacagcgccctgcttgggctgcagccggaagattggctggagatggcttcgccggtcaacatcccgggtaccagtaccgagtatcccaactggcggcgtaagcttagcgtgacgctcgagcagatgtttgccgatgcgcaggtgaataagctgattaaagacctggataagcgccgcaaggcccgttaa

SEQ ID NO: 87765 - DNA, 1317 bp, Enterobacter aerogenes
atgccattagtcatcgtagctatcggggttgccctgttattgttgctgatgatccgtttcaaaatgaacggcttcatcgctctggttctggtggcgctcgccgtcggattaatgcagggtatgcctctggataaagtcatcgtatccatcaaaaacggcgtcgggggcacgctcggcagcctcgcactgatcatgggcttcggcgctatgctcggtaaaatgctggcggactgcggcggcgcgcagcgtatcgccactaccctgattgataaattcggtaaaaaacatattcaatgggccgttgtactgaccggtttcaccgtcggtttcgccctgttctatgaagtcggtttcgtgctgatgctgccgctggtctttaccatcgccgcttccgcgcgtatcccgctgctgtacgttggcgtaccgatggccgcggcgctctccgtcacccacggtttcctgccgccacacccgggcccgaccgctatcgcgacaattttccacgccgatatgggcaaaacgctgctctacgggacaattctggctatcccgacggttattctcgccggcccggttttcgcccgtttcctgaaaggtattgataagccgatcccggaaggcctgcacaacccgaaaaccttcactgaagaagagatgccgggctttggcgtcagcgtctggacctctctggtaccggtgatcctgatggcgatgcgcgccgtcgccgagatggttctgccgaagggccacgccttcctgcccgttgccgagttcttcggcgacccggtgatggcgaccctgattgcggtgctgatcgcgctgttcactttcggcctcaatcgcggccgttccatggagcagatcaacgatacgctgacctcctctatcaaaatcatcgccatgatgctgttgatcatcggcggcggtggcgccttcaagcaggtgctggtggatagcggcatggataagtacatcgcttctatcatgcacgaatccaatatgtcaccgctgtttatggcgtggtctatcgctgcggtgctgcgtattgcgctgggctcagctaccgttgccgctatcactgcaggtggtatcgccgcgccgctgattgccaccaccggcgttagcccggagctgatggttatcgccgtgggttccggtagcgttatcttctcgcacgtgaacgacccaggtttctggctgttcaaagagtatttcaacctgaccattggcgagaccatcaagtcctggtcggtactggaaaccattatttccgtgtgcggcctggttggttgtctgctgctggggatggtggtgtaa

SEQ ID NO: 87766 - DNA, 576 bp, Enterobacter aerogenes
atgatccgtatttccgatgctgcacaagcgcactttgccaaactgctggcaaatcaggaagaagggacgcaaattcgcgtatttgtgattaatcccggcaccccaaacgctgagtgcggcgtatcctattgcccaccggatgcggtggaagacaccgacacggcgctgaaatttgaacagctgaccgcgtatgttgatgaactcagcgcaccttatctggaagatgctgaaatcgacttcgtcactgaccagctcggttcccagctgacgctgaaagcgccgaacgccaaaatgcgtaaggtttccgacgatgccccgctgatggagcgcgtggagtacctgctgcagtcgcagatcaacccacagctggccggtcacggcggtcgcgtttcgctgatggaaatcaccgaagacggtctggctatcctgcagttcggcggcggttgcaacggctgctcaatggtcgatgtgaccctgaaagaagggatcgaaaagcagctgctgaacgaattcccggagctgaaaggcgtgcgcgatctgaccgaacaccagcgcggcgagcactcctactactaa

SEQ ID NO: 87767 - DNA, 675 bp, Enterobacter aerogenes
atgctaacagcacacagcttatgctggctatgccaaatgccgctggccatggctcactgggggatgtgctcgcgctgcaccgcctcgctgctcgtcacgccatcgctctgcccgcagtgcggtttaccggcattggcgcccgccttgccctgtggacgctgcctgcaaaaaccaccgccctggcagcggctggtgacggtgaatagctatgccccaccgctaagcgggctggtacaccagtttaagtttgcccgtcatccggaactcgcggcggcgctggcgcgactgcttcttttacgcctgcgccttaattgcgggctgccgccagtggatcggattgtcagcgtgccgctgtggcagcgccgtcattggcgtcggggatttaaccaaagcgaggcgctatgtcgcccgctggcgcgctggatgggctgcgcctggcgcggcgatgcgctgacgcgaagccggcgtaccgcaacgcagcatcagttaagcgccagattacgtaagcagaacctgaaaaatgctttccaggttgaattatccgttcggggcctccatatcgccattgtggatgatgtcgtcacaaccggaagcaccgtcgccgagatttcccgcctgcttttgcgaaacggcgccgcgacggttcaggtatggtgtttgtgccgtaccttgtag

SEQ ID NO: 87768 - DNA, 783 bp, Enterobacter aerogenes
atgaatgacatctggtggcaaaccacgggcgaaggaaattgtcatcttgtgctgctgcacggctgggggctgaatgccaacgtatgggattgcatcacgccggaactggctacgcattttacccttcacctggtggatttaccgggctatggccgcagcggtggttttggcgccttaaagcttgaagagatggcgcagcaggtcgttgaaaaagcgccggagcaggctatctggcttggctggagcctgggcgggctggtagcgagcctggtggcgctgcagcacccgcaacgcgtgcaggcgctggtgaccgtcgcttcttcgccgtgttttggcgcgcgcgaccagtggccggggattaaaccggaagtgctgagcggcttccagcaacagctgagtgaagatttccagcgtaccgtcgagcgttttcttgccctacaaaccatgggcaccgaaagcgcgcgccaggacgcccgggcgctgaaaagcaccgttctgtcgctgccgatgccgcctgccgaggttctcaacggcgggctggaaatcctcaaaaccgccgatttgcgtcaaccgctcgccgcgctgaccatgccgtttttgcgcctctatggccgactggatgggctggtgccgcgtaaaatcgttcctctgttggatgagctgtggccgcaaagtgagtctgttgtcttcgaaaaggcggcccacgcgccgtttatttcacatccccagccattctgtgagcctctcatcgcgctgaaaaaccggctgaataattatttttag

SEQ ID NO: 87769 - DNA, 270 bp, Enterobacter aerogenes
atgaaacttgttacaggtattgttgcatctctggtgataggctccctctcttttggcgcgttcgcggcgaaagagattcaaaaagatgaagtcgcgaagatgaatctgaccaaggtcggtagcatcacgacttcccgtaccacgtcgccgatggacgcgaagcgcgatctgtcgaagaaagcggatgagttgggtggtaagtacttcgtagtgattgctggcgagaagaacgagaagacggttcacgcgaacgccgacgtgtataagtaa

SEQ ID NO: 87770 - DNA, 237 bp, Enterobacter aerogenes
atggcatcgttaattgacgttcgcgatatgctggccctgcaggggcgcatggaagccgcacagctgagcgcccgcctgcatacgccacggccgctgatcgacgccatgttaagccgcctggaagcaatgggaaaagcggtcaagatgatcgaagatgccgatggctgcctttccggcagctgtaaaagctgcccggaagggaaagcctgcctgcgggagtggtggtctttgcgctga

SEQ ID NO: 87771 - DNA, 2319 bp, Enterobacter aerogenes
atgaaaaaattaaccgttggtttaattggtaatcctaattccggcaaaacaacgttatttaatcagctaaccggcgcgcgccagcgggtgggtaactgggcgggggtcaccgttgagcgtaaagaaggcgccttcaccaccaccgaccaccaggttactctggttgacctgccgggcacctattcgctgaccaccatctcctcgcaaacatcgctcgatgaacaaattgcctgtcactatattctcagcggcgatgccgacctgctgattaacgtcatcgacgcctcgaacctggaacgtaacctctatctgactctgcagctgctggagttgggtattccctgcgtcgtcgcgctaaacatgctcgatattgccgaaaaacagcaaatccgcatcgacgtcgacgcgctggcggcccgtctcggctgcccggtgattccgctggtctccacccgcggccgcggtattgaagcgctgaaaatggcgcttgaccgccatgagcaaaatcagccgctggaactggtgcactatccgcaatccctgcagcgcgaagccgatatgctggcgcaggcgatgcctgctgatatgccgctgcgtcagcgccgctggcttgggctgcagatgctggaaggcgatatttacagccgcgcctttgccggcaacgccgccgacaaactggatctggcgctggccaacctgagcggcgagatggacgatccggcgctctatatcgccgatgcccgctatcaaagtatcgccgcggtatgcgatgccgtcagtaacaccctgaccgctgagccgagccggttcaccacggcgatggataaaattatccttaaccgcttcctcggcttaccgatcttcctgttcgtgatgtacctgatgttcctgctggctatcaacatcggcggcgccctgcagccgattttcgacgccggctcggtggctatcttcattcatggcatccagtggctgggctacaccctgcacttcccggactggctgaccgtgttcctcgcgcaagggctgggcggcggtatcaacaccgtgctgccgctggtgccgcaaatcggcatgatgtacctgttcctctctttccttgaggactccgggtatatggcgcgcgcggccttcgtaatggaccgcctgatgcaggcgttaggcctgccggggaaatccttcgtgccgctgatcgtcggtttcggctgtaacgtgccttccgttatgggcgcccgtacgctggatgcgccgcgtgaacgcctgatgaccatcatgatggcgccatttatgtcctgcggcgcccgattggcgattttcgcggtcttcgccgccgccttcttcggccagaacggcgcgctggcggtcttctcactgtacgtactgggcatcgtgatggcgatcctcaccggcctgatgctcaaatacaccattatgcgcggcgaagcctcgccgttcgtgatggagctgccggtgtatcacgtaccgcacatcaagagcctggttatccagacctggcagcgcctgaaaggcttcgtcctgcgcgccggtaaggtcattgtgattgtcagtattttcctcagcgcgctgaacagcttctcgctcagcggcaaagtggtcgataacatcaacgactcggcgctggcttcggttagccgagtgattaccccggtgtttaagccgattggcgtgcatgaagataactggcaggcaaccgtcggcctgtttaccggcgcgatggcgaaagaagtggtggtcggtacgttgaacaccctctacaccgcggaagatatccagaatgaagagtttaacccacaggagtttagccttggcgacgagctgttagccgccgtcgatgaaacctggcaggggctgaaagacacctttagcctgagcgtgctggcgaacccgattgaagcaagcaaaggcgatggcgaaatggaaaccggcgccatgggggtgatgggcagtaaattcggcagcgccgccgccgcgtacagctacctgatcttcgtcctgctctatattccatgcatttccgtgatgggagcgattgcccgtgagtccagccgcggttggatgatgttctcggtgttgtggggattgaatatcgcctactcgctgtcgacgctgtactaccagaccgtgagctttagccaacacccgcgctacagcctggtatgcattctggcggtaattctgtttaacgtcgtggtctttggcctgttgcgtcgggcgcgtagccgggtggatgtttccctgctgacgacgcgtaaaaccccgacgtcctgctgccagagtccggccggcgactgccactaa

SEQ ID NO: 87772 - DNA, 228 bp, Enterobacter aerogenes
atgcaattcactcctgatagtgcgtggaaaatcaccggtttttcccgcgatattagcccggcttatcggcagaaactgctctccctgggaatgttgcccggttcttcgtttcatgtcgtgcgcgtggcgccgctgggcgatcctattcatattgagacccggcgcgtgagcctggtattacgtaaaaaagacctcgcgttaattgaactggaagcggttgcgcaataa

SEQ ID NO: 87773 - DNA, 2331 bp, Enterobacter aerogenes
atgatgaatgattcgctctgccgcattattgcgggtgaacttcaggccagagccgaacaggtagaagctgccgttcgcctgcttgatgaagggaacaccgtgccgtttattgcacgttatcgtaaggaagtcaccggcggtctggatgacacgcagctacgtaatctggaaactcgcctcgggtatctgcgcgaactggaagatcgccgccaggcgatcctcaaatcgatcggcgaacagggcaagctcagcgaagcgctggaaaaagccatcaacgccaccctcagcaaaactgagctcgaagatctctacctgccgtataaacccaaacgccgcacccgcgggcaaatcgccattgaagccggtctcgaaccgctggccgatctgctgtggaatgagccttcccacgatccggaaaccgaagcggcaaactatatcgatgccgataaaggcgtggcggatagcaaagccgctctcgacggcgcgcgctatatcctgatggaacgcttcgcggaagacgccgccctgctggcgaaagtacgtgattatctgtggaaaaacgcccatctggtggccagcgtcgtcagcggcaaggaagaagaaggcgctaaattccgcgattacttcgaccaccatgaaccgatcgcttccgtgccgtcgcaccgcgcgctggcgatgttccgcgggcgcaatgagggcgtgctgcagctgtcgctcaacgccgacccgcagtttgacgagccgccgaaagagagccactgcgagcagatcattatcgatcatctcggcctgcgcctgaataacgccccggcggacagctggcgcaaaggcgttgtcagctggacctggcgcatcaaggtgctgatgcacctcgaaaccgaattaatgggcaccgtgcgcgaacgcgcggaagacgaagcgattaacgtattcgcccgtaatctccatgacctgctgatggccgcgcctgccggcctgcgcgccaccatgggtcttgacccgggcctgcgtaccggcgtcaaagtggcggtagtcgacggcaccggcaaactggtggccaccgataccatctacccgcataccggccaggcggctaaagccgccgtcgtggtggcggcgctgtgcgaaaaacataacgttgagctggtggctatcggcaacggtaccgcttcccgcgagaccgagcgtttcttcctcgacgtgcaaaaacagttcccgaaagtgaccgcccagaaggtgatcgtcagcgaagccggcgcgtcggtctactcggcttccgaactggcggcgcaagagttcccggacctcgatgtttccctacgcggcgcggtctctatcgcccgccgtctgcaggatccgctggccgagctggtgaaaatcgatccgaaatcaatcggcgtcggccagtatcagcatgacgttagccagacgcaactggcgcgtaagctggatgcggtggtggaagactgcgtaaacgccgttggcgtcgaccttaacaccgcctcggtggcgctgttgacccgcgtcgcgggcctgacccgtatgatggcgcagaatatcgtcgcctggcgcgacgagaacggccagttccacaaccgccagcagttgctgaaggtaagccgtctggggccaaaagcctttgaacagtgcgccggcttcctgcgcattaaccacggcgacaacccgctggacgcctcgaccgttcacccggaagcctacccggtggtcgagcgtattctggccgctacccagcaggcgctgaaagatctgatgggcaacagtagcgaactgcgcaacctgaaagcctctgattttaccgatgataagttcggggtgccgacggtatccgatatcatcaaagagctggaaaaaccgggccgcgatccgcgccctgagtttaaaaccgcccagttcgccgacggcgttgagacgatgaacgacctgctgccggggatgattctggaaggtgcggtcaccaacgtcaccaactttggcgccttcgtcgatatcggcgtgcaccaggatggcctggtccacatctcttcgctgtcgaataagttcgttgaagacccgcataccgtggtcaaagcgggcgatatcgtcaaagtgaaggtgatggaagtggacctgccgcgtaaacgcatcgcgttaacgatgcgcctcgatgaacaaccgggcgacagcaacacgcgccgcggcggcggcaacgatcgcccgcagggtaaccgcccggcggcaaaagcggcgaagccgcgcggtcgcgatgctcagccagccggcaacagcgcgatgatggatgcgctggccgccgcgatgggcaaaaaacgctaa

SEQ ID NO: 87774 - DNA, 474 bp, Enterobacter aerogenes
atgaaaacgccgctgatcacccgtgaagggtatgaaaaactgaagcaagagatggattacttgtggcgtacagagcgcccggaagtcaccaagaaagtgacctgggcggcgagtcttggcgaccgcagtgaaaacgccgattatcagtacaataaaaagcgcctgcgcgaaattgaccgccgggtgcgttatctcaccaagtgtctggaaaatctcaaaatcgtcgattattccccgcagcaggaaggcaaagtgttcttcggcgcgtgggtggagatcgagaacgacgatggcgataccaagcgctttcgcattgtcggctacgatgaaatcttcggccgcaaagactatatctccatcgattcgccaatggcgcgcgctttactgaagaaagaggtgggcgacctggctatcgttaatactccggcgggcgaagccagctggtacgtcaatgaaattgaatacgtgaaatag

SEQ ID NO: 87775 - DNA, 759 bp, Enterobacter aerogenes
atgccgattaccagactggaaaacccaaggatttacagacagatagcagaccaactcaagcgattaattgagaacaacgaatttccgcccggcagtcgtcttccgtctgagcgagatttagcccagcaattgaacgtcagccgcgcatcggtacgcgaagcgctgattgcgttggaggtgattggcctggtggacgtgcgcgtcggcaacggggtaatcgtcaaatcgcaaacgccgctcgtcgccaccaaagagccggtgatggcgcaggccggtcgcgaccagtggacggagatcgacgacgaactcaacatagacctcgattttaacgccgaactaccgcccttttctctgctgcaggcgcgcctgttaatcgaaccggaaaccgccgcgctggcggcgcgtcatgccagccccgaagagctggccgctatccgcgaggcctttgagcaaaactgtcgcgataaccgcgccggttcgaccacccatcccggcgaccgcctgttccatatccgtatcgctcaggccagcggcaacccggcgtacgcgtttatcatcggccacctgctcggccaccgctacggcagtatgttccgcatgctgcagcgccactatacgccggacgatatgccgcatcgctcggaacaggagcatcgcgcgatccttgaagccattgaggcccacgacgtccgtgcggcaaagaaagcaatgaaaaatcatattgatcaggtgattaccatttttacccgcagccagtag

SEQ ID NO: 87776 - DNA, 741 bp, Enterobacter aerogenes
atggaactaaccggaaaacgcgttctgattaccgccgcagggcaggggattggcaacagctgcgcgcggctgtttgccgccgccggcgcggaagtgattgccagcgatatcaacattgccggattgagcgatatccccggcgtacagccgctgcagctggatgtcacccgcgcggatgcgattgccgccgccgcggaaacgctgggcccgctggatgtgttgttcaactgcgccggggtggtgcatagcggcagcattcttgaatgtagcgagcgggagtggcagttcgccctcgatctgaacgtcaccgccatgttccacacgattcgcgcctttttgccggcgatgatcgcccgcggcggcggctcgattatcaacatgtcatcggtagcttccagcgtgaaaggagtaccaaaccgcttcgcctacagcgccagtaaagcggcggtcattggcctgacccgctcggtagcggcggatttcgtcacccagggcattcgttgtaatgcgatttgtccgggcaccgtcgattcaccttccctacgcggacgtattgccgagcaggcgtgcgagcaggggctgagcgaagaggcggtttatgaggcgtttgtcgcccgccagcccattggccgcatcggcaagccggaagagatcgcccaactggcgctgtacctggcttccgacgccagcgcctacaccaccggcacggtgcagattattgacggcggttggagcaactaa

SEQ ID NO: 87777 - DNA, 852 bp, Enterobacter aerogenes
atgaaattacttcgttttggcaatcccggcagcgagcgtccgggcgtactcgataacgacggccgcctgcgcgacctgtcgcaatatattagcgacctgcgcggcgacgcgctgctgccggagagtctggcgcgtctgcgccagctggatctctacagcctgccgctggttgaaggcaatccgcgtattggcgcctgcgttggcggtatcggtaagtttatctgcatcggcctgaactatgccgatcacgccgcggagaccggcgccgatattccgcaggagccggtggtattcagcaagtggaccagcgcggtggttggcccaaacgacaacgtgattatcccgcgcggttcgcaaaagaccgactgggaagtcgaattaggggtagtgattggcaaaggcgggcgctatatcgacgagcgcgacgccatgcagcacgttgctggctactgcgtgattaatgacgtctccgaacgtgagtatcaaattgagcgcggcggcacctgggataagggcaaaggctgcgacacgttcgggccgacgggcccctggctggtcaccgccgatgaaatccccgatcccaacgcgcttaacctgtggctggaggtcgacggcaagcgctatcaggacggcaacacccgcaccatgattttcaaagtgccctatatcatcagctacctgagccgctttatgagcctgcagccgggcgatgtcatctccaccggtacgccgccgggggtgggtatgggccagaaaccgcagccggtttatttacgcgccggccagactattcgtttgggcattgaagggttgggcgaacagcagcagctgaccgtggaggacaaacaatga

SEQ ID NO: 87778 - DNA, 1296 bp, Enterobacter aerogenes
atgacgcaaattaccgccctgcgggtagaggatattcgcttccccacttcgcagcagttggacggctccgatgcgatgaatcccgacccggattactccgccgcctacgtgatcctcgaaaccgacaatcctaagctcaccggtcacgggttgaccttcaccattggccgcggcaacgaaatttgctgcgcggcgattcaggcgctggagcatttaatcgtcggcgagcaactcgagacgatcgccgcagatatgggcgccttctggcggcgctttaccagcgatagccagctgcgctggattggcccggacaaaggggcgattcacctggcgaccggcgcggtggtcaatgcggtgtgggatctgtgggcgaaggccgaaggcaaaccggtctggcgactggtcgccgatatgagcccggctgagctggtgcgctgtatcgattttcgctacatcaccgactgcattaccccggaggaggcgctgcgcctgctggaaagccgtgaggagggcaaagcccagcgtctcgaacagctacaggcgcagggttatccgtgctacaccacctcagcgggctggctgggatacggtgatgaaaaactgcgtcgcctttgtcagcaggcggtggacgccggtttctcgcatatcaagctgaaggtcgggcgcgatattgaagatgatatccgccgcgtgcgcattgcccgggaagtgattggccccgagcggaaattgatgattgacgccaaccaggtatgggaagtggacgccgccattccatgggtcaaagcgttggccttcgccaacccgtggtttatcgaagagccgaccagcccggatgatatcgaaggccaccgcaagatccgcgaaaacatcggcgcggtgaaggtcgccaccggcgagatgtgccagaaccggattatgttcaaacagttcattatgcgcggcgcgattgacgtggtgcagatcgatgcctgccggttaggcggcgtcaacgaagtgctggcggtgatgctgatggcggcgaagtacaacctgccggtttgcccgcacgccggcggcgtcggactgtgcgaatacgtccagcacctgtcgatgattgactacctgtgcatcgccggtacccatgaagggcgggtgattgagtttgtcgaccatctgcacgagcacttcctgcacccttgcgaaatccgcggcgcagcttatatgccgccgcaggcgccgggctactcgattgaaatgcatcaggcttctatcgagcagtaccgctaccgtggagaagcgcatgttgcgcattga

SEQ ID NO: 87779 - DNA, 852 bp, Enterobacter aerogenes
atgttgcgcattgacgcccaccaccactactggcgctatcagccacaggattacccgtggattgatgacgacatgccgcaactgcgccgggatttttaccctccgcagctccagccgctgctggcgcagcaccggctcgatggcgcggtggtggtgcaggcgcgtcatgatgaaaacgaaaccgcctggctggtggcgcaggtttctcaggcggttggcgtatgcggcgtagtgggctggctggatattaccgccgcggatctcgaggacaagctgacgcagtggcgcgaccagctgtgcgggttgcgccatcaggtgcaggatgaagccgatccggcagcgtggcttgagcgcgaggcggtctcgcgaggaatgcagcagttgcagcgccagggctatagctgggatctgttggttacccatcgtcatctcgcggcggcggcacgctttgccgcccgccacgatgatcactggctggtactcgaccatttcggcaagccggatatcgcgcgcggcgcggcccattgggccgaacaggcgcggccgctggcggcgctaccgcacgtggcgcttaagctttctggtctggtgaccgaggccgcgggcggatgctggaccgagcagcaactgctgcctttcttcgacgccgcgctggggctgtttggcccgcagcggctgatgtttggttccgactggccggtatgcctgctggcggcggagtaccgccaggtttaccagctgtgcgaaacggcgctggccccgctgacggaaacgcagcggtcagctatctggggcggcactgcctgtcgggtttatggtttaacggaggcgaagcgtggatctatttcttaa

SEQ ID NO: 87780 - DNA, 777 bp, Enterobacter aerogenes
gtggatctatttcttaaagacaaagtggttatcgtcaccggcggcggctcggggatcggcgcggcggtaacgcaactgctggcggaagagggggcggtgccggtcatcgtcactaacgcccagccagagcaggggtttatggataggctgaagcaaatcgcgccgcaaagtgagctgattatcgccgacctgtgccaggaggctgaatgcgccagggcggtgagccaggtgctggcgcgctttggccgcattgatgcgctggtgaataacgctggagtgaacgatggcgtagggctcgaggccgggcgtgaggcgtttctcggatcgcttgaaaaaaacctgatccactactatcagatggcccacctatgccgcgaagcgttagaggcggcgcggggggctatcgtcaatatcgcctcgaaaaccgcgctcagcggccagggcggcaccagcggctataccgcggcgaaaggggcggtgctggcattaacccgtgaatgggcggtatcgctgcgcgagagcggcgtgcgggtcaacgcggtggtgccggcagaagtgctgacgccgcagtaccagcgctggataaataccttccctgacccgcagcggcagatggcggcgattaaccaacgcatcccgttgggcaaacgcatgaccacgccggaagagatcgccaataccgtggtgtttcttatctcctcgcgtgcgtcgcacactaccgggcagtggttatcggtggatggcgggtatttgcatctcgacagggcgctgtcatga

SEQ ID NO: 87781 - DNA, 357 bp, Enterobacter aerogenes
atgagcgttaccgccgcgcggcggcgactgtgtcaggcgttggatttggtcgattcggcagagaaaattgccgaataccagcgtctgcatgaacgtatctggccggaagtcgccgggcatctgcgcgcccatggcgtgctggatatggagatttaccggcttggcacgcggctgtttatggtgatggaggtcgccggggatttcgatggcgaacgctttgctcagcacagcctgaaccacccggtcattcagcgctgggaagcgctgatgtggcaataccaggttcccaccccctggacgccggcaggcgaaaaatgggtgtcgatggagcgcatattctctttgcaggatcaataa

SEQ ID NO: 87782 - DNA, 1224 bp, Enterobacter aerogenes
atgctagtgaataaaacggcggagccgctggcggcccgcgccggggcgacccctaatctgcgctgggcatttatgctggtcaccagcctgttctttatgtgggggctctcttacggcctgctcgatgttctcaataaacattttcaggagaccctgcacgtcaccaaagcgcagtccggtttactgcaggcggcctattttggcgcctacttcctggtagcgctgcccgccggctactttatggataaacgcggttataaagcggggatcctggtcggcttgtgcctgtatgcgcttggcgcgctgctgtttgtgccggcggcgagcgtgaatagctttgcgctgttcctgttcgcgctgtttgtgattgcctgtggattaggttgtcttgagaccgcggcgaacccttatgcgacggtacttggcgatagtaaaggcgctgagcggcggttgaatctggcgcagtcgtttaacggactggggcaatttattggcccgctgatcggcggcacgctgttcttttcagctactcagggcgataccggcgatcagagctcggtaaaaatcacctatgtcgctatcgccgtgctggtgctgaccatcgcgctgctgttccgccgcacgccgatgccggatattcgcgaagaggagggcagtcagcaagaagcggcgcaggggctgtggcagcatcgccactttaccggcggggttatcgcccagttcttttatgttgccgcgcaggtcggcgtgggtgcgttctttatcaactatgcgaccgagcactggcatggcgtgacaaaccagcacgcttcctatctgctgtcgattgcgatgattagctttatggtcggtcgtttcttcagtacctggctgatggggcgggtgcaggcggcgacgctgctgatggtgtattcgttggtcaatatcgtgctctgcggtctggtgatgatgagtatcgacggcgtgtcggtggtggcgctgattgcggtcttcttttttatgtcgattatgttcccgaccattttcgcgctgggcgttaaaaatatgggcagccataccaaacgcgccagctcgtttatgattatggccatcgtcggcggggcgattatgccttactttatgggggcgctggccgaccgctacagcaccgcgctggcctatgggttgccgctgctatgcttcctggtggtgctgtggtacggcatgagccaacgacgcgcgtaa

SEQ ID NO: 87783 - DNA, 720 bp, Enterobacter aerogenes
atgcaagagaattataagattctggttgtggatgacgacatgcgcctgcgcgcgctgctggaacgttatctgaccgagcagggcttccaggttcgtagcgtggcgaacgctgaacagatggatcgcctgctgacccgtgaatccttccacctgatggtgctggatctgatgctgccgggcgaagatggtttatctatctgccgccgtctgcgtagtcagagcaacccgatgccgatcattatggtgacggcgaaaggggaagaagtggaccgtatcgtgggcctggaaatcggcgccgatgattacattcctaaaccgtttaacccgcgcgaactgctggcccgtatccgcgccgtgctgcgccgccaggcgaacgagctgccgggcgcgccatcgcaagaagaagcggtgattgcttttggcaagttcaaactgaacctcggcacccgcgagatgttccgtgaagatgagccgatgccgctcaccagcggtgagttcgcggtattaaaagcgctggttagccatccgcgcgagccgctgtcccgcgataagctgatgaaccttgcccgcggccgcgaatactcggcgatggagcgctccatcgacgtacaaatctcccgcctgcgccgcatggtggaagaagatccggcgcacccgcgctacatccagaccgtttggggactgggctacgtcttcgtaccggacggttctaaggcatga

SEQ ID NO: 87784 - DNA, 1362 bp, Enterobacter aerogenes
atgaagcgcgtgcgtttttcgccgcgaagctcatttgcccgcaccctgttactgatcgtcaccctgctgttcgtcagcctggtgacgacctatctggtggtgctgaatttcgcgatcctgccgagcctgcagcagtttaacaaggtgttggcatacgaagtccgtatgctgatgaccgataaactgcagctggaagacggcactcaactggtggtaccgccggcgtttcgccgcgaaatttaccgcgagctggggatttcgctctattccaatgaggcggcggaagacgcaggcctgcgctgggcgcagcattatgaattcttaagccagcagatggcgcaccagcttggcgggccgaccgaagtgcgggttgaggtcaacaaaagctcgccggtggtgtggctgaagacctggctgtcgccgaatatctgggtgcgggtaccgctgactgaaatccatcagggcgatttctcgccgttgttccgctatacgctggcgataatgctgctggccattggcggcgcgtggctatttatccgtatccagaaccggccgctggtcgaccttgaacacgccgcgctgcaggtcgggcgcgggattattccgccgccgctgcgcgaatacggcgcgtcggaagtgcgttcggtgacccgcgccttcaaccatatggccgccggggtcaaacagctggcggatgaccgtacgctgctgatggccggggtcagccacgatttgcgcacgccgctgacgcggatccggctggcgacggagatgatgggcgagcaggacggctatctcgccgagtcgatcaataaagatatcgaagagtgcaacgccatcatcgagcagtttattgattacctgcgcaccggccaggagatgccgatggagcttgcggatctcaacgccgtgttaggcgaagtgatcgccgccgaaagcggctacgagcgggaaatcgccaccgatctgcaggccggagaaattccgctgcgcctgcatccgctgtcgatcaaacgcgcgttagccaatatggtggtgaacgccgctcgttacggtaagggctggattaaagtcagcagcggcagcgaagccagccgcgcctggttccaggtggaagatgacggcccggggattaaaccggaacagcgcgaacatctgttccagccgtttgtgcgcggcgatagcgcccgtagcaccagcggcaccgggctggggctggcgatagtgcagcgtattatcgacaatcataacggtcgcctggagattggcaccagcgaacgcggcggcctgctgatccgcgcctggctaccaattccggtgcatcgcgcgctgtcgccggcgaagcctgcgaaagagagttga

SEQ ID NO: 87785 - DNA, 1620 bp, Enterobacter aerogenes
atgcgcgttaatagtttaaccccgcaggatctcaaggcttacggtatcaatgacgtccaggaaattgtccacaacccgagcttcgatacgctgtatcaggaagagctcgacccgaaactggaaggttatgagcgtggcgtattaaccaatcttggtgccatcgccgtcgataccggcattttcaccggccgttcgccgaaagataaatatatcgtccgtgacgataccactcgcgataccgtgtggtggtctgataaaggcaatggcaagaacgacaacaagccgctctcccaggaaacctggcagcacctgaaaggcctggtgactcaccagctgtcgggcaaacgcctgtttatcgtcgacgccttttgcggcgccaacgccgacacccgcctcagcgtgcgcttcattactgaagtcgcctggcaggcacactttgttaagaacatgttcattcgcccgagcgaagaagaactggcagccttcgagccggactttatcgtcatgaacggcgcgaagtgcaccaacccgcagtggaaagagcagggtctgaactccgaaaacttcgtggctttcaacctgaccgagcgcatccagctcatcggcggcacctggtacggcggcgaaatgaagaaagggatgttctcgatcatgaactacctgctgccgctacagggcatcgcttcgatgcactgctccgctaacgtcggcgaaaaaggcgatgtcgccgtgttcttcggcctctccggcaccggtaaaaccaccctctccaccgacccgaaacgccgcctgattggcgatgacgagcacggatgggatgatgacggcgtatttaacttcgaaggcggctgctacgcgaagaccattaagctgtcggaagccaacgaaccggatatctatcacgcgatccgccgcgatgcgctgctggaaaacgtcgtggtacgggctgacggcaccatcgattttgatgacggttcgaagaccgagaacacccgcgtctcctacccgatcgaccatatcgaaaatatcgttaagccagtgtcgaaagccggtcacgccaccaaggttatcttcctgaccgccgacgcctttggcgtattgccgccggtttcacgcctgaccgctgaccagactcagtaccacttcctgtctggctttaccgccaagctggccggtaccgagcgcggcgtcaccgagccgaccccaaccttctccgcctgcttcggcgccgcgttcctgtcgctgcacccgacgcagtacgctgaagtgctggtgaaacgcatgcaggcttccggcgcccaggcttacctggtcaacaccggctggaacggtaccggtaaacgtatctcaattaaagatacccgcgcgattatcgacgccatcctcgacggttcgctggataacgccgaaaccttcaccctgccgatgttcaacctgcagatcccaaccgagctgccgggcgtcgatatccatatcctcgacccgcgtaatacctacggttctccggagcagtggcaggagaaagccgatcagctggcgaaactgtttattgagaacttcgagaagtataccgataccccggccggcgctgcgctggttgcggccggtccgaagcgttaa

SEQ ID NO: 87786 - DNA, 879 bp, Enterobacter aerogenes
atgactcaacacgatcaattacatcgttatctgtttgaaaactatgccgtgcgcggtgaactggtcaccgtatcggacacgttggaacagatcctggccaaccatagctacccgcagccggtgaaaaccgtgctgtcggagctgctggtcgccaccagcctgctgaccgccacgctgaagttcgccggcgatattaccgttcagctgcagggcgacggcccgctctcgctggcggtgatcaacggtaataaccagcagcagctgcgcggcgtcgctcgcgttcagggcgaaatcccggaaggcgcggacctgaaaacgctggtcggcaacggctacctggtcattaccatctctccacaggaaggcgagcgctatcagggcgttgttggcctggaaggcgataccctggcggcatgcctggaagattacttccagcgttccgaacagctgccgacccgactgttcattcgtaccggcgagcacgacggtaaagcggtggctggcggcatgctgttgcaggtgatgccggctcaggacgcgcagcttaacgacttcgagcatctggcgaccctgaccgagaccatcaaggcggaagagctgttcaccctgccggcgaccgatgtattatggcgcctgtaccatgaggaagaggtgacggtatacgacccgcaagacgtcgagttcaaatgcacctgttctcgccagcgctgcgccgatgcgctgaagacgctgccggatgaagaagtcgacagcatcctcgccgacgaaggcgaaattgatatgcattgcgactactgcggtaatcattatctgttcaacgcgatggatatcgccgagatccgcaataacgcctcgccggcggatccgcaggtacactaa

SEQ ID NO: 87787 - DNA, 402 bp, Enterobacter aerogenes
atgaaagataagcccgcagaaagcgtcaggctggacaaatggctttgggcagcccgcttttataaaacccgcgccatcgcgcgcgagatggttgaaggcggcaaagtgcactacaacggacaacgtagtaagccgagcaaaatcgtcgagctgaatgccaccctgaccctgcgtcagggcaacgacgagcgtaccgttatcgtcaaaagcgttaccgaacaacgcaggccagccagcgaagccgttatgctgtaccaagagacggcggagagtattgagaaacgcgaaaaagtggcgctggcgcgtaagctgaatgcgctaacgatgccgcacccagacagacgtccggacaaaaaagagcgccgcgacctgatgagatttaaacacggtgacagcgaatag

SEQ ID NO: 87788 - DNA, 684 bp, Enterobacter aerogenes
atgcaaatcaatatcgcgtggcaggaggttgataccgttctgctggatatggatggcacgctgctcgacctcgccttcgacaactacttctggcaaaaactggtcccggaaacctggggcgccgcgcgcggactcaacctgcaggaagccaaagcggcaatgcatcaggagtatcacgccgtgcagcatacgctaaactggtactgtcttgattactggagcgagcgactgggtttggatatttgtgcgatgaccagcgagcaggggccgcgggcaaaactgcgggaagataccgtgccattccttgatgcgctgcgggccagtggcaagcgccgcatcctgttgaccaatgcgcacccgcataatctggcggtgaagctcaagcacaccggtctggacgcgcaccttgatttattactttccacccacacatttggttatccgaaagaggatcagcgcctgtggcgcgcggtggcggaagaaaccggccttgatgcgcgcaaaacgctgtttgtcgatgacagcgaggctatcctggacgcggcggcgcagttcggtattcgttattgcctgggcgtcaccaatccggattcaggcctggcggaaaaacagtatacccgccatcccggcgtgaacgattaccggcggctgatcccttccctgactccggaggagaggccatga

SEQ ID NO: 87789 - DNA, 2130 bp, Enterobacter aerogenes
atgggcacctttctgacctttttcacagctctgctactctgtgtcttgcttatcgggtggtggtatcgatctcatgccagacgtcgtcgcctccccttactgcaagcctttagcgacgcgacgacccgcaagctttctgatgatgaacgccaggcggtcgaaaagtatctcgatggcctcagccagtcgcaacaggtaccggcgaccggcgccagcgtcgcgcctgtcgccctgaaactgaatgagcagagcgacaccgtttataccatcacccgcgccgtcacccgctatggcatttcgtctgatgagcccaacaaatggcgatacttcctcgactcggtggaggttcacctgccgccgttctgggaacagcatatcaacgacgagaacagcgtctcgctgatcccaaccgacagcctgccgctggtgattgttctcaatgaccacaccttgcgcgactatccgcaggaagcccgcagctacgcgcttgaacgcgcatcggctacccaggcgtcgattcgcggtgaggagagcgagcaggtcgagctgctgaacatccgccaggaaactcaggaagagcatgctctcagccgtcctgacagcctgcgcgaagggattatgatcgtcgcagccttcctgctgttctattgctgcctgatctcccctgacgtctttgcgccgtggctgctcggcggcggcgtactgttgttggcagcgggcttatggggcatctatgcgccgccgctggccggttcgctacgcgagatccactgcctgcgcggaatgccgaaacgttggggactgtttggcgagaacgatcaggaacacgtcaataatatttcgctggggattatcgaccttatctatccgcgccactggcaaccgtggatcgcccaggacctggggcagcaaaccgatattgatatttatcttaaccgccatgtggttcgccaggggcgcttcctgtcgctgcacgatgaagtgaaaaacttcccgctgcagtactggctacgcagcgcgattatcgccgccggcgcgctgctggtcgtcatcatgctgtggattagcgtcccgctgaatatgccctttaaattcacgctctcctggcttaagggggcgcagaccatcgaagccaccaccgtcggccagcttgagaaggcgaaagtccgcatcggcgacacgctgcagttaaaaggtaccggaatgtgcaacatccgtacgccgggcgcctggagcgcgaaagaagcctcaccgtttacgccgttcgattgttcgcagatcatctggaacgacgcgcctcccctgccgctgccggagtccgatatcgtcggtaaagccacggcgctggtccaggcggtgcagcgccagttgcatcctgacccggacgacgattcacacgttagcccggcattacgttcggcaattcaaaaatcaggaatggtactgctggatgacttcggcgatatcgtgctgaaaaccaacgagctctgttcggcgaaagatgattgcgtgcgtctgaagaacgcgctggtcaaccttggcaatacccgcaactgggaagcgctaaccaaacgcgccactgccggtaagctcgatggggtaaacgtgttgctgcggccggtgagcgccgaatcgctggagaatctggtgaccacctcaaccgcgccgtttgtgatgcgtgaaacctcccgcgcggcgcaggcgctaaatagcccggcccctggcggattcctgatcgccagcgatgaaggcagcgaactggtcaatcagccgtggccggctatcagcctgtacgattatcccgcccacgagcagtggggcgagctgcagcgtctggcgggtatgctgatgcatacaccattccatgcggaggggattgtcaccaatctttataccgacgccaatggcacccagcatatcaacctgcaccgcattcccgatcgcagcgggctgtggcgctatcttggcaccactctgctgctgctggcgatgcttggctgtatgtcgtggcacggcgtgcaggcgatccgccgctatcagcgccagcgtcagcgcatggaagaaattcaaaaatattatgaaagctgcctgaatccggttctcatcccttccccggatcatcaagattaa

SEQ ID NO: 87790 - DNA, 561 bp, Enterobacter aerogenes
atgagcaaatcattacaaaaacccaccattctcaacgttgaaacggtagcgcgttcgcgtctttttaatgttgaaagcgtggacctggagttcagcaacggcgtgcgtcgcgtttatgaacgcatgcggcccaccgcgcgtgaagccgtaatgattgtgccgattgttgacgaccacattattttaatccgcgaatatgcggtcggtaccgaatcctacgaattgggtttctccaaagggcttatcgaccccggcgagacggccatggaagccgccaaccgcgagctgaaagaagaggtgggtttcggcgcccgtcaattgaccttcctgaagaagctcagcatggcgccatcttatttctccagcaaaatgaacattatggtggcggaagatctctatccggaatcgctgccgggcgatgagccggaaccgctgccgcaggtgcgctggccgctgtcgcagctgatgtcgctactggaagaagaagacttcaatgaagctcgtaacgtcagcgcgctgtttctggtgcgtgaatggctacaggcgcaggggcgtttgtaa

SEQ ID NO: 87791 - DNA, 399 bp, Enterobacter aerogenes
atgcaatacctgagctatgcgttattaatttgttgtgtgataggcatcctgttaatgatcgtctcgtatttcatattcatttctcacagaaaagaatatagtgccatcttagaaagttatttagcaagcaagcttgaatttccaatgctatacaacatccaatcgatgactggtttttttggagcttatcctgtatcacgtttctttctgggattaaaagaaaataaaaaaatccttttcatcacaaaagaaagcaacgcatattcattcttcttacaaaaaccaacattatcaatagaatggatgaagaaattctgttttttctggaagacatctgtaatgttagttcttattccttgtattaccgcttcaattattcacgtactaagtttggcataa

SEQ ID NO: 87792 - DNA, 1005 bp, Enterobacter aerogenes
atgtcaagaaaactagctcctggttactgtatcgtcgaacagccgggctctatatctcttcaggctgggttgttattccgaaaccgcaatagcagtgccgcgcgttactttgaacagctaaatgcaggtacgtcctgggtcaaacctgggcaaatactcattgtcgccgacccaaatagcacgatgacagaacaaacactccgtttgctccatcaggcaaaacaacaggtaaataacaatctggtaggagtcagtaccgatgaggccagttttcttcaaagaaactatggaatgattgccggaataacgactgcaggagataaaatttttggtgctgtcggggatgctggagaaaaatacttcaaagctatagaaaccacgctaaaaaaaatagaggccagctatcaaaatcagtttcggacacaaggtacgcttataggacaacagttctttgttgagagaaatcaactactagctgaacttaaaatattagttaataaacctattattaaatatttagcaaaacactcaatcaaattccgaccatatgaggatatgcgaagagcattaaacctatccagtcgttcaattgtccatgaatggtcaacggttggagtaggtgctatccctggatatgccacctataccggtaatgctgccagagcggcccgttttttaaagtatggcggatatattggcattgcattttcgtttgctggggcaacaaataacgttataaaatcttgtactactggaagagaaagtgaatgtggtaatacagcatttaaagaatattttaaatttggtgcaagtacgacgttaggtttagccggaggtgcttatggctccaccggcgcagtagccctttgcgtgggcgtagggctagcaacagctggaacaggggcattgccatgcgcgattatcgggggtcttgccggaggatatataggtggtaagttcggcgagtactcgtcaaaaaaaatattggaattaacaggatactag

SEQ ID NO: 87793 - DNA, 2559 bp, Enterobacter aerogenes
gtgaagttcgtaaagtatctttttatccttgcagtttgttgcgttctgctgggagcaggctcgatttatggcctctacaaatttatagagccgcaactccccgatgtcgcgaccttaaaggatgtgcgcttgcagatcccgatgcaggtctatagcgcggacggcgagcttattgcgcaatatggcgaaaagcgccgcatccccgtcactctgcagcagatgccgccggagctgataaaagcgtttatcgcgactgaagatagccgcttctatgagcatcatggcgtcgatccggtggggattttccgcgccgccagcgtggcgatgttctcaggccatgcctcgcagggcgccagtaccatcactcagcagctcgcacgtaactttttcctcagtccggaaaaaacgataacgcgtaagatcaaagaagttttcctcgcaatccgcatcgaacagctgctgaataaagacgaaattctcgatctttacctcaacaaaatttacctcggctaccgtgcctatggcgtcggcgccgccgcgcaggtttacttcggtaaatcagtcgatcagctgacgctgagcgaaatggcggttatcgccggtctgccgaaagcgccttccacctttaacccgctctattcgctggaccgcgcgaccgcgcgtcgtaacgtggtgctgtcgcgaatgttaagcgaaggctatatcactcagacacagtacgatcaggcgcgcagcgaagcgattgacgccagctaccatacgccggaaatcgccttctccgccccgtatctgagcgaaatggtgcgtcaggagatggtcaaccgctacggcgagcaggcctacgaagacggctatcgcgtctacaccaccatcacgcgtaaaaaccagcaggccgcccagcagtcggtgcgtaaaaacgtgctcgattacgacatgcgccacggctatcgtggcccggccaatgtgctgtggaaagttggcgagaccccgtgggataacaaaaaaatcctcgatacgctgaaaaaactgccgggcgtcggcccgctggcaccggcggtagtcacctccgcgaacccgcaggaagcggtcgcgttgctgggcaacggcacgtcggtggcattaacgatggatggcgtccgctgggcgcgtcgctacgtttccgatacgcaacaaggctcgacgccgcgcaaagtgaccgacgtcattcagaccgggcagcaaatttgggtgcgcaaagagggcgacaaatggtggctgtcgcaggtgccggaagtaaactccgcgctggtatctatcaacccgcaaaatggcgcgattatcgctctggtcggcggctttgacttcaatcagagtaagttcaaccgcgctacccaggcgctgcgtcaggttggctccaatatcaagccgttcctttataccgcggcgatggacaaaggcttaaccctcgccagtatgcttaacgatgtgccgatctcccgctgggatgccggagcgggctccgactggcggccgaaaaactcgccgccgcagtacgccggccctattcgtctgcgtcagggattaggccagtcgaagaacgtggtgatggtgcgcgcgatgcgcgcaatgggcgtcgattatgcggcagagtatctgcagcgtttcggcttcccggcgcagaacatcgtccataccgaatcactggcgctgggttccgcttcctttaccccgctacaggtcgcccgcggctattcggtaatggccaacggcggcttcctgattaatccgtactttattagcaagattgagaacgatcagggcggcgtgctgtttgaagagcggcctaagatcgcctgtccgcagtgtaattcgccggtgatctacggcgatacgccgaaatccaatgtgctggaaaaccaggatgttgaagaggtcgccacctctcaggagccgcaaaacggcgacgttccgccgcagccgcagcttgagcaggctaatcagtcgctggtcgcgcaaagcggcgcgccggagtatgccccgcatgtcatcaacacgccgttggccttcctgattaagagcgcgctgaataccaatattttcggcgaaccgggctggatgggcaccggctggcgtgcgggccgcgacctgcagcgtcatgatatcggcggcaaaaccggtaccaccaacagctcaaaagacgcgtggttctccggctacggtcctggcgtcgtgacgtcggtgtggattggcttcgatgaccaccgccgcgatttgggccgtaccaccgcttccggcgcgattaaagatcagatttcgggttatgaaggcggcgctaaaagcgcccaaccggcctgggatgattttatgaaacgggtactggaaggcgtgccggaagagccgttaacgccgccgccgggtattgtgacggtgaatatcgaccgcagcacaggtcaactggctaacggcggcaacagccgcgccgagtacttcatcgagggcacgcagcctacccatcaggcggtgcgcgaagttggcaccaccattaccgatagcggtggcgaaacccacgagttgttctaa

SEQ ID NO: 87794 - DNA, 786 bp, Enterobacter aerogenes
atgactttcagaaattggcgtataggaattcacattcaacaggatagcgtcgccatcgtggcgctgttgtacgaacgcgggcgctgggctttgcgtcgctggtggcgaattccgctaccgcccggcctggtggcgcagggcagcatcgttgaccttaatgagatggtgaagcggttacgtgaatggcgccgcgagctgccgttacagcatcaggtgtgcattgcgcttcctgccagccgtacgctgcaaaagcagttgcccgcgccacaggtgtcgctgcgggaaagcgaaagagcgacatggatagcgggcacgatggcgcgtcagctggaaatgcctgcctcttcgctgtgtatcgattacgccgcccgcgcggcaaacgatggctggcaggcgacggcggctcagcgtttggatatcgacgccctgcgtcagctggcgcggaggcttaagctgcgcctggcggctatcgtaccggatgcggctgctctcacttctttttttccctggctggcagacgcgactcagggcctggtctggcagggggacgcgcagtggttatgggcgacccaggagcgctggggctattgtccttgcgctgaagccccctctttctcgcacttaacctcgcgcctcaatgatgaacagttccagctctgtagcagcctgccgttggtggaaaatagcttcgattgctggagcgtgatccaccgcctgcagccgccgcttcccgcctgcggcgatcgctttgctattgcgcttggtttggcgttgggaggtaaataa

SEQ ID NO: 87795 - DNA, 540 bp, Enterobacter aerogenes
atggctcagcagattaatctcctgccgtggcgcgagacgcgacggcggcaatgcttgcgtctgggcgggctgctggtggtagcgatggcgctaagcatcgccgccctgacgatagctgtgcgtacgttacgccagatggacgcggcgcagcaggcgatgcatacccaggccgacaatctgctttattccgcgctgttgcaacgcgagcgggagatgcgtgaggaaatacagcgcggtgagcggcaggcacggcgagcgcagcggagggcggcgacgcatgcctggcagccgcgactgttatcgctggctgcactattgccggagccgctgtggctgaccaggctggactaccagccgcagggaatcaccctcaacggcctggcgctgaacctcaaggcggtggcggcgctggaaaaagcgctcagcaagctggagggttttcaaccggttacgccaggggcgacgcggcgtgatgcacaggggcgctggtcattcagctttttccttgcaggagaaaccaccgatgcggctagcgattga

SEQ ID NO: 87796 - DNA, 438 bp, Enterobacter aerogenes
atgcggctagcgattgaacgcctgctggcgctgcgtgggtggtcgttgacgttactctgcggcgcagtgttggctgcggcaatgtgtctggcgttttcgcttgctgctgtcagcgtttcaccgcccgcgaatgtgccgctacaggcgcaatggcggcgaatattgccgctgcgcgccacgctgcagcaacgcgtagtccatagttggactacccggcgtttttcgccgctggagccgcctgtcgccggcgtcgccttacaggcctggcaaccgagggggcgcggtggcgaaatgcttgctgtggttgactggcaggcggtgccgccgctgtttgcctggcttgccgattgcggggtacatcctggcgctttttcattgaatgccgaaaaaggagcgttgcagttgtcgctgcagctggagagggacgatgaaacataa

SEQ ID NO: 87797 - DNA, 1287 bp, Enterobacter aerogenes
gtgaacccgcacgctgggtctggtcacgtaagggaagccaacatgatgcgaaggataagcccgttgctacttctgctgttgccgttgctggccgcggcgacgaaaaaagaaccgccggtgtcgctggtggttgatgatgtaccggtggtccaggtactgcaaagcctggcggaaatgcaaaatcttaatgtaatcgtggcgccggaggtcagtggtacattgtcgctccacttaaacagcgttccctggcgacaggcgctccagtcggttgtcgatagcgccgggctgacaatggcccggcagggcacggtgttgtacatccatacacaggcgtggcagcaagcaaaacgggcgcagcaggaagccgagcaggccagacgctggcagaatctgccattacgtaaccacagtatcccgctgcgctatgccgacgcagacgaactggcgaaatccgggggcaagctgttgagcgcccgcggcacgatgactgtcgatcggcgtactaatcgtctgctaatccgcgacgacgatcgtcatttgccggcgctgaaggcgtgggctgaagagatggatctgccggtcgggcaggtggaactggcggcgcacattgtgtcaatgagcgcgaccagcctgcgtgagcttggcgtgaagtggagcctggcggaggccagcagtacgccggggatggggaaaatgaccaacctgagtagcaacctggcggtgtcagatgcaaccacccgcggcggctttaatatcggccggatcaacgggcgattactggagctggagctttccgcgctggagcaaaagcagcaggtggacatcatcgccagtccacgcttgctggcgtcgcatatgcaacccgctagtatcaaacagggcagcgaaatcccctatcaggtctccagcggagaaagcggcgccacctcggtcgagtttaaagaggcggtcctggggatggaagtgacgccgacggtgctacagcaggatcgcgtgcgcctgaagctgcgcattagcgaaaatacgccaggccaggtactgcagcaggagaatggcgaagcgttggcaattgataagcaagaaattgaaaccttagtcgaggtgaaaagcggcgagaccctggcgctgggcggtattttttcgcaaaagaataagtcggcgcgcgacagcgtgccgttgcttggcgaaatccccttgctcgggcagctgtttcgccatgatggtaaagataatgaacgacgtgaactggttgtcttcatcacgccgcgtattctggcagtacattaa

SEQ ID NO: 87798 - DNA, 522 bp, Enterobacter aerogenes
atggcagagaaacgcaatatctttctggttgggcctatgggtgccggcaaaagcactattgggcgccagttagcccaacagctcaacatggaattttacgattctgatcaagagattgagaaacgcactggcgcagacgtcggctgggtcttcgatgtcgaaggcgaagaaggcttccgcgatcgtgaagaaaaaatcatcaatgagttgacggaaaaacagggaatcgtactcgccactggcggcggctcagtaaaatcccgtgaaacgcgtaaccgtctctccgcccgcggcgtggtggtctacctggaaacaacgatcgaaaaacaacttgctcgtacgcagcgcgataaaaagcgtcctttattacaagtagatgcgccgccacgtgaagttcttgaagcgttggcagatgaacgtaatccactgtatgaagagatcgccgatgtcactatccgcaccgacgatcaaagcgcgaaagtcgttgcaaaccagattattcatatgctggaaagcaactaa

SEQ ID NO: 87799 - DNA, 1095 bp, Enterobacter aerogenes
atggagaagctgactgtaactctcggggaacgtagttacccgattaccatcgcggctggtttgtttaacgatccagcttcttttctgccactgaaatcaggcgaccaggtcatgctggtcaccaatgaaacgctggcgccgctttatcttgataccgttcgctccgtactggagcaagcgggtgtcaacgttgacagcgtgatcctgccggatggcgagcagtataaaagcctggcggtgatggatacggtatttaccgcgctgttgcaaaaaccacatggccgcgacaccacactcgtggcgctcggcggcggcgtggttggcgatttaaccggttttgccgctgcgagctatcagcgcggcgtacgttttattcaagttcccaccacgctgctttcgcaggtggactcttcggttggcggcaaaacggccgtaaaccatcccctcggtaaaaatatgattggcgccttctggcagccggtttccgtggtcgtcgaccttaattgtctcaaaaccttgccgaagcgtgagctctcctccggcctggctgaggttattaagtacggcattatcctcgacggcgagtttttctgctggcttgaagacaacatcgatgcgctgatggcgctggatgaatcagcgatggcgtactgtattcgccgttgttgtgagctaaaagccgaagttgtcgctgccgacgagcgcgaaaccgggttacgtgctttactgaatctgggacatacatttggccatgctatcgaagctgaaatgggctacggtaactggctacatggcgaagctgtggcggcaggaatggtcatggcggcgcatacgtccgagcgtttagggcagtttagcgcgcaggatacgcagcgtatgattgcgctgttgcaacgtgcagggttgccggtacgcgggccgcaggaaatgtctgccgaagcgtacttgcctcacatgatgcgtgataaaaaggtactggcaggcgaaatgcgcctggtattaccgctcgctataggaaagagcgaggtccgcggcggagtgtcgcacgatgtagttcttggcgcgattgctgatactcagcaggcgcaacaataa

SEQ ID NO: 87800 - DNA, 1275 bp, Enterobacter aerogenes
atggatgatttcaaaccagaagacgatatgaaagccgatcgcaacgatcgtcgtactggtcgttcccgtcagtcttccgagcgtgacgccgatccgcagatcaatttcgacgatctcgatcttgaggccgatgaaggccgtccgacgcgcgcgaacaaagcccgtcgtgaacgcgatgaagaagagtacgaagaggacctcgagtccgaagaagaagcagaagaagagcagcaggttgaacgccgcccgcgtaaacgcaaaaaggcccctgctaaaccggcttcccgccagtatgtcatgatgggcgtcggggtgctggtactcctgctgctgattgtcggcgtgggttcggcgctgaaatcgccatcttcttccaatgaatccgcttctggtgaaaagagcgttaatctgtcaggcgatcaaagcatgaccgctgaccagaacaacaatgccgcgcagccggtcgatcaaactgcgggcaacaccaaccagcaacagccgcaggacgtttctctgccgccgatcgcctctaatccgactcaggggcaacccgcctccgagccgcagggccagcagcgtgtggaagttcagggcgacctgaacaatgcgctgactcaacagcagggtcaactggatagcgccgttgctaactccaccttaccgaccgaacctgcgaccgttgcgccgatgcgtaatggcgccgcgccgcgtcaaacgaccgaacgccagacggccgccacgccgcgtcctgccgagcgtaaacaggtggtgattgaaccgaaaccgcaaagcaagccgcaggctaccgccaaagcgccggttgaaactaagccgaagcacgtagaaagcgcgccggcggctaccgccagcaagcctgtcgccactgcgcagactaaacctgctgcgacaaccgcgccaacggcgactgcgccggccgcaacgacctccgccccggcagccaccgcgcctgcggctggcagcaaaacggctggcgatgttggttcgatgaagtctgcgccgtctggcaactatacgttgcagctcagcagctcctctaactacaacaacctgaataactgggcgaagaaagagaagctggaaaaatatgttgtctatgagacgactcgcaacggccaaccgtggtatgtgctggttagcggcatctacgcttcgaaagatgaagcgaaacgtgctgtcgccacgctccctgcggatgttcaggcgaaaaatccatgggcaaaaccgctgcaccaggtacaagctgacctgaagtaa

SEQ ID NO: 87801 - DNA, 828 bp, Enterobacter aerogenes
atgaaaaagaatcgcgcttttctgaagtgggcaggggggaaataccccctgcttgacgatattaaaaagcatttgccggaaggtgaatgcttgattgagcccttcgtgggcgccgggtcggtattcctgaataccgacttttctcgttatattctcgcggatatcaatagcgacctgatcggtctgtataacatcgtcaaattgcgcaccgacgaatacgtcagcgcggcacgtgagatgtttacgccggaaaataacgccgcggagcgctactaccagtaccgtgatgaattcaaccagagtcaggatcccctgcgtcgcgcggtgctgttcctgtatctgaatcgtcatggctacaacggcctgtgccgctacaacctgcgcggcgagttcaacgtgccgtttggccgctacaaaaagccctatttccccgaggctgagctctatcacttcgccgccaaggcgcagaacgccgagttttactgcgaatcttatgaagagtgtatgaagcgcgccgatagccgggcggtagtctattgcgatccgccgtacgcgccgctgacggcgacggcgaattttaccgcctaccacaccaacagcttcaaccttgatcagcaggtactgctggcgaaaaaggcggaatcgttgatgaaaaagcggatcccggtgcttatctcaaaccaccgcacgccgctgacgcaggagtggtataaaaacgcggcggaaacgcatattgtgaaggttcggcgcagcatcagcagcaatggtggtacgcgtaaaaaggtggacgagctcttagcgctgtaccgtccaccgaagaccaaataa

SEQ ID NO: 87802 - DNA, 678 bp, Enterobacter aerogenes
atgaagcagtatttgattgccccttcgattctgtcggctgattttgcccgtttgggcgaggataccgctaaggcactggcggcgggtgcggatgtcgtacacttcgacgtcatggacaaccactatgtgccgaatctgacgattggcccgatggtactgaagtcgctgcgcaactacggcattaccgcgccgatcgatgtgcacctgatggtaaagccggtcgaccgcatcattcctgattttgccgaagccggcgccagcattatcactttccacccggaagcctctgaacacgtcgaccgcagcctgcagcttatcaaagagcatggctgtaaagcggggctggtattcaacccggcaacgccgctaagttacctcgattatgttatggataagctggatgtgatcctgctgatgtcggttaacccaggctttggcggccagtcctttattccgcacacccttgaaaaactgcgtcaggtgcgtcagcttatcgatcaatccggctacgacattcgccttgaagtcgatggcggcgtgaaagccagcaatattggtgaaattgccgccgccggtgcggatatgtttgtcgcgggttcggcgatcttcggccagccggactacaaaaaagttattgatcaaatgcgtagtgaattagcgaaggttagtcatggataa

SEQ ID NO: 87803 - DNA, 762 bp, Enterobacter aerogenes
atggataaattacaggccatccgcggcgtggcattcgacctggacggtacgctggtcgatagcgcgccgggtttaaccgccgccgttgatagcgcgctttacgcgctggaactgccggtggcaggtgaagaacgcgtcgtgacctggattggcaacggcgcagacgtcctgatggagcgggcgctgaactgggctcgccaggagcgcgccacgttacgcgcggcgatggggaaaccttccgtcgacgatcatgatataccgcaagacgaacagctacgcgttttgcgtaaactgttcgaccgctattacgccgaagcggcggaagaaggcagtttcttgttcccggcggtggccgatacgctcggcgcgctgcatgccaaaggcctgccgctggcgctggtcaccaacaaaccaacgccgttcgtggcgcccttgctcgaggcgctggatatcgcgaaatactttagcgtggtgatcggcggcgacgatgtgcagaacaaaaagccgcatccggatccgctgctgctggtggcgcaaaagctctctctgacgcctgccgaactcttgttcgtcggggattcgcgcaatgatattcaggcggcgaaagcggcaggttgccgctctatcggtctgacttacggctataactacggcgagccgatagcgctgagcgagccggattttatctttgaccaatttaatgaactcttgcccgctcttgggctaccgtacagtgaaactcaggaattaaaaaatgactaa

SEQ ID NO: 87804 - DNA, 1005 bp, Enterobacter aerogenes
atgactaagcccatcgtttttagtggcgcacagccctcaggtgaattgaccattggcaactatatgggtgcgctgcgtcaatgggtaaacatgcaggatgactatcactgtatttactgcatcgttgaccagcacgcgatcaccgtgcgtcaggatccgcagaacctgcgtaaagcaacgctggatacgctggcgctgtatctggcctgcggtatcgatccgcaaaagagcaccattttcgtccagtctcacgtgccggaacacgcacagctgggctgggcgctcaactgctacacctatttcggcgaactgagccgcatgacccagtttaaggacaagtccgcgcgctacgccgagaacatcaacgccggtctgtttgactacccggtactgatggccgctgacatcctgctgtaccagaccaaccaggtaccggtaggcgaagatcagaaacagcatcttgagctgagccgcgacgttgcgcagcgctttaacgctatctatggcgatatctttaaagtgcctgagccgtttattcctaagtccggcgcgcgcgtcatgtcgctgctggaaccgaccaagaagatgtccaagtccgatgacaaccgcaacaacgtcattggcctgctggaagacccgaaatcggtagttaagaagatcaaacgcgcggtgaccgattccgacgagccgccggttgtccgttacgatgtgcaaaacaaagcgggcgtttccaacctgctggatatcctctccgccgtcaccggccagagcattccggagctggaacagcactttgaaggtaaaatgtacggccatctgaaaggtgaagtcgccgaagccgtttccgggatgctgaccgagctgcaggagcgctatcaccgtttccgcaacgacgaagcgttccttaatcaggtgatgaaagagggcgccgagaaggccagcgcgcacgcttctaagactctgaaagcggtatatgaagcgattggctttgtcgctaagccgtaa

SEQ ID NO: 87805 - DNA, 1374 bp, Enterobacter aerogenes
gtggaccacttacctattttttgccaactacgcgatcgcgactgcttgctggtcggcggcggcgatgtcgctgaacgcaaggcgcgtctgttgctcgacgcaggcgcccggttaacggtgaactcacgccagtttactccgcagtttcaggtgtgggccgaggcgcaaatgctgacgctggcgcagggcgatttcaatcctgcgctgctcgataactgctggctggccatcgccgccaccgacgatgatgtcgttaatcagcaggtcagcgaggccgctgaatcacggcgtattttctgcaacgtggtggatgcgccccgtcaggccagctttatcatgccgtcaattatcgaccgctcgccgctgatggtcgccgtttcttccggcggtacctccccggtgctggcgcgcctgctgcgtgaaaagctcgaatcgctgctgccgctgcacctcgggcaaatcgcccgctatgccgggcagttgcgctcaagggtgaaaaaacagttcgctaccgtcggcgagcgccgccgcttctgggaaaaactgtttgttaacgatcgtctcgcccaatcgttggcgaacgatgatcgtcaggccgttgccgacaccacggaacagttattgaatgagccgctggaacatcgcggcgaagtggtgctggtgggcgccggtccgggcgatgccgggctgctcaccctcaagggactgcagcagatccagcaggccgatgtagtggtttatgaccgactggtctccgacgacattatgaacctggtgcgccgtgacgccgatcgggtgtttgtcggcaaacgtgcaggctatcactgcgtgccgcaggaggagattaaccaaatcctgctgcgcgaagcgcaaagcggcaaacgtgttgtacgcctgaaaggcggcgatccgtttatttttggccgcggcggcgaagagctggagaccctctgcgcggcaggtattccgttctcggtggtgccggggatcaccgccgcctccggctgctcggcctactccggcattccgctcacccaccgcgatttcgcccagggcgtacgcctgatcaccggccatctgaaaaccggtagcgatctcgactggcaaaatctggcggcggaaaaacagacgctggtgttctatatggggctaaaccaggcggcggcgatccgcgaaaaactgatcgcccacggcatggcggcggatatgccggccgctatcgtcgaaaacggcaccgcggtcaaccagaaggtcgtcaccggcactctggatcggctggatatcctggcgcagcagatggccagcccggcgttaattatcgtgggccgcgtggtggcgctacgcgacaagctgaactggttttctcaccattaa

SEQ ID NO: 87806 - DNA, 327 bp, Enterobacter aerogenes
atgagccagtgggtaaacatctgcaaaattgacgacatcctgccggcgaccggcgtctgtgcgctgctggggcaacagcaggtagctatcttccgtccgtaccatgacgacagagtgttcgccatcagcaatatcgatccgttcttcaatgccagcgtgctgtcccgcgggattatcgcagagtatgacggcgcgctgtgggttgccagcccgctgaaaaagcagcgcttccgcctcagcgacgggctgtgcatggaagatgagagccactccatcgcccactacgaagcccgtgttaaagatggcaaagtgcagctgaaagcctga

SEQ ID NO: 87807 - DNA, 2544 bp, Enterobacter aerogenes
atgagcaaagtcagaatcgctattatcggtaacggcatggtcggccatcgctttatcgaagagcttcttgataaggcgcctgccggacaattcgacattaccgtgttctgtgaagagccgcgtatcgcctatgaccgtgtccacctgtcgtcttacttctcccatcatactgcggaagagctgtcgctggtacgcgaaggtttctatgagaaacacggcgtcaaggtactggtcggcgaacgcgcgattaccatcaaccgtcaggaaaaggtgatccactccagcgctggccgtaccgttttctacgacaagctgattatggcgactggctcatacccgtggatcccgccgattaaaggcgcggaaacccaggattgcttcgtctatcgtactattgaagatcttaacgccatcgaatcctgcgcccgtcgcagcaaacgcggcgcggtggtcggcggtggtctgctcggtctggaagcggctggcgcgctgaaaaatctcggcgtggaaacccacgtgatcgagtttgcgccgatgctaatggccgagcagctcgaccagatgggcggcgagcagctgaagcgtaagattgaaagcatgggtgtgaaagttcacaccagcaaaaacaccaaagagatcgttcagcagggcaccgaggcacgcaaaacgatgcgcttcgccgacggtagcgaactgcaggtcgatttcatcgtcttctctaccggtatccgtccgcgcgacaagctggctacccagtgcggtctcgccgtcgcccaacgcggcggcatcctggtcaacgatagctgccagacctccgatccggatatctacgctatcggcgaatgcgccagctggaataaccgcgtatacggtcttgtcgccccaggctacaaaatggcgcaggttaccgttgaccatatcctcggcaacgacaatctgttcaccggcgccgacctcagcgccaagctgaagctgctcggcgttgacgttggcggtatcggcgacgcccacgggcgcacgccgggcgcgcgtagctatgtctatctcgacgaaagtaaagaggtctacaaacggctcattgtcagcgaagataacaaaaccctgcttggcgcggtactggtcggcgacaccagcgattacggcaacctgctgcagctggtgctgaatgccatcgagctgccggaaaacccggattcgctgatccttccggcccacgccggcagcggcaagccgtccatcggcgtggataaactgccggacagcgcgcagatttgttcctgcttcgacgtcagcaaaggcgacctgatcgccgctatcaataaaggctgccacaccgtggcggcgctgaaagcggaaaccaaagccggaaccggctgcggcggctgtattccgctggtgacgcaggtgctcaacgccgagctggcgaaacagggtatcgaagtgaacaacaatctgtgtgagcacttcgcctactctcgccaggagctgttccacctgatccgcgtggaaggcatcaaaaccttcgacgaactgctggaaaaacacggtcagggctacggctgtgaagtctgtaagccgaccgtcggttccctgctggcctcctgctggaatgagtacatcctcaaaccacagcacacgccgctgcaggacaccaacgataacttcctcgccaacatccagaaagatggcacctactcggttatcccgcgctccgcaggcggcgaaattacgccagaaggcctggttgccgtcggtcgcatcgcgcgcgaatttaatctgtataccaaaatcaccggctcccagcgtatcggcctgttcggcgcgcaaaaagacgacctgccggaaatctggcgtcaactgattgaagccggcttcgaaaccggccatgcctacgccaaagcgttacgtatggcgaaaacctgcgtcggcagtacctggtgccgctacggcgtcggcgatagcgtcggcttcggcgtagaactggaaaaccgctataaaggtatccgtaccccgcacaaaatgaagttcggcgtctccggttgtacccgtgaatgcgcggaagcccagggtaaagacgttgggatcatcgccaccgagaaaggctggaacctgtacgtgtgcggtaacggcgggatgaaaccacgccacgccgatctgctggccgcggacctcgatcgcgatacgctcatcaaatatctcgaccgctttatgatgttctacatccgcaccgccgataagcttacccgtaccgcgccgtggctggacaacatggaaggcggtatcgactatctgcgcagcgtcatcatcgacgataagctgggcctgaacgatcaccttgaagaagagctggctcgcctgcgcgccgctattgcctgcgaatggaccgagaccgtcaataacccggcggcgcagacgcgcttcaaacactttatcaacagcgatcagcgcgacccgaacgttcaggtggtgccggaacgtgaccagcatcgcccggccacgccctatgagcgcatcccggtcacgctggtggaggaaaacgtatga

SEQ ID NO: 87808 - DNA, 1323 bp, Enterobacter aerogenes
atgtcgacaacgccgttgtggttaattcagaacgtccatctgccacagaaggaagggctgtggcagattgcgattgataaagggcgattcggcgacattacgccgatgggagaggcgcgcagcgagagctacgaagtgcttaacgcccgcggcggattggccatcccgccgtttatcgaaccgcacattcatctcgataccacgcagacggcgggagaaccaaactggaaccagtccgggacgctgttcgaagggattgagcgttgggccgagcgtaaagcgctactaagccatgaggatgtgaaagcccgcgcgtggaaaaccctgcgctggcaaatcgctaacggcatccagtttgtccgcacccatgtcgatgtttccgacccaacgttgaccgcgctgaaagcgatgctggaagtcaaacaagaggtagcgccgtgggtcgatttgcagatagtcgccttcccccaggaagggattttatcctaccccaatggtgagagtttgctggaggaggcgttacggctgggcgccgatgtggtcggggcgatcccgcatttcgaatttactcgtgaatatggtgtggaatcactgcatatcgccttccgtctggcgcagaaataccagcgtccgctggatatccactgcgatgaaattgacgatgaacagtcgcgctttgtcgaaacggtcgccgcgctggcgttaaaagagggaattggcccccgggtgaccgcgagccacaccaccgcgatgcactcctataatggcgcttatacctcgcggctgttccgcctgttaaaactctcgggcattaacttcgtcgccaacccgctggtcaatattcatctgcaggggcgctttgatgactacccgaagcggcgcggcgtgacgcgagttaaggagctgatggcggccggcattaatgtctgttttggccacgatgatgtgttcgacccatggtatccgttgggaaccggcaacatgctacaggtgctgcatatggggttgcacgtttgccagttgatgggctatcagcagattaacgacagtctgcagctgattacccacaacagcgccagaacctttgggctcaatgattacggcattgctaccggcaacccggccaatctggtgatcttgccggcggaaaacggttttgaagccgtacgctgccaggtgccggtacgttggtcaattcgtcagggaagggtcattgcgactacgcagctggcgcagacgtggatacagaccgataaaggcggcgaggagttgttttttaccaaaaatagcccctttgccgaagcaaaggggcctaaggcttag

SEQ ID NO: 87809 - DNA, 1179 bp, Enterobacter aerogenes
atgactaacagcaatcgtattaagctcacatggatcagctttttctcctacgccctgaccggcgcgttggtgatcgtcaccgggatggtgatggggaacatcgcggattatttccatctgccggtgtccagtatgagtaacacctttaccttcctcaatgccggtattctgatttctatcttcctgaatgcctggctgatggagatcgtgccgctgaaaacccagctgcgcttcggctttatcctgatgctgttagctatcgccgggctgatgttcggccacagcctgacgctgttctccgcgtcgatgttcgtgctcggcctggtcagcgggatcaccatgtcgatcggtactttcctgattacccacatgtatgaaggccgccagcgcggcgcgcgtctgctgttcaccgactccttcttcagcatggcagggatgatcttcccgatggtcgccgccgttctgctagcgcgcagcatcgagtggtactgggtttacgcctgtatcggcctggtctacgttgctattttcgtgctgactttcggctgtgagttcccggtgcttggcaacaaagcgctggcggaaaacagccagccggtagtgaaagagaaatggggcatcggcgtgctgttcctttccatcgccgcgctgtgctacatactcggtcagttgggctttatctcctgggtaccggaatatgccaaaggcctcggcatgagcctcggcgacgccggtaagttggtcagcgatttctggatgtcctatatgattggcatgtggtcgttcagcttcatcctgcgcttcttcgacctgcagcgcatcctgaccgtgctggcgggcctggcgacagtcctgatgtatctgttcattaacggttcgccggagcatatgccgtggttcatcctgacccttggcttcttctccagcgccatctatacctcgatcattactctgggctcgcagcagactaaagtcgcttcaccgaagctggtgaacttcattctgacctgcggcactatcggcaccatgctgaccttcgtggtgaccgggccgatcgtcgcggccagcggcccgctggccgcgctgcacaccgcgaacggcctctatgccgtggtattcgtgatgtgtctgctccttggcttcgtttcccgccaccgtcagaacgcgtcggcgcactaa

SEQ ID NO: 87810 - DNA, 570 bp, Enterobacter aerogenes
atgctcaaatccactctggcggcgatggctgccgtattcgccatttcagcattctcccccgccatggcggccaagggcgacccgcacgtactgctgaccacttctgctggcaacatcgagttggagctgaatagccagaaggcgccgatttctgtcgataacttcctgaagtacgtgaacagcggtttctataacaacacgaccttccaccgggtgatcccaggctttatggtgcaaggcggcggctttaacgagcagatgcagcaaaagcagccgaacccgccgattaaaaacgaagccgacaacggcctgcgtaatacccgcgggacaatcgccatggcgcgtaccgccgatcaggacagcgcgaccagccagttcttcatcaacgtggccgataacgctttcctcgaccacggccagcgtgattttggctacgcggtatttggtaaagtggtgaagggaatggacgtcgccgacaaaatttctcaggttccgacccacaacgtcggcccataccaaaatgttccgtccaaaccggtcgttattctctcggcgaaagtgctgccgtaa

SEQ ID NO: 87811 - DNA, 168 bp, Enterobacter aerogenes
atgcgtttactcaccgataaacaaaaatcccggctctgggaacagacccgcaatgccaattttcaggccagccgacgccttgaaggcgcgacggtaccgctcattaccttgacggctgaggaagcgctggcgcgtcttgccgagctgaggaggcgtcatgagcgctaa

SEQ ID NO: 87812 - DNA, 603 bp, Enterobacter aerogenes
atgagcgctaaatatggcgacgatcgcgacccctatctctatccgacgctggatgtgttgcgtaatcggctgggtattcgtcaggcgcagcggctggaacaaacggcatgggaattcacttcgctgcgcgcggcgacgatcccgttgggcccacgcggccgcggcttaccgcatctgtgcgccattcaccggcaactttatcaggatctctttgactgggcgggcaaactgcgggaaatcgatatctaccagggcgatacgccgttttgccacttcgcgtggatagagaaagagggcaacgcgctgatgcgcaagctggaagaagaggactatctgtgtgaacaaccccgggagacgttcgtcgagcgactgagctggtactacggcgaaatcaatgtcctgcacccgttccgccttggcaacggcctgacgcaaaggatcttcttcgaacagttggccattcacgccggctacctgcttgactggcggggcatcgatccggatgcgtggagccaggctaaccagctgggcgcaatgggcgacccggaaccgctggagcggatctttcgtaaagtggtaagcgaagcgcgggaatctgagtag

SEQ ID NO: 87813 - DNA, 564 bp, Enterobacter aerogenes
atgatcctgctaatcgataactatgactctttcacctggaatctgtaccagtacttttgcgaactgggggcggaggtgctggttaagcgtaacgatgagttaacgctggcagagatagcgtcgctggcgccggagaaaatcgttatttcgccgggcccctgcacgcccgatgagtcaggtatttcgctggacgttatccgccgctatgccggaaaaaccccgctgctcggcgtgtgtctgggtcatcaggctatcgcccaggtcttcggcgccgccatcgtacgcgccgctcaggtcatgcatggtaaaacgtcgcttattgagcacaacggcgagggcgtttttaaggggttaaacaacccgctcaccgttacgcgttaccattcgttagttatcgacccgccaacccttcccgcggattttatcgttaccgcccgcagcgccagcggtgaaatcatgggtatccgccatcgccagtgggatctcgaaggcgtgcagttccacccggagagtattcttagcgaacagggacaccaactgctggaaaacttccttaaacgctga

SEQ ID NO: 87814 - DNA, 1221 bp, Enterobacter aerogenes
atggcaacagagcaaccggcaatcacccgcgccacattcgatgaagtcattctgccgatttatgcaccggcggagtttattccggtgaaggggaaaggcagccgcgtttgggatcagcagggcaaagagtacgttgattttgccggcgggattgcggtgaccgcgttgggccactgccacccggcgctggtggcggcgctgcacgagcagggcgaaaccctgtggcacaccagcaacgtttttaccaacgagccggcgctgcgcctgggtcgccaactggtggacgctacttttgccgaacgcgtggtgtttatgaactccggtacggaagccaatgaaacggcgttcaagctggcgcgtcattacgcaatcactcgccatagcccgtacaaaaccaaaatcatcgctttccataatgccttccacggacggtcgctgttcaccgtctcggttggtggtcagccgaaatactctgacggttttgggccgaaaccggcagatatcgtgcatgtcccatttaacgatctcgaggcagtgaaagcggtgatcgatgaccatacctgcgcggtggtggttgagccgattcagggcgagggcggggtaatggcggcgacgccggcgttcctgcaggggctgcgcgaactgtgcgacaagcatcaggcgctgctggtatttgatgaagtacagtgcggtatgggccgtaccggttcgctgttcgcctatatgcattacggcgtgaccccggatatcctgaccagcgcgaaggcgctcggcggcggtttcccgattagcgcgatgttgaccaccaatgaaattgccagcgccttccatgccggttcccatggctccacctacggcggcaatccgctggcctgcgcggtggcgaccgcggctttcaacctgattaacacgccgcaggtgctggagggcgtgaatgccaaacgggcgctgtttgtcgatcacctgcagcagatcgatgcgcagtttgatctgttcagcgacatccgcggcatggggctgttaatcggcgccgcgcttaagccgcagcatcatggacgcgcgcgcgatttcctctatgccgcggcggaggccggggtgatggtgttaaacgccgggccggacgtaatgcgctttgtgccgtcgctggtgattgatgatagcgatatcgccgaagggatggcgcgctttgcgcaggcggttaaaaacgtgcttagcgcctag

SEQ ID NO: 87815 - DNA, 2079 bp, Enterobacter aerogenes
atgtggcgcaggctgatttaccacccggaagtcaactatgcactgcggcaaacgctggtgctgtgtctacctgtggccatcgggcttctgctcggccatctgcagcaagggctgctgttctctttagttcccgcctgttgcaatattgccggtctcgacaccccgcataaacgttttttcaaacgcctgatcgttggcggctgcctgtttgccggcagcagcctgattgtgcaattgcttctggcacgcgacatcccgttgccgcttatcctcagcgcgctggcgctgattctcggcgtgacggcggaaatcagctcgctacacgctcgcctgttgccggcatcgcttatcgccgccatttttaccttaagcctggctggcaatatgcccatctgggagccgctgcttatctatgcgctgggaaccttgtggtacggactctttaactggttctggttttggctctggcgggagcagccgctgcgcgagtcgttaagcctgctttaccgcgaactggctaattattgcgaggccaaatatagcctcctgacgcagcacactgacccgacgacctccctgccgccgctgcttacccgccaacagaaggtagtcgatttaattacccagtgctatcagcagatgcatatgttagccgccaaccagcgtagcgatcataagcgactgctgcgcgcgttccaggttgggctggatctgcaggaacatatttcagtgagcctgcaccagccggaagaggtgcaaaaactggtggagcgcagccatgcggaagcggtcatccgctggaacgcgcagaccgtcgccgcgcgtctgcgggtgctggcggatgatattctctaccaccgctacccgcgtcgctttcagatggataagcaaatcggcgcgctggaaaaaatcgcctatcagcatcccgataacccggttggccagttctgcgcctggcacttcagtcgtatcgcccgcgtgctacgtactcagcgcccgctgtacgcacgtaacctgatggcggacaaagaacgacgcctgccgctgctaccggccctgaagaactacctgtcattgaaatccccggcgctgcgcaacgccgcgcgcatcagcgtaatgttgagcatcgccagcctgatgggcagcgccctgcacctgccgaagccttactggatcctgatgaccgtgctgttcgtgacgcaaaacggttacggcgccacccgcgtgcggattgtccaccgggcggcaggcaccctggcgggcctggtgatcgcctggctgaccttacacttccacgtaccggagagctatacgttaagcggtatgttgttcatcacgctgctgagctatctcatcattcgtaaacactacggctgggcgatggtgggctttaccgtcaccgcggtatataccctgcagttgctaacgcttaacggcgagcagttcatcgtcgcccgctttatcgataccatcattggctgtctgatcgcctttggcgggatggtctggctatggccgcaatggcagagcggcctgctgcgtaaaaacgcccacgatgctctggaggccgatcaggaggctattcggctgatacttagcgccgatccgcaagccccggcgttggcctaccagcgtatgcgcgtcaaccaggcgcacaacgccctgtataactcgcttaaccaggcgatgcaggaaccgggttttaactcgcactatctggaagatatgaagctgtgggtaacccatagccagtttatcgttgaacatatcaacgccatgaccacgctggcgcgcgagcatacgatgctaacgcctgacctggcgcagcggtatctggaatcttgtgaaattgcgctgcagcgctgtcagcagcgtctggattcagacgggccgggcagcgcgggcgatgtaaatattatggaatcccaggacggggaagtgttgcgtgggccgctcagcacccttgagcagcatctgcagcggatcctcggccatctgaacaccatgcacaccatttcgtcggtggcatggcgtcagcgtccgcatcacggcatctggctacgcacgactaggcgctaa

SEQ ID NO: 87816 - DNA, 633 bp, Enterobacter aerogenes
atggtgcttggcaaaccgcaaacagaccctacccttgaatggttcttgtctcattgccacattcataagtacccatcaaagagcacgctgattcaccagggtgagaaagcggaaacgctttactacatcgtaaaaggctccgtggctgtactcatcaaggatgaagaaggtaaagagatgatcctctcttacctcaaccagggcgatttcatcggtgaattaggcctgtttgaagaaggtcaggaacgtagtgcctgggtacgtgcgaaaaccgcatgtgaagtggccgagatctcttacaaaaaattccgtcagttaatccaggtgaacccggacatcctgatgcgcctctcctcgcagatggcgcgtcgtctgcaggtcacttccgagaaagtcggtaaccttgctttcctcgacgtgacgggccgtatcgctcagaccttactgaatctggcgaaacagcctgatgccatgactcacccggacgggatgcagatcaaaatcacccgccaggaaattggccagatcgtcggttgctctcgtgaaaccgtcggccgtattctgaagatgctggaagatcaaaacctgatctcggcacacggtaaaactatcgtcgtctacggtacccgttaa

SEQ ID NO: 87817 - DNA, 405 bp, Enterobacter aerogenes
atgcaagcgcgtgtgaaatgggtggaaggtctaaccttcatcggtgagtcggcctccggccaccagattttaatggatggcaactccggggacaaagcgcccagcccgatggagatggtgttaatggcggcgggcggctgtagcgcaattgacgtggtgtctatcctgcaaaaagggcgtcaaaacgtcactaactgcgaagtgaagctgacctccgaacgccgtgaagaggcgccgcgcctgttcactcatatcaatctgcactttatcgtcaccggtaaagagctgaaggatgcggcggtgtcccgtgcggtggatttatccgcggagaagtactgctcggtggcgttgatgctggaaaaggcggtcaacatcacccactcttacgaagtcatcgaagcctga

SEQ ID NO: 87818 - DNA, 870 bp, Enterobacter aerogenes
atgtctgccaaacatccagtgatcgcagtcacgggctccagcggcgcgggcaccaccaccaccagcctcgcgtttcgcaaaattttctcgcagctgaacctgcatgccgcggaggtcgaaggggatagcttccatcgctatactcgcccggaaatggacatggcgatccgcaaagcgcgcgatcagggcaaacacatcagctacttcggcccggaagccaacgacttcagcctacttgaacgcacctttttagagtacggcgaattcggcaagggccagtcgcgaaaatatctccatacctatgatgaagcggttccctggaatcaggttcccggcacctttaccccgtggcagccgctgcctgaaccgaccgacgtgctgttttatgaggggctgcacggcggcgtggtgacgccgcagcatgacgtggcgaaacatgtcgacctgctggtcggcgtggtgccgatcgtcaacctcgaatggattcagaagctcattcgcgataccagcgaacgaggccattcgcgcgaagcggtgatggactcagtggtgcgttcgatggaggactacatcaatttcatcaccccccagttctcacgtacccatatcaacttccagcgcgtgccgacggtggatacctcgaatccgtttgccgccaaaggtattccatcgctcgacgaaagcttcgtggtgattcacttccgcaatttgcaggggattgattatccctggctgttggcgatgctacaggggtcgtttatctcgcatatgaacaccctggtggtgccgggcggtaagatggggctggcgatggagctcattatggcgccgctggtcgagcgcttgatggaaggcaaaaccattagttaa

SEQ ID NO: 87819 - DNA, 219 bp, Enterobacter aerogenes
atgattattccctggcaggatctcgatcccgaaacgctggataatctgattgaaagctttgtgttgcgcgaaggcaccgattatggtgaacatgaacgttcgcttgccgataaagtcgccgatgtaaaacagcagcttaaaaccggggaggccgtactggtgtggtcagaactgcacgagacggtcaacatcatgccccgcaagatgtttaacggctaa

SEQ ID NO: 87820 - DNA, 1023 bp, Enterobacter aerogenes
atggttgaaataaccccgacagcagtgacgccccccgataacgattcgcgcgaattccatccgatgcgcggcgtgggcaatcgtcatctgcaaaccatgctgccgcggatcatccgccgcaagctccgatttacgccgcactggcagcgccttgagctgccggatggcgatttcgtcgatctggcctggagcgaagaccccgctggcgcgcgccacaaaccgcggctggtggtttttcacggtctggaaggcagcctgcatagcccttacgcccacggtttaattcacgccgccatgcagcgcggctggctcggggtggtgatgcattttcgcggctgcagcggcgagccgaatcgcaacagtcgtatttatcactctggcgaaacggaagacggcacctggttcctgcactggttgcggcgtgaattcggcgccgcgccgacggcggcggtaggctattcgcttggcggcaacatgctgggctgtctgctggcgaaagaaggcgacaatattccgctcgatgcggccgtcattgtctcggcgccctttatgctggaagcctgcagctaccatatggataaaggattttcgcgcgtctatcagcgttacctgctcaacctgctgaaagccaacgcctcgcgcaagctgaaagcctatccaggctcgctgccggtggatcttcgccagctcaaaagcatgcgccgcatccgcgaattcgacgacatgatcaccgccaaaatccacggtttcgccgatgcgctagactattaccgacagtgcagcgcgatgccgcgcttaagcgatatcaccaagccgacgctgatcattcacgcaaaagacgatccatttatggaccatcattcaataccgccgcaggaacagctgccggctaacgtcgaatatcagctcacggaacaaggcggccacgttggctttgtcggcggtacgctgcgaaaaccgcaaatgtggctggagcaacgtattccggattggttaacccgctggctgggaggacaagcatga

SEQ ID NO: 87821 - DNA, 156 bp, Enterobacter aerogenes
atgaatttcggaaagtctcccgggatacttaagcagaaagtcccgacgatgaattttctctcaccgccgggcggttactcattaaccttcctgcagcatccgctccagctgttcctgcgcgtccagccacgccatttcacactcttcgagccctga

SEQ ID NO: 87822 - DNA, 1905 bp, Enterobacter aerogenes
atgattgttttctcctcgttacaaattcgtcgcggcgtacgcgtcctgctggacaacgccaccgccaccatcaatcctggccagaaggtcggtctggtgggtaaaaacggctgcggtaaatctacgttgctttcgcttttgaaaaacgagataagcgccgacggcggctccatgaccttcccgagcaactggcagctggcgtgggttaatcaggaaacgccggccctgccgcagccggctattgattatgttattgatggcgatcgcgagttccgcaagctggaagccgatttacagcaggccaatgagcgcgacgacggccatgccatcgccaccgtccacggtaagctggatgcgattgacgcctggacgattcgttcccgcgccgccagcctgctgcacggccttggtttcagtaacgaacagctcgatcggccggtcagtgatttctccggcggctggcgtatgcgcttaaacctcgcgcaggcgctgatctgccgttccgatctgctgctgctcgacgaaccgaccaaccacctcgatcttgatgcggtgatctggctggaaaaatggctgaaaggctataccggtacgctgatcctgatttcccacgatcgtgatttcctcgatccgatcgtcgataaaattattcatatcgaacagcaaacgatgttcgaatacaccggtaactacagctcgtttgaaatccagcgcgcgacccgcctgtcgcagcagcaggccatgtatgaaagccagcagcagcgcgtagcccacttgcagagctatatcgaccgcttccgcgccaaggccaccaaagcgaagcaggcgcagagccgtatcaaaatgcttgagcgcatggagcttatcgccccggcgcacgtcgataacccgttccacttcagcttccgcgcgccggaaagcctgccgaacccgttactcaagatggaaaaagtcagcgccggctacggcgaacggattattctcgactccatcaagctgaacctggtgcccggttcgcgtatcggtctgctggggcgcaacggcgccggtaaatcaacgctgattaagctactggccggtgaattacagccgctgtccggtgaaattggcctggcgaaagggattaagctcggttacttcgcccagcatcagctcgaattcctgcgcgccgatgagtcgccgatacagcatctggcccgcctggcgccgcaggagctggaacaaaaactgcgcgactacctcggcggctttggattccagggggataaagtcagcgaagagacccgccgtttctccggcggtgaaaaagcgcgcctggtgctggcgttaatcgtctggcagcgccctaacctattgctgctcgatgaaccgaccaaccaccttgatcttgatatgcgtcaggccttaaccgaagcgctgatcgacttcgaaggggcgctggtcgtggtctcgcacgatcgtcacctgatccgctccaccactgacgatctgtacctcgtacacgacggtaaagttgaaccgtttgatggcgatctggaagattatcagcagtggctgagtgattcgcagaagcaggaaaaccagactgctgaagcgccgaaggataacggcaacagcgcgcaggcgcgtaaggatcaaaaacgtcgcgaagccgaactgcgcacgcaaacgcaaccgctgcgtaaagagatcgcccggctggaaaaagagatggataaactcaacgcgcagctggcgcaggcggaagagaaactgggcgacagcgagttatatgacgcctcgcgcaaagcggaattaaccgcgtgcctgcagcagcaggcgagcgccaaatcagggctcgaagagtgtgaaatggcgtggctggacgcgcaggaacagctggagcggatgctgcaggaaggttaa

SEQ ID NO: 87823 - DNA, 561 bp, Enterobacter aerogenes
atgtctcagacagcgaaagtgttgctgctgtatgcccacccagaatctcaggattccgtggccaaccgggtgttgcttgaaccggctttacagttgccgaatgtcaccgtgcacgatctttatgcgcactatccagatttttttattgatatcgcccatgagcaggatctcctgcgtcagcatcaggtgattgttttccaacatccgctgtatacgtggagctgcccggcattgttgaaagagtggttagaccgggtgctgagccgcggcttcgccagcggcgcgggaggaaatcaactggcgggaaagtactggcgtagcgtgatcaccaccggcgagccggagagcgcttaccgccgcgatgctaatcgctatccgatgaatgatattctgcgcccttttgagttaacggccggcatgtgccgcatgcactggctgagtccgattattgtttactgggcgcgccgacagcggccggaagatttgcaaagccacgcccgcgcatatcgcgattggctcgcgaatcctgttgctacaggaggcgtcaatggcgggagctga

SEQ ID NO: 87824 - DNA, 1806 bp, Enterobacter aerogenes
atggcgggagctgatttgctattagcaggggtactgtttttgtttgccgccgtggtggcggtaccgctggcggcccggctgggcattggcgccgtgctaggctacctgctggccgggattgcaattggcccgtgggggcttggctttattagcgatgtggatgaaattctccatttttccgagctgggcgttgtattcctgatgttcatcatcggccttgagcttaatccggccaaactgtggcaactgcgcaactcgatattcggcgtcggcgcggcgcaggtgctgtttagcgcggcgatcctcggcggattgctggtggtcaccgggttttcgtggcaggcggccgtggtgggcggtattgggttagcaatgtcctctaccgcgatggcgctgcagctgatgcgcgagaagggaatgagccgtaatgaatccggccagctgggcttttcagttctgttatttcaggatttagcggtgatcccggcgctggcgctggtcccgctgctcgccggacacggcgacgataacttcaactggatgtcggtggggatgaaggtgctggcattcgccggcatgctgattggcggccgttttctgctgcgcccggtattccgttttatcgccggttccggcgtgcgtgaggtatttaccgccgccacgctgctgctggtgctgggttccgcgctgtttatggacgccctggggctgtcaatggcgctggggacgtttatcgccggcgtgctgctggcggaaagcgaatatcgccacgagctggaaatcgctattgagccgtttaaaggcttgctgctggggctgttttttatctccgtcggcatggcgctgaatcttggcgtgctatatacccatctgttgtgggtcgcgctgagcgttgccgcgctggtggcggttaaagcgttggtgctgtatgtattggcccggctatatggtttgcgcagctccgagcgcacgcagttcgccggagtattgagccagggcggcgagttcgcctttgttctcttttccatgccggcttcgcagaagctgttccataacgatcaaatggcgctgctgctggttaccgtaaccttatcgatgatgaccacgccgctcctgatgaaggtcattgataaagtgctgtcgcgacggcttaacccggcggaggataccgatgaggcgccatgggtcgaggatgataagccacaggtgattatcgttggcttcgggcgttttggtcaggtgattgggcgcctgctgatggccaataaaatgcgtattaccgtgcttgaacgcgatatcagcgcggtcaacctgatgcgcaaatatggctacaaagtctatttcggcgatgcgacgcagcttgagctgctgcgttcggcgggggcggaagaggcgcagtctattgtgattacctgcaacgagccggaagataccatgaagctggtggagatgtgccaacagcattttccccacctccatattctggcgcgtgcgcgggggcgcgtagaggcgcatgagctattacaggcgggcgtgacgcaattctcgcgagaaaccttctccagcgccctggaattggggcgcaaggcgctggtgaccctgggaatgcatccgcatcaggcgcagcgcgcgcagttgcactttcgacgcctcgatatgcgaatgctgcgcgagttaatgccagtgcatactgataccgtacagatatcccgcgtgcgggaggcccggcgggagctggaagagatttttgagcgtgaaatgcagaaagaaagccggcagctggacggctgggacgagtttgaatag

SEQ ID NO: 87825 - DNA, 201 bp, Enterobacter aerogenes
atggcggtacgtaaacgttttattgccggcgcaaaatgcccggcgtgccaggcgcaggattcactggcgatgtggcgcgagaataatgtcgatattgttgagtgcgttaagtgcggacatcagatgcgcgaggccgataaagaggtccgcgagcacgttcgtaaagaagagcaagtgatcggcatttttcatccggactag

SEQ ID NO: 87826 - DNA, 591 bp, Enterobacter aerogenes
atgaaagtagcaaaagacctggtggtcagcctggcctatcaggtacgtacagaagacggtgtgttggttgatgagtctccggtgagtgcgccgctggactacctgcatggtcacggttccctgatttccggcctggaaaacgcattaaacggccacgaagtgggcgacaaatttgatgtcgaagtcggcgcgaatgacgcgtacggccagtatgacgaaaacctggttcagcgcgttcctaaagacgttttcatgggcgttgacgaactgcaggttggcatgcgcttcctggctgaaaccgaccagggtccggtaccggtagaaatcaccgaagtcggcgacgatttcgtggtggttgacggcaaccacatgctggctggccagaatctgaagttcaacgtagaagttgtcgccctgcgcgaagccactgcagaagagctggagcacggtcacgtacacggcgctcatggccacgatcacgatcatgaccacggtcatgacggttgctgcggcggccacggccacgatcatggtcacgaccatgaacatggcaaaggtggttgcggtaacggtggttgcggttgccactaa

SEQ ID NO: 87827 - DNA, 219 bp, Enterobacter aerogenes
atgaacgatagcacaatggagacgcgtctggcggaactggaaagccgactggcgtttcaggagatcaccatcgaggacctcaacaaaaccgtcacggcgcatgaaatagaaatggccaaaatgcgcgaacatatgcgcttgatgatcgaaaaaatgaaagcgacacagccgtcgcacatcgcgtcacagtctgaagagacgccgcctccgcattattga

SEQ ID NO: 87828 - DNA, 819 bp, Enterobacter aerogenes
atgaaatcactgtttaaagtaacgctgctggcgaccacgatggccgttgccctgaatgcaccgctgacctttgctgccgataccgcagcgaaagctgcaccggcggcggacagcaaatcggcatttaaaaatgacgatcaaaaatccgcttatgcgctgggggcatccctcggccgttacatggaaaactccctgaaagaacaagagaagctgggtatcaaactggataaagaccagctgatcgccggtgtgcaggatgcgtttgccgataagagcaaactgtccgacaaagaaattgaaaccactctgcagtcctttgagacccgcgtgaaaaccgccgctcagcagaagatggaaaaagatgcgaccgagaacgatgccaaaggcaaagcgttccgtgacgccttcgctaaagagaagggcgtgaaaacctctaaatccggcctgatgtataaagtcgagaaagccggtactggcgatgcgccgaaagacagcgataccgtcgtggtgaactacaaaggtacgctgatcgacggtaaagagttcgataactcttacacccgcggcgagccgctctctttccgtcttgatggcgttattcctggctggaccgaaggcctgaaaaacatcaaaaaaggcggcaaaatcaagctggttatcccaccagatctggcctacggcaaaactggcgttccgggtatcccggctaactctacgctggtattcgatgtagaactgctggacatcaaaccggctccgaaggctgatgctaagccagaagccgctgccgaagcaccggctgcagacgctaagaagtaa

SEQ ID NO: 87829 - DNA, 723 bp, Enterobacter aerogenes
atgtccaggtcgcttttaaccaacgaaaccagcgagcttgacctgctggatcaacgtcctttcgaccagaccgacttcgatatcctaaaatcctatgaagcggtggtggacgggttagcgatgctcattggttcccactgtgaaatcgtgctgcactcactgcaggatttaaaatgctccgctattcgtatcgctaacggtgaacacaccggccgccaaattggctcgccgattaccgatctggcgttacgtatgctgcacgatatgacgggagcggatagcagcgtatcgaagtgctattttacccgcgcgaaaagcggtgtgctgatgaaatcggtgactatcgccattcgcaaccgggaacatcgggtgattggtctgctttgtatcaatatgaaccttgatgttccgttctcgcagattatgagcactttcattccgccggagacgccggaagtcaattcgcaggtcaacttcgcctcgtctgtggatgatctggtggcgcaaacgctggagttcaccattgaagaggtgaatgccgatcgcaacgtatcgaataacgcgaaaaaccgccaaatcgtgctgaatctatacgagaaaggcatcttcgatatcaaagatgcgattaaccaggtagccgatcgcctgaatatctctaaacacacggtgtacctctacatccgccagtttaaaagcggtgatttccaggggctggataagtaa

SEQ ID NO: 87830 - DNA, 387 bp, Enterobacter aerogenes
atgcgttttgccatcaccgtaaccgggcctgcctacggtactcagcaggccagtagcgcgtggcagtttgcgcaggcggttattaacgcaggacatgaactggcctgcgtatttttctatcgtgaaggagtctacaacgccaatcagctgacggcccccgccagcgatgaggtagacctggtgcgtcactggcagcgcctgcatgatgaacatgccgttgcgctgcacatttgcgtggcagccgcgctacgccgcggcgtgaccgatgaacgcgaagcgcagcagcttggtttgccggcgcataatctgcagccgggcttcaccttaagcgggttaggcgcgctggctgaagcgtcgttaacctgcgatagaatggtgcagttctga

SEQ ID NO: 87831 - DNA, 360 bp, Enterobacter aerogenes
atgaaacgcgtggctttcgtattttcttccgcgccgcacggcagcgcagccggtagggaagggctggacgccttactggcgacctcggccctcaccgacgacctcggcgttttttttgtcggtgacggcgtgtttcagattatccctggccagcagccgggaaaaatcctcgcccgtgattatatcgccaccttcaagctgttatcgctgtatgacatcgaacagtgttggttatgcgcggcgtctgcccgcgagcgcggcctggccgccgatacgccgtgggtggtggatgtcgaaagcctcgagccagaagcgctgcgcgcccggcttgatgagttcaacgtgattctacgattctga

SEQ ID NO: 87832 - DNA, 288 bp, Enterobacter aerogenes
atgctccatactctaagcgtctctccctggcatgtcgatatcgacgcgatgctgcgtctggtgaagccaggcgacgatctgctcctgctctccgatggcgtggtcgcggcgattgacggcggccgtttccttgaaatcctgcaatccgcccccataaccctacatgctctgcaagacgatatcgaagcccgcgggctggctggtcaaattgcggacagtgtcgtcagggttggctatactgatttcgtcagtcttacggtcaaacatgaaggtcagttggcctggtaa

SEQ ID NO: 87833 - DNA, 375 bp, Enterobacter aerogenes
atggcaacagttaaccagctggtacgcaaaccacgcgcgcgcaaagttgcaaagagcaacgtgccggcgctggaagcctgcccgcagaaacgtggcgtatgtactcgcgtatataccaccactcctaagaaaccgaactccgcactgcgtaaagtttgccgtgtgcgtctgactaacggtttcgaagtcacctcctacatcggtggtgaaggtcacaacctgcaggagcactccgtgatcctgatccgtggcggtcgtgttaaagaccttccgggtgttcgttaccacaccgttcgtggtgcgcttgactgctccggcgttaaagaccgtaagcaggctcgctccaagtacggcgtgaagcgtcctaaggcttaa

SEQ ID NO: 87834 - DNA, 471 bp, Enterobacter aerogenes
atgccacgtcgtcgcgtcattggtcagcgtaaaattctgccggatccgaagttcggatcagaactgctggctaaatttgtaaatatcctgatggtagatggtaaaaaatctactgcagaaactatcgtatacagcgcgctggagaccctggctcagcgctctggtaaaactgaactggaagccttcgaagttgcgctcgaaaacgtgcgcccgactgtcgaagttaagtcccgccgcgtaggtggttctacttatcaggttccagttgaagtacgtccggttcgtcgtaatgccctggcaatgcgttggatcgttgaagctgctcgtaaacgcggtgataaatccatggctctgcgcctggcgaacgaactcactgacgctgcagacaacaaaggtactgcagttaagaaacgtgaagacgttcaccgtatggccgaagccaacaaggcgttcgcacactaccgttggtaa

SEQ ID NO: 87835 - DNA, 2115 bp, Enterobacter aerogenes
atggctcgtacaacacccatcgcacgctaccgtaacatcggtatcagtgcgcacatcgacgccggtaaaaccactactaccgaacgtattctgttctacaccggtgtaaaccacaaaatcggtgaagttcatgacggcgccgctaccatggactggatggagcaggagcaggaacgtggtatcaccatcacttccgctgcgactactgcattctggtctggtatggctaaacagtatgaaccgcaccgtgtaaacatcatcgacaccccggggcacgttgacttcactatcgaagtagaacgttccatgcgtgttcttgatggtgcggtaatggtttactgcgcagttggtggtgttcagccgcagtctgaaaccgtatggcgtcaggcaaacaaatataaagttccacgcattgcgttcgttaacaaaatggaccgcatgggtgcgaacttcctgaaagttgttggtcagatcaaaacccgtctgggcgcgaacccggttccgctgcagctggcaattggtgctgaagaaggtttcaccggtgttgttgacctggtgaaaatgaaagccatcaactggaacgaagctgatgcaggcgttaccttcgaatacgaagatatcccggctgacatgcaggaactggctgacgaatggcaccagaacctgatcgagtccgctgcggaagcttccgaagagctgatggaaaaatacctgggtggcgaagaactgactgaagaagagatcaaaaaagctctgcgtcagcgcgttctgaacaacgaaatcatcctggtaacctgtggttctgcgttcaagaacaaaggtgttcaggcgatgctggatgcggtaattgattacctgccatccccgatcgatgttccggcaatcaacggcatcctggacgacggtaaagataccccggctgagcgtcacgcaagcgacgaagagccgttctctgcactggcgttcaaaatcgctaccgacccgttcgttggtaacctgaccttcttccgtgtgtactccggtgtggttaactctggtgataccgtactgaactccgtgaaagctgcacgtgagcgtttcggtcgtatcgttcagatgcacgctaacaaacgtgaagagatcaaagaagttcgcgcgggcgatatcgctgccgctatcggtctgaaagacgtaaccactggtgacaccctgtgtgacccggatgcgccgatcattctggagcgtatggaattccctgagccggtaatctccatcgccgttgagccgaaaaccaaagctgaccaggaaaaaatgggtctggctctgggtcgtctggctaaagaagacccgtcattccgcgtatggactgacgaagagtctaaccagaccatcatcgccggtatgggtgaactgcacctcgacatcatcgttgaccgtatgaagcgtgaattcaacgttgaagcgaacgtcggtaaacctcaggttgcttaccgcgaagcgattcgccagaaagttaccgatgttgaaggtaaacacgccaagcagtctggtggtcgtggtcagtacggtcacgttgtgatcgacatgtacccgctggagccgggctctaacccgaaaggttacgagttcatcaacgacattaaaggtggtgtaatccctggcgaatacatcccggccgttgataaaggcatccaggaacagctgaaagctggtccgctggctggctacccggtagttgatatgggtatccgtctgcacttcggttcttaccacgacgttgactcctctgagctggcgtttaaactggccgcttctatcgcctttaaagaaggctttaagaaagcgaaaccagttctgcttgagccgatcatgaaggttgaagtagaaactccggaagagaacaccggtgacgtaatcggtgacttgagccgtcgtcgcggcatgctgcgcggtcaagaatctgaagtaactggcgttaagatccacgctgaagttccgctgtctgaaatgttcggatatgcaactcagctgcgttctctgaccaaaggtcgtgcatcatacaccatggaattcctgaagtatgatgatgcgccgaacaacgttgctcaggccgttattgaagcccgtggtaaataa

SEQ ID NO: 87836 - DNA, 1419 bp, Enterobacter aerogenes
atgaatcggtatcaatttccggaaggttttttttggggggctgcagcatcaggcccgcagacagaaggcttcgcgaataagccgcaccgttctatctgggatagctggtatgcagaacaacccaaccgctttttccagcagattggtccgcagaaagtatgtgaaacctacagcaagtataaagaggacgttgcgctaatgaagcaaacgggatttaactcgtttcgtacttccattcagtggtcacggctgattgatgattttgaaaccggtaccccaaacgcagaagctgtccggttttacaacaactacttcgatgagatgatcgccagcggcattgaaccaatgattaatctttatcatttcgacatgccggaaatattgcaaaagcagtatggcggttttgaatcaccccatgtgacggatcttttcgcaaggtttgcccgcactgcatttgagctatttggtcataaggtcaaatactggatcacctttaatgagccgatagtacctgtcgaaggcggctatctttatgatttccattatccttgcaaaaaagatggcaagctggcggcgcaggttgcatttaacattatgctggcgcatgcaaaagcggtgcacctgtaccggaaacttgagctaccgggcgaaataggcgtggtgcttaatctgactccctcgtatacccgaaacaatagcgacgaggataaaaaagcagcgtggtatgccgacctgttctttaatcgcagtttccttgaaccgctggttaagcatgaattcccgaaggagttatgtgaagtcctcgcaacccatgattgcttgccagaaataaaaaaagcggatgtcgatctgataacgagttcgcgggtagatttcctgggggttaactactatgttccacgtcgggttaaagcgcgcgaatgtccctatgaacttgattacttcacgccagagtattacttcgagaactacagcgatcccgaagggcgcttcaatccgtatcgcgataataacgagatttttccgcaggcgatttacgatatagccagcaacatccgcgataattacgacaatatgaagtggtatctggctgaaatcggtatcgccatggatatccagtcagaaggtcctgttctggctgatggggttattgatgacactttccgtatcgaattaatggaagaacacctcgaacagctccatcgcgccatcagcgagggggcgaactgctttggcgtacaccagtggacatttattgataactggtcgtggattaatagctttaaacgccgttacggtttctggcgactggatctggaaagcggggagcgacagataaagcgcaacgctctttggtttgcagagttggctgcctctaatggatttacgcccggagcgtttataaagggcaacaagtaa

SEQ ID NO: 87837 - DNA, 2196 bp, Enterobacter aerogenes
atggctttcccgattcgaaaacttctgctcgtctccttactgtccgcgctgggaagcgcgggggcgctggcggcggaacaatcccattttgaacattttattactcgtgatggtgctgcgttaaaagacggcgatcggctctttcgctttgccgggatccatgccccggagctgcatcgtatagaggatgacgcgagaggaacctgcaaagcggatccgcgcgggtgggggcaatatttcaaatggcctactgctgaagagcaagaaaactggattaaagccctggtgcaaacgggtgctaaagcacagcgcgtgtatgtgctatccgttcagcaggaaaacgacgcggcctgcggacgtgaaacgcatatcctgtcgccggaaacgcctgacggcatgccgcggctgaatgaagcggcaatgaaagtttatgacaacatgattgctgaagcagataagcaggggcttcgcctgattctaccgtttatcgatcactggtggtggtggggtgggagagaacagcttgcctcattttatcatgaaaaacctgaggatttttatcggacggacagtaaaaccttccaggcttatcttgacgtgattcgtcaggttataacccggacgaacaccattacgggacgccactactacgatgaaaaggcgattatggcgtgggaaacgggtaatgagctggaggacactaacgccgattttcttcatcagacatctgcctggatccgtaaatgggcaccccatcagcttgtcgtagatgggacttataaaaaggtgaatgatttcgcgctcagcgatccgaacgtcgacatcatcagcaatcactattacaccaatgccaataacaaccaccccgggcaggttcgtaaagatctggaggcgattggtggcaaaaaagtctatctggttggcgaatttggtctcctcgaccaaaaagaccttaacgctatcatgcagtctattgtgcatactgaggtcaatggcgtgcaggccgcgggcggctttatctggggttttcgcggtcatcggcatgatggcggtttttactggcacaaagagtataccggacactatagctaccatctgcctggcttcccggatgaggggaaagcgaatcaggagatggaggttgtcaacctggtacggactgccgccgcacaaatggctggtctgagcaaggtgccagatttgccggtaccagaagcaccgaggttacgcgagagcgattccccctttgccattaactggatggggtcacccgttggtcgttattacgacgtggaaagagctgtgcagccacagggcccatggacacgcgtcggaaaggacatttccgacggcaaaaatgaatgggatccatcgaaaatgagtcttttccgcgataattatcgcagcctgacgctcggccagacttactactatcgggtaatcgctaagaatgatagtggtcagtcagcaccttcaaacgtgattcgcctgaaacatatgcagaaaaaccttccaccggttattaccctgcaggacatgctttctaccactgtcgataaaggcgttcaactcaatgctgcctggcaggatgacaatctacctggcccgaaagtcagcgtagcgtggagccatgacggtaagaataacgttcacttctgtaacagcagtaaagaggaaacccgagtctggttctccgcgccgggcgactatgcgttgacctttactgctgatgacgggttgctggaaagcagtaaaacgataaatgtcagcgtgaagcccgctgtgaggcctgtaccggcagattattgcagctttggcagcgggactatggatgttagcaagggaacacttaactccattaaaagtgaaaaagatacgttagccatcggagaagacggtttcctcgggcctttcgcgcatgacggagacagcgtgagctggcaggttagcgctccctgggacggtaaatttaccctacacgtgaaatttaacggcaaatggggaagcaagaaaaactcgttcatcgtgaacgacggaacgccagtcagcattgaatttccgcaaacggatgagaagggcaagaccatagtcgttcctgtttcgctcaaagaggggggtaataccatcagttttggaaagtttaccggcgactggggatatatgttcatcaaatcaattgaagttactgcagagtaa

SEQ ID NO: 87838 - DNA, 1338 bp, Enterobacter aerogenes
atgcaaacgttatttaaatcaatacctctgtccttgattaccctcactgtcatcagcggctatgccagcgcagatgagaaatatgattttgcactccacggctatttgcgctcagggatcctcgccaacagtgacggaaaccgggtggattcagtgggactgatgcccgacgggaaatggcgtctggggaacgaagaagataccaagattgagcttatcccgacagtaacgctgaaatcggatactggcgcagttgctcgtgttcaggccaacctgacgcatcaaacaaaatgtaccgcagactggaactgtaccgacgatgacggtaaagaaacccagttccgcgaaggttttgctgagttatcaaatctcgattttgcgccggatatgactttctgggcgggtaaacgttacagcagctccaatctttccagtcaccagttcgactgggagtatattcagtacaacggaaccgggggcgggtttgataacctggatttaggcttcgcgcgctttgacgccggcgtttatgcgttttcaacaacggatgaagccaaagcctatcccgtggctctgggggatcagggataccctgacgattactcgcttaacctctggtttaaaaaaatcggcggcaccgggctggatgttgagcttattggccaccatatgaaccgcaacgaaaaccatcccacttctgctgaaaaaggttatggcgtgacggcgctgtataacgtcgacagtttttatgggctgacaggtggctattcccgcattgttttccagtacggcaaagggctcgctgccgctgactcgctgggtaaaaacggctggggttgggcaaacctggaagacacccagtcctggcgcgtgattctggatggcatggccagtctgggcgaagtggacgtatcgacctttgcgttttatcagaaagataaaaactaccgctggtggaccagcgatgatgacggctggggacgctccatgtgggtggcgggtatccggccgtatcatcagataacgaagaatttcgccatgcaatatgaagtgggttacgaatatctggatgataaaaactacatgggggtaaacggcaaaggaaaggggggcctgaccaaggtgaccattgcgccaacgctcaccttcgattctggattctggagccgtccacagctgcgcttctttgccacgtatgccaaatgggataaaggcgtctcggatgcgatagacagaaattacgactggagcaccggtacccttagcccggggggatactctcgcagcggggataccgatacgctgaattttggtgtacaggctgaagtctggttctga

SEQ ID NO: 87839 - DNA, 312 bp, Enterobacter aerogenes
atgaaaaaaatcatgttgtgttgttctgccgggatgtctaccagcctgctggtaaaaaaaatggtcgatgaagcgcacaggcgtggcctggaagcggaaatcaaggcgtatggcgttgccgaatttgccgagcaggttggtcactaccaggtggtattgcttggaccacaggtgaagtacatgcaaagcgatctacagaaacaagccgataaatacgggatccgcgttgagccaatcaacatgatggattacggcatgcaaaaagggggcgccgttctcgatttcgccctctccctgatagataacaaataa

SEQ ID NO: 87840 - DNA, 1323 bp, Enterobacter aerogenes
atgagctctctgtacgcaaaactaattcaggttatcgaaaagaaaattactccgatggcgggcgccgtcggccagcaaaaatatgtcacctccattcgtgacggcttcattaccgctctgccgttcatgattgtgggttcttttatgctggtatttatcttcccccccttctcgcccgacacatcctggggcttcgccagggcatggctgcaattctcgctcgatcaccgtgaagctctcatgctgccctttaacttcagcatgggaattatgacgatctttatttccgtcgggattgccgcaagtctggccaaacaccacgatctcgacgcacttaccgccgggatgctctctttaatggcctttttgcttgtcgctgcgccattgaaggacgggcagatttcaacggcctacttctccggtcaagggatctttaccgccattctggtggctatttactccacggaactttacgccttcctgaagcgacataatattaccatccgcctgccgccggaggtcccaactggcgtagcgcgctcgtttgagatcctcatcccggtactggcaatcgtcatcacgctgcatccgctgaacctgcttattgaagcgcaactggggatgattattcccgaagcgattatgtcgctggtgaaaccgctggttgccgcgtccgatacgctccccgcagtgctcctctcggtgctggtgtgccaggtgctctggtttgccggtatccatggtgcgctgatcgtcaccggtattatgaaccctttttggatggcaaacctgtccgtaaaccaggcggcaatcgccgcgggtgaagctatcccgcatatttacgttcagggtttctgggaccattacctgctaattggtggtgttggctcgacgctgccgctggccttccttttgctgcgcagcaaagccatccatttgcggactattgggcgaatgggcgtggtaccaggggtgtttaacattaacgaacccattctgtttggtgcgcccatcattatgaatcctctgtttttcctgccgtttgtgctggtcccgatggtcaatgccaccttcgcatggtttgcactggatcttgatttagtcagccgtgtggtatcgatgacgccatggacaacacctgcacccattggcgcatcatgggcagccaactggagcttcagccctgtgatcctgtgcctgatatgcatggtgacatctgccgtcatgtacttccccttcctgaaggcctacgaaaaacagcttctggaacaagagcatgaaaacgcggttgaacatgcagaagatgcggctcaatccgcctga

SEQ ID NO: 87841 - DNA, 315 bp, Enterobacter aerogenes
atggaattagaagaacaagttatgggcatcatcattaacgcgggtcagtcgcgcagcctttgttatgaagccctcggctgcgcaaagcaaggtgattttgaagccgcagatcaactaatgaaagaggcgactcattttgcccgcgaagctcaccttgttcaaacccagctcattgaagttgatgaaggcgaagggaaaaccaaaatgacgctggtgatggtgcatgcgcaggaccacctgatgacctccattctggccagggagctggtgaccgaacttattcacatttaccgcacacgcccgcaccaggcataa

SEQ ID NO: 87842 - DNA, 906 bp, Enterobacter aerogenes
atgcattatcttggactggatatcggtggcacaaaaatggaagctgtattgctttcagctcaaggcgattatctctggcgtaagcgccagccgactcagaaagaaagttacgctgaatttatgctgcatctggtgagccttattgatgatgcccgcgcggctagcccggaacccttcaccgtaggggtcggtctgcctggcgcaattgacccgcaaacggggctcatcaaaaattgcaattgcctggttcttaatggtcacgatctgaaagccgatcttgccgcacgtatccggcagccagtgtggattgccaatgacgctgattgttttactctctctgaagcggtagatggcgcaggtgcaaaggctgacaccgtatttggtgtgattatcggtacggggtgtggcggtgggatcgccgtgcgccggcatttgttacaaggcccaaacgccattgccggcgaatgggggcacaacccgcttccggggtacgcaccagcgattgatggccccgctcagccctgctactgtggcaagcataactgtattgaatcctttatttccggtaccggtttttcccgtcgtttcccgggaaacctgacctctcaggaaattatcaacgccgcagaacagggagatccgaaggcgcgcgaacactggcggcattttattgatgcatttgcccgtagcctggcgtcagtcatcaatattctggatccccaggtcattgtgttaggaggaggattgtcgaatgtcagcagaatctacgatgatctgcctgtcgctattatttcttatctcttttctgaaacctgctatacgcgcattgttccggcgcgctttggcgacgccagcggcgtacgtggcgcagcctggcttccccggctgaacgcgaacgaaacataa

SEQ ID NO: 87843 - DNA, 990 bp, Enterobacter aerogenes
atgatgaaaactcaccacgcagaaaacgctatgccaacgattgatgatgtatctcgattagccaatgtttccagagcaacggtttcccgcgtgctgacggggaccaggggtgttcgcgaagagagccgtgaggcggtattacgggctgtagaagaactcaactaccgcccaagcttcgccgcgcaaaacctggcgagtcagtcatcaagccatatcggtgtggtgctttcctcacgtgaggaaagcagtggcgcacgtattcttcccgcgcttgcgcgcgcaatgaaagtgctgaacaaaacgctgatcgtccagtatgtggataatgacgtcgaacatgcagcttcggtagatgatttacaacgacaatgcgccgccgttgtagtgttcggaccagttgtaccgggcagtggcgataacgtgatttctttcgaccgacccgtggtggacgcgaaaagtcagggctacgatttcgcctttgctacggagagcgcctgccgctacatgataggtaaaggccatcgcaacatcgcgctggttattgataacgagacggatgacgcaagcaagcgaatggttgaaggttatcgcaatgtgttgcagaactactcatttccgtttaatcgccagttggtattaacagccaatgagagtgtcgaacgcgcgctgttgacgcttattaatagtctgagcaagttctcttccatcgtagttaagcgtgatgcttacgctgcggaggccatgcgcctgttccgcgaatttaatattgccgtgcctcaggaggtatccctcctcagtcttgaggattcaccgttggccacgcagttatatccgcaactgacctgtatttcatggccaatggaacccctcctgcaccagtgcgtacagcgcattaaaagcatcgttgagggtcgtccgcttcgcgaaacggaactgccaccgataattggtaagcttacgcctcgccagtcggtgctggaaatgagttaa

SEQ ID NO: 87844 - DNA, 210 bp, Enterobacter aerogenes
atgaatgcagtccagcttttgtgttctctggcattgattttggtcgcatcctttcgcatttttgcgcaggaaccagggctcccgctgaaggaacaggtcaatacagatgaaggtacaatctgcgtttatgaacgcggggaacaccgtgaaaaaatcgttattcctgttggtcaggcgtgcccgaaaacctcagctaacaataatgaatga

SEQ ID NO: 87845 - DNA, 1038 bp, Enterobacter aerogenes
atgaagtatgtgaatctgggtcgtagcggtttgcaagtctcccgtctttgtctcggttgtatgagttatggtgaacctgaacgcttgcctcaaccctggtccctggatgagaaggcgtcacgtccgctcattcgccaggcgcttgaagcgggcattaatttttttgataccgcgaatatttactcgggcggaagttctgaagagatcactggaaaagcgctgagagaaatggccagacgcgatgagatcgttgtggcgacaaagaccttctttccgtggcgcaactcacccaataccgggtttctttcccgcaaggccatttttcagtctattgacgacagcctgatgcgcttaggtatggattatgtggatctctttcagattcaccgctttgaccactcaacgcctgttgaagagaccatggaggctctgcatgacctcgttaaatcaggaaaagtacgttacatcggcgcatcatctatggaagcctggcgctttgcaaaaatgcagcatactgcagagcgtaacggctggacccgatttattacgatgcaaccgcaatacaacctgctttaccgggaagaagagcgcgagatgttgcccctgtgtgaagaccagggcgttggtgtgatcccctggagtccgatggcgaggggcaggctcacgcgagactggagtgtcacgtcccgacgaacgcaaaacgatgcctttgcgttaaaaatgtatgagaacgcagccctgctggataagcccgttattgatgttgttgccagcattgctgaaaagcacgatgtgccaagagcccatgttgcaattgcctggttgctatcaaaaacggtcatcacagcaccgatcatcggcgcgacgaaaccagaacatctttccacggctatcagcgcgctggacttttcacttagcgatgccgaaatcatggaactcgaggcacactatctgccgcaccccgtcgacgggatcatccccccacttccggatacgccaccttcactcacgccgccttcagcaatacaggactgttaa

SEQ ID NO: 87846 - DNA, 1182 bp, Enterobacter aerogenes
atgagcaagatgatgcatgaccagcattctgcttctgtacccgcttcccgggaacgtcgcaattttctgatcgccggcgccggtctggcgttggccgctaccacccttggcaggagcggagcagtgatggctaaaccggctggtcaggacacgtcgaacgacccttcggatgctgttcccgtccagaaggagaccttaaccacgcgtaaactcggctcgctggaggtttcaagcatggggctggggtgtctgcccatggtggggtattacggcggtggtccgcgcgatcgtaaagccatggtttcgctcatccgggcagccttcgaacaaggcatcacgttctttgatactgccgaggtgtatggcccccatctcagtgaagaatttgtcggggaagcactggcccccgttcgcgatcgtgtggtgattgccactaagttcggtttcggcgtggaagaggggaagcctacctccctaaacagccatcctgaccatgttcgccgcgccgtagagggctcgctaaagcgtctgaaaacggaccacatcgatcttctttatcagcatcgccccgatccgaatgtgccgattgaggatgtggcagaaaccgtgaaggcgttgatccaggagggtaaagtgaaacactggggattgtcggaagcgagtgccaggacaatccgccgcgcacatgcggtactccctgtggctgcagtgcagagtgagtatgccatgtggtggcgtgaaccggagacacggatatttccaacgctcgaagagctgggtatcggtttcgtaccttactgcccgaccgcccgcagcttccttgccggagcagtcaatccaagccagcggttcgacagcaccgatcggcggcataacctgccacgcttccagcccgatgcactggccaaaaacatggtactgcttgaattcgcgcaatcgtgggcccgccgcaaaaacaccactccggttcagttcgcactggcctgggtgatggcacagcggccatggatagtccccataccgggtacgacgcaatatccgcacctaatagaaaacagtggtgcaccgcaagtccggttgacggacagcgagctacgcgaaatcgatgcagcgcttgccaggatcccattgcagggcggtcgcgcagatccgtttaccgaaagtcagtttgataaaagttaa

SEQ ID NO: 87847 - DNA, 987 bp, Enterobacter aerogenes
atgaactatacgcatcttggccgcaccggcctgagagtcagccgcctttgtctcggaaccatgaattttggtgacgtcaccgacgagaaaaccagtgcccgcattctggatgaagcgcttgaggcaggtataaatttcattgatacagcagatgtgtatggcactgaacaatcacccgatatccagcaaggttcggggctgtctgaagaaattattggtcgctggctccagcagggtggccgccgtgaccgtatcgttctggcgacgaaagcctatcagccaatggggccaggtccgaacgatcggcgtctttctgcttaccatattcgcaaagcctgtgaggacagtttgcgacggcttaagaccgaccatattgacgtctatcagatgcatcacatcgatcgctgtacgccatgggaggagatctggcaggccatggaactccttgttcagcagggaaaagtcctttatatcggtagcagcaatttcgcgggctgggacattgcgactgcacagtcagttgccacggcccgtcattccctgggcctggttgctgagcaaagtctctacaatctgactgcccgaactattgagctggaggtcattcccgcatgccgtcattttgggctgggactgattccctggagcccacttgccggagggttgcttggcggtgtactgaaaaagatggcaagcgggcgccgtgccaggcccgagttttcccgtcttatcgaacagtatcgtccgcagctggaagcctacgaaggattatgtgaggacctcggtgaaacaccttccgatgtggcgcttgcgtggctcctgcagaatcctgtcgttactgctccacttatcgggccacgtacggtcgaacaactccgggaggcgcttcacgccacgacaatcacgctatcagacgacaccatgagctgcctcgacgaaatctggcccggacccgggggagaagcgccccaggcttatgcctggtaa

SEQ ID NO: 87848 - DNA, 909 bp, Enterobacter aerogenes
atgcaaataagcagagctgatgtcgccgatctcatttatttcatggctattgcacgtcatcgcagtttcagccgtgcggcgattgaattaggtgtcagtgcatcagcgcttagtcatgctctgaagggactggaaacccggctcggggttcgcctgcttaatcgtacgaccaagagcgttacccctacggctgcaggtgaagaactggttcagtctgtccttcagcctttcgacaagatagaaggcgcgcttgaatcgcttaaccggtatcgtaatacccctaccggacgtatccgcatcaatgctgccgttgaagcggccaatcttttgcttgcgccagttatgcccgcgtttatggatcgctatcccgatattgaaatcgatattgtggccagcaaccgtatggttgacgttactgatgcgggcttcgatgccggtatccgctatggtggcaccgtcccggaagacatggttgcccggcgtttatctgccgatattcgctgggttatcgcagcatcccccgactatcttgaacgctacggaacgcctgaacatcctgatgatttattacaccatcgctgtataagcaatcgtctcggcgacgatcggatttatcgctgggaacttgagcgagacggcgaaacgtaccaaatcagtgtgcctggctctgtgacggtcaatcaggctgaaacgggtcttgtggccgtattaggcggggctggcctgatgtattttccggagcctcttgttgcaccctatgtgaaggatggactgctccgcctggtgcttacggaatggtccccgctggaggaaggtttttatatctattattcaagccgccggcaactgccgaccgggcttcgccttctgattgagttcatacaggaggccaggccgctggggttgtga

SEQ ID NO: 87849 - DNA, 900 bp, Enterobacter aerogenes
atgaataacgccctgtataaccagatacggatctttcagagcattgcacgtgagggcaatatttcggcagccgcaagaaaactggaaattacgcctccctccgtcagcaatgcgcttaagctgctggaagatcatattggccatccgctttttgtgcgtacgacccgccgtattgagctgacggaaaccgggcagctgttgctggaacagaccgctgcggcggtggagtcgctggaacattcgcttgaaagcattcgcgaccagaatcaggagccctctggtgtggtgcgaattacgctctcgcgttttgcctatctgttaattcttaagcctgcaatggcgaaattctgtcagcaatatccgggtatacagctggaaatatcggtttacgacggtaccgtgaatgttatcgaagagcgttttgatcttgggatccgttttggcgatattctcgaaggtggggtggtggcgcggccgttaatgaaaccctttcgtgaagggttatatgcatcatcagcttatattagcgagcatggaatgcccgaggtgccggctgacctcagtcaacacaagctgattggctatcgttttatcactaacaaccgcatccttccgttgattctgaacgatcgcggagagcagttgacggttgagatgcccgggcagttaatcagcaacgatattgatgttatggcagacgggatccgtaacgggctgggaattggacgcctgtttgaacccatctggcagttacagcccgacagggagcactttatccccgtgatggagagttactggaaaacctacccgccagtctacctctattaccccaaaaacgcgggtaaaacgaaaagagtgaaggccctgattgattttctgatatccgctacggggcgataa

SEQ ID NO: 87850 - DNA, 309 bp, Enterobacter aerogenes
atgcgaattttatgtctggatatccccgcacctggagcatcgctggataaatatgctccacaccttaacgctgaagcgctgcacgcctggggattgtataaatccgggttcatccgcgacatctactttcgtcaggacagacctggcgtcgctatatttcttgaatgtgactctgtcgatgaagcaatgaacgtaatggccgagttcccgctggctaaagcaggcttattaagcttcgagtgcattccgcttggctcctttattaactgggaaaatctcttcgccgctgaatttaaaaatatagagtga

SEQ ID NO: 87851 - DNA, 690 bp, Enterobacter aerogenes
atgaaccctgcagataaacccgtgctgtgtgtcgtctccagccatccgattaaaggcgcatccggtgtaccaaccggttttttcctggctgagctgacgcatccgctgaaagtactggaagatgccggactaaaaacgacgatagccagcattcgcgggggacagccgccggtggatggttttgacctcagtgaccctgtcaacgccttgtactggaacgaaaccgattttcagcagcgcctggcaacaacgcctgcgttatccgagctgaacggtaccgattacagcgccgttttctttgcaggcggccatggaaccatgtgggatttccgttatagccaggatgcccagcgtattatccgcgaagtgtatgaaagtgacgggattgtcgcagccgtctgccacgggcctgcggcactggttgacgcaaagctcagcagcggcgaatacctggtgaaaggcaaaaacgtggcggcctttaccaacaaggaagaggaagaagttcacaccacagatgtggttccctacctgcttgagactgcactccgcgagcatggcgcgcttcatcatgaagccccgaactggtctgaaaacgtggttaccgacggacgccttatcacggggcagaatcccgcttcagcgcacggtgtcggtgtggcgctgttaaatgccctccaccagccaacttaa

SEQ ID NO: 87852 - DNA, 948 bp, Enterobacter aerogenes
atgaaaacactaccttccgtcgcgctgggcacatggtcctggggcacaggcttcgccggtggtgacaccgtcttcggcaatcatctttctgatactcagatggcagacgtgttcaccacggccatgagtaagggtctcaatctctgggataccgcagcagtatatggcatggggagttccgaggcagcgctgggaacattagtccgtcagttcccccgcgaggatatgattttatccaccaaattcacaccgcagattgctgacgaacagtcagcgcagcctgtcagcgatatgcttgaggccagccttggacgtctgggtgtggacgtgattgatatctactggatccacaatcccctcgacgttgagaaatggacgccaggtctgatcccacttttacaaagcggtaaggtaaaacgcgtaggtgtttccaaccacaatctggcacaaatcagacgcgccaatgaaatccttaacgcttccggttattccctcagtgcagtacaaaatcactacagcctgctctatcgcgcttctgaagaggccgggatccttgattattgccgacaaaataacatcacgttctttgcttacatggtcctggagcaaggcgcgctcagtggtcgttatgattcaaatcatcccatgcctgccgggagtggccgggccgaaagttataacgcagtactgccgcagatagaaagactaaccgccgccatgaaaaaaatgggagccgaaaggaatgccagcgtggcacagatagccatcgcatgggctattgcgaaaggtacccttcccctcgttggtgcgactaaagtccatcacgttctggacgccgcctgcgcttcagacatccagttacgcgatgaggaaatcatcctgctggaacaactcgccgcagagaccagagtggatacacgaggcgcctgggaaaaaccgatggtgtaa

SEQ ID NO: 87853 - DNA, 1050 bp, Enterobacter aerogenes
atgaatggtgagaatatgaaaatcatttgcctcgaagaacattatctcgacagcaagttagggcgagcgtgtatgcctgttgcgcttgagcaggcacctttccttggcgactgggggaaaaccgtcgctgatggtcataatcctgaccgaagccggccgcagatagaaaagaatgcgttgataaacgcgaaaggcgctgatttgggaagccgccgcctcagggatatggatgaggcgggaattaccctacagatactctctgtgggcggattcccccaactggcacccgaggatgaagcggtaacattaaatacggcggcaaacgatcgccttgccgaggcggtaagaaatcacccagatcgcttcgcggcatttgccacacttccctgggcacagccgaaagatgctgaaaatgagcttgtccgcggagttgaaaaactaggatttaaaggagcactgctgaatggcagaccctcttcatgctttctcgatcatcctgactatgactccctgctttcccgctttaataaactgaatgtgccactctatcttcatcccggattaccgcttaaaagcgtacagcaggcctacttcacgggcttcagcgcagaggtcaacgccaggctttctatgtttggctggggctggcatcacgaagcggggatccatttgttgcggctgatgttatcgggcgcatttgataaatatcccaacatgcaggtaatcagtggccactggggggagatgttacccttctggctccagcgtcttgatgacagcctaccactggctgcaacgggtctgtcacgcacgctaacgagaaccttccaggaacacgtttacgttaccccgtcaggtatgctgacactgccgcacttcaagtttatctacgagttaatgggggcagaaaggatcctgttctccgtcgattatccctatcagaccctggacggtgtaaaaacctttatagacagtctgcccgtcaacaaggctgaaaaagaggccatcgcatttcgcaatgcagaacgtttactgggcatcacggcgtag

SEQ ID NO: 87854 - DNA, 573 bp, Enterobacter aerogenes
atgaaaaatatccttattgtttcaggccatcctgagcttacccattccgttgccaacgccactatccttgatgaagtggcgaccgcccttcccgatgctgaaattcgtcgtctggactggctctatccggacggcaaattcaatatcgctgcggagcaggaaagcctgctcagggctgatgtgattgtctggcagtttcctttttcctggtatgggctgcccgggttaatgaaacattggctggacgaggtctttgtccacggcttcgcgcatggctcaacggcgaaactgggcggtaaaaagctgatcctctccttcactacaggggcgccacaggcgctctataccgctgacggtttctttggccatgccattgaagaatatcttattccgttcgagaccacggcaaaactgtgcaatcttgagctgctggcgccggtttatacctgcggtatcagctatgccgaccgggatgccgacaaaatagcgcagcaaaaaacgcttgcccgggaacacgcttcaaggcttgtcgatctgctcaattccgtcgtgaataatccagagggagaataa

SEQ ID NO: 87855 - DNA, 1029 bp, Enterobacter aerogenes
atgcagtatacccggctcggtaaaagtgacttactggtctcccgcatctgtatgggatgtatggggtttggcgacccgttaacgggccagcatcgctggacgctggacgaaacagcaagccgggacatcatccgctacggtctcgaaaagggtatcaatttttacgataccgccatcgcctatcagaacggctccagcgagcgatacgttggccgggcgctgcgggagatggcaaaacgcgaggacgtggtgctggccaccaagtttctgccgcgaaccgccgagcaaattgccgcggggatcggcggaaaagaggcaatagcccgatcgctcgaccagagcctacagaatctggggatggactacatcgacctctacatctaccacatctgggattacaacacgccagttattgaggtgcttgaagcgcttcatgccgccgttactgcggggaaagtgcgcgctattggtatttccaattgctatgcctggcagcttgcgaaagcgaacgcccttgccgaacgcgaagggctgacgccctttgtctctgtgcaaagccactacaacctgattatgcgtgaagatgaacgagagctcttcggtctgtgcgctgaagatgatatcgccatgaccccctatagcgcgctggccagcggtcgtctctcccggaaagaaggccacacgcggcgagccaccgaggatgcctatgcccgcggaaaatatgacagcacggctgaacaggatcggatcattatcgagcgcgtctccgagcttgctgaacggtatcaggtgtccatgacggaaatctcactcgcctggctgctgacaaaagtcacgtcacctgtcgtaggggccacaaaaaaagatcacgtcgatggcgcggtaaacgccgtaaatcttcaactgagcccggaggaaatccggtttctggaagaaacctaccagccgcacgttctgacggggatcatggcgcaaaacacgccgaaaactaaagacgttaagcaggtctggacgcgtagcaaacagtaa

SEQ ID NO: 87856 - DNA, 726 bp, Enterobacter aerogenes
gtgaaaaagccccttatgcttttaatttgtatgctcataagctgccctgtctttgcaacaaaactggacgcgccggataaggtagtgatgaatatctttgagctcggcgtcaggcacgatcgggacaaagattttgcagacgtagccagactgacgatttccgcttcggttgatcatgaagcaggtacgctggcgatgtacgccctgcaccgcagcgacaatccacgtaaggcattcatggtcgaactctatgaaaacgagagtgcttaccgcaaacatctgaatgccgaaccatacaaggcattcgctgcccgggcacctgacattatcgatcggaaaaataaaatcactctggagccccaatttctgggggacaaacacatcataccgaatgagcgaaccattaataatctggtgatcgtcgaggtaaagcctgaatttcagaccgaatttaaaaacatcgtcctgcccgaaatggcggaatcgctcaaagtagagaaaggcgtattaacgatgtatgccgctacagactcgcagactccgaaccgctggtatttctatgagatttacgccagtgaggaagcgtatcaactgcaccgacaaacgccacacttccgtgactatctcaggcaaacggcgcatatgagcgccagtaaagacgctatcccggtaaaaccggtatttcttcgtaacaaaggcggaatcaaacaggatccgcaccgttga

SEQ ID NO: 87857 - DNA, 804 bp, Enterobacter aerogenes
atgaaaagcgtaattgcagcggcggccatgtcgcttgttatttctgattttgctaccgctgaggaaacaagaggtaaagcgatgatgaaaattgaaccttcagcgatttcggaagctgatattcggtctgtctcaccggctcttgcgcgctttggtcgagaagtgattactgaagatctgtggacacgcgatgccctctcgcccagggatcgtagtatggtgaccgtcggcatgctaattgccagaaaccagcctggcgaccttaagcactatataggcattgcccttgataatggcgttacgccagcggaattgtcagaaatcattacccatctggcgttctactcaggttggtcaaatgccatgtcagccgtcagcgttaccaaagcagtatttgaaactcgtggcgtcacggcagatgcacttcctgacgcttctccggacctgcttcctctcaatcaggaagcagaaaagcaacgttcagagacagtggaaaaaaatgttggcccaatatctccaggcctggttaaatttactgctggccccctgttcctggatctctggcaaagacccgcgctgaaaccccgcgacagaagcctgattacggtcagcgcgttaatcgcatccggacagagtgcgcagattggctatcaccttaacagggcgatggataatggactttcagctgaggaggctggtgagatcgttacccaggccgccttctatgctggctggccaaacgcatttaccgctgctccggttgtcggagaggtgctaaacaatcgatcatcgagtaaaaggtaa

SEQ ID NO: 87858 - DNA, 453 bp, Enterobacter aerogenes
atgcttaaaaaatcgatagtcgccctttcattgtttttcgctctgacgcccgccgtttttgcgggcaatagcgaaagcgagctgttgaataaaaagaatgtgattgatttttataataaggccttgaatgaaaaagacttctctgccgccaggccttatctaggggatcgctatgtacagcacaatccgatggcaaaagatggcgtggaaggcttcgagcagtttatcgcttttctgaagagtaaatatcccgactcgcacagcgaaattaagcaggcattcgtcgacggagataacgtgatcttgcatgttgaagtgaccggtcgtgagccaggcgttacgcgggctatcgtggatatcttccgcctcaacgaacagcacaaaatcgttgaacattgggatgttacccaaaacgttccgcaaaaaaccgccagcggcaacggcatgttctaa

SEQ ID NO: 87859 - DNA, 3108 bp, Enterobacter aerogenes
atgctggcccgtttttttgtctttcgcccggtttttgccgcagtcatcgccatctgcatcatggcaaccggcgctctcgccatgatgactttgccggtggaacagtatccggatatcgccccgcctgctgttaatgtcacggctaactatactggcgcttcagcagaaaccgtcgaggatagcgttactcaggtgctggagcagcagatcaaaggtatcgatgggttgatctacttttcctcaagcagcagttcagctggccaggcccgcattagccttagtttcgatcaggacgttaaccctgatatggcgcaggtacaggtacaaaacgcggtaaatcaagcaattacacgattaccacaagaggtgcagcagcaaggaattaccgttaccaaatctcagggggacagcttgatggtggtagccctgtatgacccaagcaggcaattaaccagccttgatattagcgatttcctcatcagctctttacaagaaccgttgagccgcgtcgaaggcgtgggtgaaaccactgtttttggcgcgcagtatgccatgcgcatctggctcaatccgctcaaactaaccagctatggattgatgccctcggacatacaggccgcgatcgaggcgcagaattcgcaagtgaccagcggtgaaattggttctctgccgacgattgagggacaatatttgaacgccacggtgacgacgcagtcccgccttggtcatccggagcagtttgagaatattattctacgcactcatcgcgatggctcagtagtgtacttgcgcgacgtggcccgcgtggaaatcggcgcggaaaactatcaaaaccaaacgacgctcaatggttacccttccgctgggatctcaattcagttggcctcgggagccaatgcgctggaaacggcggagaaagttaggactgaagtcgaacgcctttctccccgctttccacaaggcgtaatcgccgcctatccacgcgacagcactccgtttgtgacggtatcgatcgaaagcgtggtgcatacgctgattgaagcgatactctttgtcgtggccgttatgtatctttttcttcaaagctggcgtgcaacgcttatcccgaccctgacggtaccggtggttctgttgggcacttttggcattctcagcctgcttggctacagcatcaatacactgaccctttttgccatggtgctggcaatcgggctgctggtagatgacgctatcgtggtggtggaaaatgttgaacgtttgatggcagaggaaaacctcactccacaggaggccacgctgcgctcgatgaatgagataaccggggcgctgataggtattgctctggttctctccaccgtttttatcccgatggcgttctttggtggctctgtggggattatctatcgtcagttcaccgtgaccattgtttcagcaatggcgctgtctgcattggtcgctctgacgctgacaccaacgctgtgcgcccacctgctcaagcctggacacataaataaaggtcgtttttttatcctcttcaatcgcggagtaacgataagtcagaacagctacctggccacacttcgtcgaatgaccgcccatccactccgttttgtttgtctggccctgatactaacttttttgatgctctggcaatatcaaaagctcgcaagcggatttttgcccgaggaggatcagggcgcggttatggttcagtactcgctgccgtctggttcgccgatgtcgatgaccgaggccgttggcgcggatattacccactattttatgactgaggagaaagataacctcgacgttatttttatggtcacaggaagaaataatgccggtagcgggcagaacgtcggtatggcattcgctgagttaaaacactgggaccagcgtcccgggaaagaaaacagcgctcaggccattattctacgcgcgaaccagtattttaataaaaatgccaggcaggcaaacataagcgtgatgtcacccccgaccattcgcggtctcggacaatccagcggttttgaattatggctgcaggacagcgccgaaaatggcagtgcggcacttatgcaggcacaaaccaccctgctcaatgccgccagagaaaatcctgctcttaacgcggtaaggattaatagtctggaggaaaaggcgcagctgcaggtcgatgtcgaccgacaaaaagcccaggttcaggggctggatcaggccgatatcaacaatacgctttcagcggcctgggggggcatatatgttaacgactttgtcgatcgagggcgggttaaacgcgtgtatatccagggagacgcgccctggcgttcaacaccggaaaatttatccgcctggtttgtccgtggcaacagcgacaacatggcgtccttcgacagcttctcgacgcttcgctggaccagcggaccgcagatgcttcagcgtttcaatgggctgtcggccgtgcagtttcaaggaggtgctgtgtctggcgtcagctccggcatggcaatggctgaaatgtccgaaatggccagctcgctgaacggatttgacctgcaatggagcggtttgtcctggcaggagcgctcatcttcggtgcaaacgctgtgggtctatttggcatcgctagcctttatgtttctgtgcctcgctgccttatatgaaagctggtcgatccccattgccgtgatgttgattatcccgttgggcatcattggcgcgatcagcgcttcgttgctcgccggttatgacaatgatatttatttccaagtggggatgttaacaacaatgggcctttcggccaaaaatgcgatcctgatcgtcgaattcgggctatcgcagtttcagcaaggaaaaagcctgacggaagcagcactggaaggcgcacggctgcgcttgcgtccgattattatgacctcactcgcatttgttgtcggcgtgatccctctggtactctctgcaggtgccggcgctgccagccaacaagaaattgggacggcggtgattggcggcatgctttcagggacgctactgacgttgcttttcgttccactatttttcctgctagtgcagcaaggaattatgcgactgaaaagtcgcaaacagtaa

SEQ ID NO: 87860 - DNA, 618 bp, Enterobacter aerogenes
atggtcaatcaacgcgggcggccgatgaaagctcgccctcgcattttgcaaaccgcgcgtgagctgtttctccagcacggactggacgtgtctttggataccatcgccgccgaagcgggcaccacgcgtccgacgctgtacagccattttcccggtggtaaagatgcgctgctactggagacttttgcgtttctgaatgacacaatgcagccccccctacgccagcttttacaggaacgtcagcaggattttcccgcgctgctgcacggatttgcaaacgttgtgcagcagcacttctatgcccctgagaacatccattttcagcgcttactgatccaggttctcgtgcagaaacccgagctatatgtcacgcttgagcaacggccctccggtcgcgtactgcaggcactcagcgagatccttgcgcaaaaacgagacgagggactgttgaccatcaacgacccggaactgcaggcaacagcgtttctcggcgcaattatgggttacccgctgcctggggcgctcattgcacaaaaagcaatagatccaaaaaggctggagcaacttgccgactgcgcaattgaggggtttctcaaagcatgggggtacaagccgtaa

SEQ ID NO: 87861 - DNA, 477 bp, Enterobacter aerogenes
atgaaaattaaactcatcggcggcctcagcatttttctgttaggtggtgcactggcgctttattattgttccaccggtgttggtaagcgggatgtactggcctgcagtacagtgtttaattttacgcgcaacgaaggtaaggccagtgaagtgcgggttaataccgttgctcagttctattttcaccgcgacggcactggtctgacagcctataaaggggccgcctgggcaaatggccagagcatgatcgtcgacagagacgtcgattttatctggtcgcggcgggaggatgataaagtggtggtattgagctacaccaaaacctggcgcaggcacaatgacaacacgccggatgcgcaatggggaagcttcgctaatccgaccgcgcgttactatctgaccatctccgaggtttcgccatcggtgtggctgatccaggaccgacattatcccacctatatatgtcggggtgattaa

SEQ ID NO: 87862 - DNA, 756 bp, Enterobacter aerogenes
atgttttttatatgcaacaattcgttgttatttgatcctgaagctcacacagttagtgttgttggacaacctgaatccgtattaacgctttcggcaccggccgtgcgtctgttacaggaatttattcgtcataaaggaagcgaacttagccgtgaggagttgattacccgcgtatggcaggaatttggttttacgccttcgggaaataatctcaacaaagcgataagtgagttacgcaaaagtttccaggcgttgggagaacatcatgaattgattgtaaccataccgcgatatggttttcggtttgatgcggatgttatttttcaaccagcgcaaaacattgacaccagcgcaccccaaccccagcttcaaaaagctgaaaagaggaagcaaccaccacgtctgaaatggtggctgatattcacggcattattagcgtcagtattcggtattggcataattattcgccaacagcagaatataacaacgccgataaggctaaaggctgttgagcaaaaaattgcaaaatgtagcgtctggcttattaacgatcatgggcgaccgctagtgttatcgaaattagccgcactgctggataaaaacaatgtggcgtgccagcgagaagagtacagtgtctattatttcagcgctcgtttttccctcgtcgcggcggatgaagtgtttatcggtgcatgcccggtcaataaagacagcttgtgtaaaaccattcgttataaaagtggggctgagaaatga

SEQ ID NO: 87863 - DNA, 750 bp, Enterobacter aerogenes
atgaatgtgaaagtaaaaaacagagcaaacaagtccactgcgctttatctcgctgccctgtcgatgtcatttttcgcagaaatgacacaggccaatatgagcgtttacccgatggaacttaacgtcgacagttccgggacagcccaaatcagagtggcctctaaaagcgatgatattcagttcattcgggtgaggcaaaagaaaattcttaatccgggtacgccacaggaaaaagaagttgagatggcagcgtggaaagacggaggcgtggtcgttacccctgaaaaattcgctttagcggcaggcgctttacgtatcgtaaggctggtttctctgacgccgccagaaaaagagagtacctggcgcgtttattttgaaggtgtaaaacagccggatagcattctgccagtacaatcttcggggacgccggcgtcggctaaactcggtgttaacgttatctggggagcattggttcatttggcgccggaaaagccggtggtttctctgcgaataaatcccgcgtcaggaactttaaaaaatgatggcacgttgcgagtaccgctgaaagaaattggcgtatgcgatacaagcgataaatgccgatggattagagaagatgcaactatttatccggatactgagcgaaaattaaaatcactcactcagaatcacggccagaaatataaattccgctatttcaactggattaataaaacagctgaagaagcagacttgcccgtcgtgcaataa

SEQ ID NO: 87864 - DNA, 507 bp, Enterobacter aerogenes
atgaagaagtatattaaacctctgatgatcgttgctgcgatgtctactgcgttcagcgcaatggctattcagaaggatattacggttaatgccaacgtcgattcccagttggatatgacccaggccgataatacgccgttacctgccagcatcgatatgcaatatctgccgggccgtgggctggaaagctaccgtctcaataccaaaatctggtcgaactcagccaccagcaacgtcaaagtccgtctggttagcgcagcgaatctgaccaatgaagatggcgccgagacggtaccgatgaccgtaaaactgggcgataaaaccctgaacactaccgatgcagaatttaccggcagcgagctgttcccgggcagcgttgaaaacggttctgcggtcctgccgctgaccatctctcagaccacaaaaggcattctgaaaaccggtcagtacagcggcgtggtgagtctgatgctgactcaggcgaccaccgcggaaggcggcgcgtaa

SEQ ID NO: 87865 - DNA, 2718 bp, Enterobacter aerogenes
atggcttttcacagaaatgctcttctttttgtcgttttgttacctgcttccgttcaattagccagcgccagtatcgtcgtacctgcaggttttgaagatctggcgaaaacgcagcgcctgtggacagaagtcagtctgtatggcgcgtcgcttggcctgtttgaagccgatatcacgcttgaaacggtaacctttgtggcgccggaaacgctcatcgcggcaattaagcgtcagttcaacgatgatcctgccttgatcgcctctgtgagcggcgccctttcctctccgcttgcgcgtaacggcaatctcgcctgcagcagcaatggttccgcggcgggttgcgattttatcgacaccaaaagcgtggccctgatttatgacgagaataacgcccgtattaacctgtttttcgacaggcggtatctaccgaaacaaacggcggaaaatcagtggtatcagcctacgcgcaatactgagaacgcgctgatccaccagcaaaatatcaacttcgtggccgatgaagactatcagtcgatgaccgtgcagggaaacggcgcgctggccatgactgagaatgggtattttaacctcgactggacctggcttgggcagcgatctcgccatcaacagcagcaggagatcacggtcaataatgcctggttccgtcaggatctgtggcatgagtattacgttcagttaggtgaaatggatacgcgcgatctgttcagcgcggccggcggcaatataaacctcagccagctaccgattggaaaaattcgcggtctgcgcaccggctcgacgcgagcgtggatcaaccccgttcagcagtccagtggaacgcccattaccgtgctgctttcccatgatgcccgtatcgatgcgcgccggggcaatcaactgctggccagtttttatcttaatgccggggcgcaaaccctggatacccgttcgtttccggacggtagctataccgtgacgctggcgatttatgaaaacaaccgcctgacccgtaccgagcaggttccgtttacccgcaccggcatcacgccattcgaccgcgtcgagtggtttatgcaggccggtgaaaccgataacgacgatatgagcgacgaacgcagcgccgtggcgcaagcgggcattcgcctgcctgtaacttctacactggcgatcaccagcggcgcaacggtgaaaaagaaccagcgttttgtggaaagtgccgtcgactggagccgcggattcaataccggccccattgatggcgtgctcagcacacgctttagctacctttatggcagccagggccaacgcggcaatatccagcaaatcagctacaacgatggcttttcactgagcttctatcgtaacgccttatcggctgataactgtgactccagcagtaccggatttgatgcggtgaatggttgctaccgaagcctctcggtaatgttctccgttccggtcggctcgtggtatgccaacctcggttattccgataaccgcaatgaaggccgttatgtctcgcggcgtgaattaccgaatagtgacgatcggcacgacaatggtttgccctgggaatcggtgtatatgacccgctcccgttcgcaggcgtggcaggccggactgagcaacgcgttcagcgcccgcgggttgaatatcaacagcagcataaacctgtttatgcgtaacgaccattctggcgatggcaaggataaaggcggattcctcagcgtaagcctgtcgctggcacataatcgtcagggcgatgcctccagctacacctccgtgggggccacgtggcaacagcagaagcatgaaaaaaatcagctcaactataacctcgcgcacaactggtacaccgatgcgcgcggtgaaaacgaatatggtcttaacgcatccgggattaacagcgactcgctgaatacttcggcctatacccgtcagggcggccgatttggtaacggaagtttgaccgtcagcgattcgtgggatcgccaggatcatcgccaccggttcagcagcagcggcaactacagctctacgctggcgctatctcgttctggcctgtggtttggccgctggggggacggacgcccggcgtcagccattgcggtcaacgtcgcaacgccggaagcgtcacctgattcccgcattgccgtttcgcttgataacagcggtagcgccgatatcccggcaaacgcccgtgcgctgttcgccctgcccggctatcagcaaaccacgctgactattaatgagtcgacggacatttcccacggcgccaacagtgaaattacgcaggggtcgggaagcagaacggtatttatggtgcctggaaaaatgctgcacagagaggtgcaaaccaccacgcgctacacctggcttggccagttgaccgatgaacaacatacgccgtttatcggcggcatgccgcttaacgtcagcggctggagtgatttaggtaatggcggctttagcgcggaaagcgacagcctgatccagtcgctctacctggtgaaacaacagcagttttaccagtgcgcgctgaaggtgaagaccatgcgagacgtcgtgcgctatgtcggcacggtgacctgcgaagaactgacttattccgcgttaccggaaaccgtgcagcagcaggcgcaactgttgctggctggccgtacgccggcggtcagcccaacggcgatgaataactctactctctctacaggaaaatga

SEQ ID NO: 87866 - DNA, 1158 bp, Enterobacter aerogenes
gtgataacgcgtcttttgattttactgcttgcctgcatctgttttaccgaggctcaggccgctagtcctgccggcagaaataccagcgtggcgtttgccttcgatcgccagtctcctcctgcccgcctggatatctggctgcacgagtccggcggttatgatcccaacgatccgcaaaaatggggacgaaataccctgacctgccagtcgcgtaccgatacaacctatggcgcctgcatgactgcgccggtatggttttcggcgaacccggccgcgccctatccgataaacctgcgttttacccacgcaataaccaacaaaacggtggatgtaaaagtctatggcgaacaccgtatgttcatcaataacaaaacctttattttcgccagttacgtaacgggcggtacagtagatttgtcagcctggaacagtgcgccctattttgatttttacatcgttcgtagcgaattaaacaaactcgatcaggccggtatctggacggcaacgctgaaacagaatttgcgcgaatggggcaccgccgactgtggcggcaactttaatgacgtcaatattggctgcccaggctacctcactcttgctaactggcaggcaaacctgcgtattgaggtggtcgacccgggcaaccagcagatttatttaccggcatttccgcactccacgccggtggtgaacctcaacctcaccaatttcccgggcagacccggcggcagtgagattaggggcgaaaactcgctggatatgtgcctctatgatggcaataacagcaccagctcgcgggcatttctacgcttcgaagacgatgggcttgacgcgaccgggcgtgccgaaggggcgttttctatccggcgacggggaggcagccagacagacccaagagatcgtctcgattatcaggtgctggtgaccaacccgaccaccggcgcaactgaagttgccgctaacggtaaaacgttgacctgggagggtaccaacaatcgccgctatttgcgccaggttgtcctgccgggcggccgcgaaagcgtgttatgcatcccggcgcccattaccctgaaaacccccgcctttgccgccagcagcaaaaacgcgggtgactataccggcacgttacgcgttatctatacccccagtacgttataa

SEQ ID NO: 87867 - DNA, 552 bp, Enterobacter aerogenes
gtgagctacgttgttcttgataataatcgcttttatgcggaggggctgcgttacgcccttctccgtcgtaacgttatgatggaagtgcatagcggcacggtgcagtggcagcccttactgttagagagcacgacgttggttattcgctgccgtttctccatcagcggcacgcatcagtcgctggttgatattttgcttaccctcgaggccaattgctggcagggaacgggctatctggtgtgtaatgaaaaaagctgggggctggccacctatctacgcaagcgttttgaaaccttaacgttgcacatcatcgatgaccggatctccgtggcggatgccgcctggctgttatctaaagagccaaggcggatccgcaccctgcgctgctgcctgaccgagatggaatttaacgtcctcgacaggctggttaaggggcagtcggtaagatatgtcgcgcacatgacgaagatgagtgaaaaacaggtctcgacctataaatgtaacgccctgaagaaactcaatgccaataatcttctacagcttctggtgtaa

SEQ ID NO: 87868 - DNA, 924 bp, Enterobacter aerogenes
atgtcagaccccgattttaatttattgattgcactcgatgtattactgaacgaagccagcgtggcgggcgcggcacgtcgtttgaatctcagtacgtcagccatgagccgcacgctaagccggttacgcgacgtcaccggggatcagatattggttcgcgccgggcgtaacatggtgctgacgccgtgggcggaggcgacccgcgatcgcgcccgtcgcgcggtcttcgaggcgaaggcggtgctgcagccagcggccgaagcgctcaacgtacaaaatctggagcgtcttttcaccatcagggcaaacgatggttttgtggtggcgtttggcccttcgctcattgcggcagtagccgaagccgcgcccaatgtctgtctacgctttgcgcctaagcccgaaaaaacgtcacgctatctacgggaagggctggtcgatctggagattggcgtccagagcaatatggggcctgaaatacgactgcaacggctatttgaagatcggtttgtgggggtggtgcgtaaggggcacccgctggccgccctgagagagataaccgtggcggattatgtcgcctggggtcatgtggtggcctcaccagaaggtacgctgcacgggtccgtcgatgatgtgctggccgagctcggcatgaaacgcaaaatcgccagcgtcgtccccggatttccgaccgccctgtccgtggcgctgcaatcggatcttatcgccatgatccccgctctctatttagttaatcagcaggtcatggagcaggtacatctttttgagctgccgtttaaaagccggcggattaccgtctcgcaaatgtggcatccgagaatggaacgcgatcccgctcaccgctggctcagagagaaaattgtggcgatatgccgcgtggacaagtcgttacaccagaagctgtag

SEQ ID NO: 87869 - DNA, 1389 bp, Enterobacter aerogenes
atgacactattttccagccaacctggcgatgacggcctgccaggcccggcgcgagcacgggttatggccgcggtaatgaccaccaccttaatgggcgtctttgatggcactatggtaaacattgctctgccgtcgatggcgcaggaactacaggcgtcagccagtaccgccgtctggttcgccaacgggtatctgctggcggcggcgatgacgctggcgatattcgccgcgctggcggcgcgcttcggctaccgcccggtgtttctggccggactgacgacatttattatggcatcagcaggttgcgcgctggcgacgacgcctgagctgctcatcggcatgcgggtgctgcaggggatcggcggtgcggcaacgctcagtatcgcacccgccatattgcgctccgtttttccggcgcgactgctggggcgtattctcgggatacacgccctgcttatcgcttcaagctccgcaatcgggccggtgctgggcggcacgatcctgcatactttgagctggcaatggctgtttgcaataaacgtgctccccggtaccgtcgccttagtgctggcggtgagagcgctcccgcggccgacagttgacaggcaagccgctttcgatactcccggagcgatattgtcggcgctgctattgggttcaacgatcatggcggcgaatagcatgcagagcgcttcgcagcatatcgatagtctgtactggacgttgctcgcagcgataagcggcaccgcctttatctggcgcatccggcagacggacaacccgctgctgccgcctgcgatgtttaaaaatgaacgctttaccctttcggcctttacgtcgctgatcgccttcgtaagccaggggatcacttttattgccctgccgttcctgttccagaacgagtatggctatagcccggtgctctcggcgctgctgtttactccgtggccattagggatagtgctgatcgcaccgcacgccggccgctgggcggactcaatctccgctccgctcatctcgacgctgggactgatgatttttgtcgcgggtttaatccttctggcgatgctgcccgctacgcccgccgcgtgggatatctgcctgcggagcctggtatgcggtattggctttggctgcttccagagcccgaataaccgggaaatgctgtcaaacgtgagtcgcgaacaggcgagctatgcctcgggcgttttatccatcatgcgcacgttcgggcagtgtctgggagccgccgtgatgggcgtactgttggcaaaagacgaaagcgccgttcatcttgcgctgtggatcgccgccgcggcctcggcgttgtcggtggccgttagcgccagccgactgcggagaatagcttttcctgcgggagcggaataa

SEQ ID NO: 87870 - DNA, 1227 bp, Enterobacter aerogenes
atgaacctggccgcagcgcgagtgatggcgcgggcagagagattagcggcgataagcgaaacgccggaaggcctgacgcgggtttacctttcgccacagcatctcgacgctaatcagcaggttgcccactggatgcgccaggcaggcatgattgtctggcaggacagcgtcggtaatatttgcgggcgttatgaaggccgtgaagaaggggcgccggcgattttgctcggatcgcatctcgatacggtacgcaacgccgggcgatatgatggcatgttgggggtgttagccgccatcgaagtggtgcagagcttacataatcaggcgcgccgcctggcgcaggccatcgaaatcgtcggcttctgcgatgaagaaggaacacgctttggtatcacgttattgggcagcaagggtctgacgggaagctggccgcaaacctggctggcccaacgcgatgccgaaggcattagcctggcgcaggcgatggtcaacgccggattggatccatcacgcgtccattcagcctcgcgcccggcggaagatttttccgcctatctcgaactgcatatcgagcagggtccgaggctggaacaggccggttcggcactcggcgtggtcgaggcgatcaacggcgcgcggcgcctcaattgctgttttaccggcgaggcgggtcatgcaggcacggtgccgatggaccagcgccgcgacgcgcttgccgccgccgcggagtggatgctgtatattgagagcacgacgcgccagcagggaggcaacctggtcgccaccgtcgggacattgcgctgctcgccggcagcggtcaatgtgatccccggcgaagtcgcgttgactctggatatccgcggtccgcaggatcagccgctggatgcattactgggttcattgctggcggcagccgcagagattgccgggcgtcgcggcctgcagtttgccgctgaggagttctaccgcattgcggcaaccgcctgcgatccgcgattacagtcggtgattgccgaagcgctatgcgaggtacagggcacggcgttgacgctgccaagcggcgccggacatgacgcgattgctatcgcggagcgctggccggtggggatgctgtttgtgcgctgcaaagggggaattagtcaccatccggcggaatcggtcagcgaagccgatgtcgaactggcaattgatgccttcagccgggcggtgataaaacttgccgggtaa

SEQ ID NO: 87871 - DNA, 1242 bp, Enterobacter aerogenes
atggatatcgctcaattttcaccaatcaatcctccgcatcgcctgctgatggggccggggccgatcaacgccgacccgcgcgtcctgcgcgcgatgtccagccagcttatcggccaatacgatccggctatgacgcactatatgaacgaagtcatggcgttataccgcggggtattccgcaccagcaaccgctggaccatgctggtggatggcacctcacgggcggggattgaagccattctgatctccgcgatccgccccggcgacaaagtgctggtgccggtatttggccgctttggccatctgttatgtgaaatcgcccgccgctgccgggcggaagtgcataccattgaggtgccgtggggtgaagtgttctctcccgagcagattgaagatgcgatcaaacgggtgcgtccacgtatgctgctgacggtgcagggagacacctcgaccaccatgctgcagccgctggcggagctgggcgagatctgccgtcgttatgatgtgctgttttataccgacgccaccgcctcattgggcggcaatgcgctggagaccgatgcctgggggctggatgcggtatcggcgggggtgcaaaagtgcctcgggggcccctccggcacctcgcccattaccctgagcccgcggatggaagaggctatccgtcgacgtaaatgcgttgagcaggggatccgtaccgccgagcatcttgatggcgtcgatgagatggtttactccaactatttcgatctcggaatggtgatggattattgggggccagaacgccttaaccatcatacggaagcgacatccgcgctgttcgccgcccgcgaatgcgcgcgtctgattcttgaggaagggcttgataacggtattgcccgccacaaactgcacggcgacgcgctggtgaaaggtattcaggcgatggggctggaaatctttggcgacctgcaacacaaaatgaataacgtactgggcgtgatcatcccgcagggcattaatggcgaccaggtacgccaactgatgctggaagattttgccattgagattggcacctcattcggcccgctgcacggcaaagtgtggcgtataggcacaatgggttacaacgcgcgcaaagattgcgtcatgactaccctcagcgcgctggaatcggtactcaattacctgaaattccccaccacgcagggggcagccatgcaggcggcgtgggatcattatcgcagcgagaaaccgctatga

SEQ ID NO: 87872 - DNA, 738 bp, Enterobacter aerogenes
atgccgctcatcaccattaatcaggtgcagaaattctacggcgataatcacgtgctgaagggggtcgatctcgatatcaatatgggcgaggtgatctccatcatcggccgaagcggctcggggaaaagcaccttattgcgctgcattaacgggctggaggggtaccaggaaggcagtattaagctcggtggcatgaccattaccgacagcgattcgcaggcgcgggagattagccgctccgttggcatggtattccagaacttcaatttattcccgcatatgacggcgctggaaaacgtgatgctggcgccgcggcgggtattgaaaaaaaagcccgccgagtgccgcgaactggcgcagcaaatgctggttaaagtcgggcttggcgatcggctggatttctatccctccagcctttccggcggtcaacagcagcgggtcgctatcgcccgcgcgctggcgatgtcgccaaaagttttactctgtgacgaaatcacctccgcgctggatccggaactggtgggcgaggtgctcaaagtgctggaacagctggccgcggaaggaatgacgctgattctggttacccatgaaatgaattttgcccgtgaagtcggcgaccgggtggtgtttatgcaccagggtcgagtctgggagcagggcgacagcaaaacgctgttcagccagccgcaaaccaatgaactcaaacaatttatctcctccgtgcgcggactgaattaa

SEQ ID NO: 87873 - DNA, 660 bp, Enterobacter aerogenes
atgatgacaacctttaccgactgggacatcgtacgcaacttgctgctggccggacgctggaccgtgctgctatcgctgacggcctttattggcggcgcgctggtgacattaccgctgttgctgctgcgcctgcggggtaaattgtgggtgcagcgcctcattctcggctatatcgagctatttcaggggacgccattgctgatgcagctgtttcttgcctttttcggcgtggcgttattcgggatcgatgtgtcgccatggaccgccgccgcgctggcgctgaccctctataccagcgcctttttgctggatatctggtacggcagtattcgggccttgccgaaaggacagtgggaggcatcgcgttgcctgggattaaatttcacccagacgttatgtcgcgtggtggcgccgcaggcggtgcgtatcgccatcgctcccaccgtgggtttcgccgtacaggtaataaagggcaccgcgctggcgtcgattatcggtttcgtcgagctcaccaaggctggcaccatgctcaccaatgtgacgtatcagccgtttaaggttttcgcgctggtcgcgttgggctacttcatcttgtgttatccgctgtcccgttacagccgctatctggagaataaattcaatgccgctcatcaccattaa

SEQ ID NO: 87874 - DNA, 666 bp, Enterobacter aerogenes
atgacggagcaattacatttttccgcgctctggccttattggccggagctcgtggcgggactctgggtcactatccaactcaccgcgctggccacgctcggcggcctggctatcgggatcatcggtgccgctctgcgtagcgggcgggcaagctggctgagtcggatatggggggcttacgttgaggttatccgcaatacgccgttcgtggttcaactgttctttattgtcttcggcctgccgaatctggggttgaagatgacggcgggcgaagcggcgctgctggcgatgatcgtcaacctgggcgcctacagtacggagatcgcccgcgccgggatccaggtgacgccaaaagggcagtgggaggccggtcgggtactggggctcagccggagtcagatctttattcaggtggttttaccgccggcgttgcagcgtatttacccggcgctggtgagtcagtgcattatcgtaatgctcggatcgtcggtggtatcgcaggtctcttatgaagagctgacctttgccgccaacttaattcagtcgcgaacgtttttgagcttcgaggtgtatctggtgacgaccggtctctatttagcgttatcgatagcgatgcgccagctgctaatggcggctggacgtagatggctgagggtacaggcatga

SEQ ID NO: 87875 - DNA, 792 bp, Enterobacter aerogenes
atgatgatgaaaaaactgctgattgcgctgaccggggccgcttgtctgttgacacaaatcaccgccgcacacgcggaccaactccaggatattgaaaaacgcggcgtgatccgcgtcgccgttccccaggatttcccgccgtttggttctgtcggcaccgatctccagccacaggggtatgacattgatatggcccgctatctggcaaagcagatgaagctaaaactgcagctggttccggtgagcagcgccaaccgggtaccgtatctgcagaccgataaagtggatctggtgatctcaagcctgggtaaaaacgccgagcgggaaaaggtcattgatttcagccaaccctacgcgccgtttttccttggtgtcttcggcccgcagggcgctgccctgaaagacgccgccgaactgagcggtaagagcatcggcgtgacccgcggcgcggtggaagatatggtgctgaccagcattgcgccgaaagcggcgcagattaagcgttacgaagataacaacaccacgctgtcggcctggctttctggccaggtgcaatacgtggcgacgggtaatctggtggtggcggctatctcacggcaaaacccggcgaaagccccggtcgccaactttatgcttaaggattcaccgtgcgtgattggcctgaaaaaaaatgaaccggcgctgaaggaaaaggtgaacgccttaatcgcgcagggcattaaggacggcaccctcaatacgttatcacagcagtggctgaaagcgccgttgcccagcgactttgccgcttaa

SEQ ID NO: 87876 - DNA, 840 bp, Enterobacter aerogenes
atggaacaactcgatgaacggctgaaggcgcaatatgcgtcgttgtcaccccaggagcagcgggtggcggatttcattgtcgaccactttgatgacctgattagctacaacagcgccgagctggcccaactgagcggggtatcaaaagcgacagtaagccgtctgtttaaacggctgggatatgaaaagtatcgcgatatgcgcgatgagctgcgcacgttacgccagagcgggatgccgttgaccgatcatcgcgaggcggtgcagggtaatacgctgctggcgcggcattataaacaggagatggcaaacctgacgcagtgggtaaacgcgctggatgcccggcagtttgccgaagccattaacgcgctggtcaaggccaggcgcgtcgtcattattggcatgcgaaactcctggccgctggcgctgcatttgcgccagcagttgcttcaggcgcgtgggcaagtggtggtgctgccgcaaccggggcaaagcctaagtgaagagctggtcgatttaagcgcggaagatatcgtggtggtgatggcgtttcgccgtcggccgcggattattcgcccattgatgcagcaactgcaacagcggggagttccgcagctgctaatctgcgagccgcaggcgcatagcctgtttcctctggcgcgctggcggctctgcgccccgctggacagcgtgtcggctttcgacagctacgcgtcggccaatagtcttatcaacctgctggcgaacgccttgctacatgaaattctcgatagcggtcgcccgcgcattcatgacatcgccacgttataccagcagttggatgagcttgaacaacgataa

SEQ ID NO: 87877 - DNA, 1584 bp, Enterobacter aerogenes
atgcagagtcatttctcgacccaggggatggcggtcgccccccatcatctggctagccaaagcgcgctgtccgtgctgcgcgaaggcggaagcgcaatagaagcgatggtcgccgccgccgcgaccatcgcggtggtctatccgcatatgaatggtttaggcggcgatgggttctggctgatcgtgccgccgcagggcgatccgatcgccattgacgccagcggcgccgctggttcactggcgacgccggaagcctatgccgggctaacgcacatcccgcatcgcggcccgcaatccgccctgaccgtcgccggcaccgtcagcggctgggatgaggcgctgaaagtttcacaatccctgaccggtaaatcactaccgctttcgcgtctgttacaggacgcgatcggctatgccgataacggtattccggtgaccgcgtcacaagccagcgccaccgctggaaagttagatgaacttcagcgccagccgggcttcgctgagacctttctggtcaatggccgccctccgcaaagcggcagccgcttttgtcagcctgcgctggcctccacgctaaaacggctggttgcggaagggcttgatagtttctatcgcggctctctcgcggaacaactggcggccggcatggcccgttacggcctgcctattacgcttgacgatctgcgccagcatcgcgcgcgtcgcccgcaaccactgcggttacagcatcaacacggtgagttatggaacctggcgccgccgacgcaggggctggtatcgctggccattctcggcatcactgaccggctggcgatggagcaggccgacgatgcgcagaccatccaccgtatcgtggaagcgacaaaactggccttcagcctgcgagataaacatattaccgacccgctgcacctggatgtggatattcaaagcctgctgtccccgcaggcgttacaaccgctggcggagaagatcgacgaccagcgcgccgcgccatggggcgcaggcaaaggccccggcgataccgtctggatgggcgtgatggacagtagcgggctagcggtctcctttatccagagtctctaccatgagtttggcagcggtgtggtacttccggacagcggtattgtctggcaaaaccgcggcgcgtcgttcagcctcgacccggcgcatttgctggcgctggcgcccggcaagcaacccttccatacccttaatcccgccgccgcacgcctgaacgatgggcgggtgatggtttatggttcaatgggcggcgacggccaaccgcaaacgcaggcggcgctgttcacccgttatatcctgcagaacgtcccgcttcaggagagtatttctcgtccgcgctggctgcttgggcgcacctgggggcagacctcggactcactaaaagtggaaggccgctttgcgccgcaaaccctcgcccggctcagggaactggggcatgaggttgaggtactggccgacttcagcgaggccatgggacatgccggggccattgtccgccatcctgacggcctgtttgaaggcgcgtctgacccgcgcagtaacggcgccgccgctggctattag

SEQ ID NO: 87878 - DNA, 189 bp, Enterobacter aerogenes
atgaaacaaaccgaaaaagagtggcgcgactggcttcgacagatggagcagatcctcgccctggaactggatgaatcgcgccgcgctgagctgctggcgcaatttcgccgcattgccgatatggctgaaccgctgatggcctatccgctcgatcagcgcctggaaatcgccggagtgtataaagcatga

SEQ ID NO: 87879 - DNA, 1398 bp, Enterobacter aerogenes
atgaagctacataagatgaccattgccgggatccagcagtcgctgagtcgcggtgaatttagcgccagagagctggctcgccagacgcttgatgatattgcgcaaagtaacccgcggctcaatgcctggacgactgtcaccgggaaacggatgctcgacgaagcggacgccattgatgccctacggcgcacgaatcagccgctgcctgcgctggcaggcattccctacgcggtcaaaaatctgtttgatgtcgcgggagaaaccaccctcgccggcgcccaactgttcagcaataacccgcctgcccgcgtcgatagctgggcggtaagtcaaatccaaagtgcaggcggcctgctcagcgggatgctgaatatggacgcctatgcttacggttttaccacggaaaacagccactatggcgcgacgcgtaatccgcacgatcttaaccgcattgctggcggatcctccggcggctcagcggcggcggtcgccgccgggctggttactttctcgctcggtagcgacaccaatggttcaatccgcgttccggcatccctgagcgggatttttggtctcaagccaactttcggccgtctgtcgcgtaccggcagtcacccttttgttcccagcctcgatcatattggtccgtttgcccgtacggtagaggatttagccacagtctacgatgttcttcaggggcgagacgtcaacgacggttttcaggccgaacgcggcatcgcccccgccacgccgcatctgcgatatggcctccaggggctgcgttgcgcggttttaggcggctatttcagccgctggtgcgatgacgatgcccgcgcggcggtggctcgcgtcgcccgctatctcgaagcctctgaagagtttctcttccccgaggcggagctggcgcgcgcttctgcttttatcattagcgcttctgaaggcggaaaccagtatctgccagccttacggcgtgagccggagcgctttgaaccgcactcgcgcgaacgtctgctggcgggagcgatgattccttccgcctggtacctgcaggcgcagcgctttcgtcgccacgctcagcagcaagtcgcgtcgctattcacccatgccgacgtgctcatcgccccggcaacaccgtgcagcgccacgcttattggcgagcagacgatggagatcaacggcgagtctttaccgatacgcgccagcatgggcatgcttactcaaccaatctcctttatcggtctgccggtggtgaccgtcccgctacgtaccgcgacggggctgcctgtcggggtgcagttaattgccgcgccgtttaatgaacaggcctgtctgcgcgccgcctatgtgctggaagcgatgggaataaccgattcccgcccggtggagatagccgcatga

SEQ ID NO: 87880 - DNA, 390 bp, Enterobacter aerogenes
atgatcgcatcgcaagaaatcaaccttccgcaagtggtcgccgaagttacggcggccttttatcgctatgaacaggcgctggtgagtaacgatatcgcagtgctggatgcgttgttctggcacgatacgcgcacggttcgcctcggcgccggggagaatctttatggtattgatgagatccgcgccttccgcgccgcgcgccccgccgcagggcttgcgcgggagttacgccataaggtgatcacaacctatggagaggattatgcggtatgcagtaccgagttcacccgtgaaggcagcgaacgtatcggccgtcagcaacaaacctgggttcggtttgcctgtggctggcgtatcgttgccgcacaggttagtttgatgggacattga

SEQ ID NO: 87881 - DNA, 933 bp, Enterobacter aerogenes
atgataccagcagcagaatcgtatccgcgcgatttacgcggctatgcgggaaagccgccgcacgcgcagtggccaaaccaggcgcgtatcgcggtgcagtttgtgcttaattacgaagagggcgccgagaatcacgtcctgcacggcgatgcgggttccgaacagtttctctccgatatcattggcgctgccagctatcccgatcgccatatgtcaatggactcattgtatgaatatggcagccgcgcgggtttctggcgtatccatcatgcctttcaggagcgggggttaccgctgacggtatttggcgtggcgatggcgttggcgcgtcatccggatatcgtcgcggcgatcaaagcggccaactacgatgtggtcagccacgggtggcgttggatccactatcagcatatggcgattgaacaggagcgtgaccatctgcataaagcggtgcaggtgctgaccgacctgtttggcaaaccgcccaccggctggtataccgggcgcgatagccctaacacccggcaactggtggtggaacatggcgggtttgattacgacagcgactattatggcgatgatttgccgttctggacggaattgccttgcgccgacgggcagcgtaaaccgcatctcatcgtgccttacacgctcgatgccaacgacatgcgctttgccaccgctcaggggtttaataccgctgaacagttttatacctatctgaaagacagctttgatgtgctgtacgcggaaggcgaaacgtcgccgaaaatgatgtctatcggcatgcactgccggttgctggggcgccctgggcgcttccgcgctctgcaacgttttcttgattacgtgcagcagcatgagcgcgtgtggatttgtacccgccagcagattgccgaccactggcggcaggtacatccgtatcagccatag

SEQ ID NO: 87882 - DNA, 741 bp, Enterobacter aerogenes
atgtccaccatctgtatacaagtcatcaatcccaataccgatcccgatatgacgcaaaccatcgccgaggcggcccgcgccgcggcgtcgccaggaaccgatattgtcgcggtctgtccaccagacggcgtgccgtcgattgaagggcactttgacgaagccgtcgccgccgtcggcgtgctggagcaaataaaagccgggcggcagcagggcgtttccgggcacgttatcgcctgttttggcgatccgggactactggccgcccgtgaactggcccaggggccggttattggtattgccgaagcggcgatgcatatggcgacgctggtcgctacccgcttctcggtagtcactaccttgccgcgcacgctgattatcgctcgccacctgctacatcagtatggattccatgaccattgcgccggtctgcatgcgatcgatctaccggtgctggtactggaagatggcagcggtgtggcgcaggaaaaagtacgcgcccgctgtattcaggcgctaaaggaggacggctgcggcgctatcgtgctgggctgcggcggcatggcgaccctggcgcagcaactgacccgggaacttcaggtacccgttattgatggcgtcagcgcggcggtgaagatggttgaatctctggtgtctctagggctgacaaccagcaagcacggtgatttagcctatccggaacgtaaaacgcttagcggtaaatttgccgtgtttaatgattaa

SEQ ID NO: 87883 - DNA, 717 bp, Enterobacter aerogenes
atgggcaatgaaaatccgctgcaggccgcagccggactgcatgacaaggatgagtctatctacgaggccttgctgaccgcgattgtcgagcaacaactgctgcctggcagcaaattgccggaagaggcgctggcggaggtgttcggcgtcagccgcacaggagtacgcaaagcgctgcaacgactcgccgctgtgcaaatggtgacattaacgcccaaacgtggtgcacaggtcgccagtccgacggttgacgaggcacgggaaatattccgcacccgtgcgctactggaagtagcgaatctgccggatgtacttcaacgctgccagcctccgcatctggcggcgctggaagccattattcagcaggagcaactggcgcatgaggcctatgatggcccggcggctatccgccattccgctaattttcatattcagttacaggccatttccggcaaccaggtgctaacggagatggtcacccggctcagtcaacgctcatcgctggtgattgccgcctggggcgcgccgtggcggcaagggtgccgctgcgatgaccacgagcgccttgtcggcctgttacgcgaaaaagcgctgaccgcgctgaccgaggcgctaaatcatcactttgaacacatcgtcgccagtttatttttttcccgcacgggggagtcggttcccgatttcgcccggctattcgccggctataaggagcggtaa

SEQ ID NO: 87884 - DNA, 1497 bp, Enterobacter aerogenes
atgccaaatacacaaaacacgcatcagctcaacgccggagacccggcatcaggctacagcccgcgtctttgcaacgaggatctggcgccgacgcgcgagcaaaactggaactggtacaacattttttctttctggatgtcggacgtgcatagcatgggcggctatgtagtggcggcgagtttctttacgctgggtctggcgagctggcaggtgcttatctgcctgttagccggaattgttatcgtccagctttgcgccaatctggtggccaaacccagccagattgccggcgtgccctatgcggtcatctgccgtcaggcgttcggcgtcttcggcgccaatattccagcggtgatacgcgggctgattgctttcgcctggtacgggatccaaacttatctggctgcgaacgccttaatgctggtgctgctgaagttctggccctcgctggcggcaatgacgcaaacgtcattgctgggtctttcatcgcttggctggatctgtttcgccaccatgtggctgttgcaggcgatggtgttctggcacggcatgagcgcgattaagcgctttattgatatcgccggcccggcggtatatgtggtgatgctggcgctggcgggctggattgtatacaaggcaggcctcgacggtatctcctttaccctcgccagtaagacgctgaccgccggcgagcaaagttggcagatgatcaccgccaccgcgctggtggtctcttacttctccggtccgctgctcaattttggcgatttctcccgttatgccagaagcatgggcgaaattcgccgcggtaaccgctgggggctgccgtttaattttctgctgttctcggtggtgactgtagtgatcgtctccgggacgcaatctttatttggccggatgatcaccgacccgattgaaacggtgagccatgtgggtaacgatctggcggtggccatcggcctgctgaccatgatcaccgccactatcggcatcaatattgtcgccaacttcgtctcgccggcatttgatttttccaactgcgcgccgcaaaaaatcagcttccgcaccggcgggatgattgccgccgtcggctcgatactgctcaccccgtggaatctgtttaactcccctgagcttatccactacaccctggatgtattgggagcgtttatcgggccgttgttcggcattctgctggttgatttctatttgattaaacgcgggcaggtatcgatcgacgatcttttcgatgataccccgaaaggcaaatactggtaccgcaacggctttaacccgaaggccatcgccgcgctgctgccctcggtggcggtcggcctgatcatcagctttattcccgctctgcatgaggtggccaattttagctggttcatcggcgtgctgttaagcggcagcctgtatcgctggattgcccgcgacgagcggcaggccgcttcctccgcccgctttacctccggcgcgctggcgcagaaagaataa

SEQ ID NO: 87885 - DNA, 1314 bp, Enterobacter aerogenes
atgctggaataccacaccgcgctacgcggtgctttttttgatattagccaacccgccgccagcgctgacgatatcgcccgctacgcacgatatattgatgatggcgtgctgtttatttacgccgggaagattcaggcgctactgccatggcaggaaggcgaagcattactcgatccacataaaggctatcgcgatctgcgcggtaaactgctgctgccggggtttgtcgacgcccatattcattatcctcaaaccgaaatgatcggcgcctttggcgaacagctgctggaatggctgaccacttataccttcccggtggaaagccagtttgccgatgaacggtacgcggcagatatcgcccgtttttttgtcaaccagttgctcagccatggcaccaccaccgcgctggtgttttgtacgcttcatccggcgtccgtggaggccctgtttaccgaggcgttgcgcctgaacatgcgcctgctggccggtaaggtgatgatggatcgccatacgccggagtatttaaccgaaaccgccgaacagagctatcgccagacccgcgaactgatccggcgctggcaccagcgaggccgtctgggctacgctattacgccgcgtttcgcccccacttccacaccggaactactacaagcagttcagcggctgcgggaggagtttcctgatacctggctgcatacccatctgagtgaaaaccttaatgaagttgcgtgggtaaagcagttatggccggagcatgagcactatcttgatgtttatcatcactatcaattgaccggagcgcgcagcgtcttcgcccacgggatacatctggcggagaaagagtggcggtgtctgcatgagaccggttcggcaatcgccttttgtcctacgtcaaacctgtttttaggtagcgggctatttcgcctgcccgccagctggcaacatcaggtccggatcggcatcggcagcgatgtgggcgccgggaccaccttcagcctgctgcgcaccctcggcgaggcctataaagtggcgcagctacagagctatcgcctgcgcgccagcgaagcgttttatcatgcgacgttgggcggcgcgcacgcgttacgcctggatgacaaaattggtaatttccagtcgggaaaagaggccgatttggtggttatcgacccggcggtgacgccgctacaaaagctgcgcggcgcacgctgtcatgatgtctatgagcagctgttcgtattgatgaccttaggcgatgaacgaaacattagtgagacctgggtcaatggccaacaggtatggtgtaacgaggactga

SEQ ID NO: 87886 - DNA, 327 bp, Enterobacter aerogenes
atgatcaccctgagcacccatattcttgatatttctaccggcaagcctgcacaaggcgtggcggtcaccctgttatgcgaagggcgcagcctggcgtcaggcgtgacggacagccatggccgcctgggcgagctggcgacgggacaactgcgtcccggaaactatcagttggtggccgaactgcaatcgtggtttgcgcgcgatggtcgtcagaccctgtaccggcaggcgcagatcgattttatgatcaccgccgaggacaacgaccattttcatctgccgtttttaatagcccccggcggctggtcgacctatcgcggaagttaa

SEQ ID NO: 87887 - DNA, 501 bp, Enterobacter aerogenes
atgataacactcaaccactttaatcagttgccgcaggcgcaagctctgcgactgctcgaaccctgcgtggcgctccccgcctggcgcgaagcgctggcgctggggcgaccctatgccacactgacggccttaacggatcgcgcgcaacaattgatgcagcactggggagaggcagatctggcgcgggcgctctgcgcccacccgcggatcggggaaaagccgacgggcggggaagcgcatgccgcgctgtctcgccaggagcaggcggaggttaatgccgacgatgccgatatcgcccgggcgctgaaagaagggaacgcccgttacgaagcccgctttgaccgcgtgtttctgatccgcgccaaaggacgcagcgccgccgagatcctgcaggcgctgacccaacggctgacgaataatgacgcgcaggaaattgaagcggcactggaacaattacgtgaaatcaccttactcagactggcgggagttattagcgaatga

SEQ ID NO: 87888 - DNA, 1440 bp, Enterobacter aerogenes
gtggcctgctttgtgcactacatcgtgaacgcttatccacgacgagacggtgaccccatgtctgatgaaaagaacagcaacctgctttatggcctggagcagcgcatcccgccgctgccggctttttttagcgccttacagcacgtgctggcagggctggtcggcattattacgccgccgctgattattggcgccgcgctggggcttggcgaatggctgccatatttaattagtatgtcgctaatggcttccgggattggcacctttctgcaggctaaccgcgtctgggggatcggtgcagggatgatctgtatgcagggcaccagcttcgcctttctcggcgtagcgattgccggcggcatgtgggtgaaagcgcagggaggcggcccgcaggacattatggccatgctgtttggcgtcaacgttgttgccgcgctggtaccggtcgtcgtcagccgctttatcgagccgctgaaaaaactttttaccccgattattaccggcagcgtcattgcgctgatcggcatcagcctgataaaggtcagtattattaactggagcggcggcgagcacgcgaaggatttcgccagcccgggcaatatcgcattgggcggcgtgaccttagggattatcgtggtgctgagctgcgcgaaaaaccgctggctgcgtttatcgtcggtggtcatcggtatggcggtgggctgtatcgctgccgcgctaagcggaaaatttcatctggcaccgatcggcgatagctggtttcgtctgccggcgatatttccttttggctttcagtttaatagcgccatatttttaccggtcgcgctggtatcgctggtttgcattcttgaagccgtcggcgatttaaccgccaactgcctgatctcaaaacaggccatcgatgacggcgtgtttcgttcgcgcctgaaaggcgggatcctcgcggatggcattagctgcctgatcgccgcggcgatctgcgcgtttcccaataccaccttcgcacagaataacggcgtcatccagatgaccggcgtcgccagccgctatgtcgggcgttatattggcgtattgctgattctgcttgggctgtttccgccattcggcgagatcctacgccagatccccacgccggtgttaggcggcgcgacgatggtcatgtttggctgtgtcgtggcggccgggatccgcattatcacccagaacccgctaacccgccgcgatatgctgattgttggcctggcatttggttttggcctcggcattgaggcggttcccgctttccttgcccatttcccgcctatcatcggcaacctgtttggatctgcggccaccagcggcgggctggtggcgattgtactgaatctgattattccgcaagagaaagccaccatgacggcagcggcaaggagcaatgatgataacactcaaccactttaa

SEQ ID NO: 87889 - DNA, 1155 bp, Enterobacter aerogenes
atgaaagcaatcgtgattggcgcgggaatcggcgggttgagcgccgcggtggcgctacgtaatgcaggcatcgcttgcgaagtgttcgaagcggtaaaagagattaagccggttggcgccgcgatctctatctggcccaacggcgtcaagtgtatgaaccgcctggggatgggcgagatcatcgacgcttatggcggcccgatgcattatctggcgtataaggagtatcaacacggggaaacactcacccgcttcagcctcgcgccgctggtagaacgtacgcagggccgcccttcgccagtgtcgcgaacggaactgcagcgcgagatgctcgatttctgggggcgtgagcaggtgcagttcggcaagcgggtcacccgcgtggaagaacataccgacggcgtcaccgtctggtttaccgatggtagcgaggcgcacggcgatatggtcatcgccgccgacggcagccattcggcgctgcggccatatgtgctcggctatacgccggaacgccgctatgccggttacgttaactggaatggtctggtcgatattgatgagtccattgcccccgccgatcagtggacgacgtttgtcggcgaaggcaaacgcgtgtcgctgatgccggtggcgggcggacgcttctacttcttcttcgatgtgccgttaccggccgggttagcggaagatcgcctcaccctgcgcgacgatttaacccgctacttcgccggctgggcgctgccggtgcaaaagcttatcgccgtactcgacccgcagaccaccaaccggatagaaattcacgatattgaaccttttgataagctggtgcgtggcaaggtggcgctactgggcgatgccgggcacagcaccacgccggatatcggccagggcggctgcgcggcgatggaggacgcggtcgtgctgggtaatgtactgcgcggcaatagcgatattgtcaccgcgctgcgccagtacgaagcattgcgttgtgaacgagtgcgtgacctggtgctcaaagcgcgtaaacgctgtgatatcacccacggtaaggatatggcgttaaccaaagcctggtatcaggaactgaaaacggaaaccggcgagcgtattatcaacggcttgtgcgaaaccattcagggcgggccattaggctga

SEQ ID NO: 87890 - DNA, 936 bp, Enterobacter aerogenes
atgagtcctttctcgcgctttgcgcattattttatggaagtggcccgcagcggcagcctgcgccgggcggcggaaaaactgcatatttcggcttcggcgattaaccgccagatactgcaggctgaagcgtccttcggcacgccgctgtttgaacggctgccggaaggtttgcggatgaccaccgcaggcgagctgttgtatgacaatctgctgcgctggcaaaaagagtttcgcgtgacccaacagaaatttgatgaactgcaggggctaaaacgcggaacggtgaatgtcggtatggtgcaggcgctggccgaagggagttttgccgcggcgctggcagagattatcaaccagtgcgagtggctggaactgatgttgcaggtcgccgatagccagagcatcagcgacagagtgcgtcaggccgatgtcgattttggtctgatcctcgatcctgaaggtcaggcgggtctcaacgtactggcgtttattgaaatggaagtcggggtggtactgcatccgcaccatccttttgccgccgcgcccgcgatctcgctgggggaacttagcgatgaacggcatattattcccggcgcgccgttaatagtgcatgaccgggtggcaatgctctatcgccattatgatttttcgccgcccaacaccgttagctgcaatgatattcgtctgattaaatcgctggtgcttaaaggcggcggggtgacggtcctgagcctgctggacgtgcaggacgaggtaaacaacggttcgctggcgtttgtgccgctacgtaataagctgctgcgccctttgaccctggcgctatgcaccgcgccatcgcgccagctatctcgtccggcgcaaatggcgattcaaaaactaacgctggtgatggaggagatgcgtagcgctgctcactctcagcctaatggcccgccctga

SEQ ID NO: 87891 - DNA, 1038 bp, Enterobacter aerogenes
atgaacagacaaccgctcacgccccccgcgcattgcacctttgaaccccaggactggctgcggctggcaaaatgctggcatccggtggcgcgcagcgctgatatcggcccgcaaccggtgaaagccaccctgctggatgaaaagctggttatctatcgcctgcacgaacgagtcgtggtcgcccgcgatgtctgtccccaccgcggggtaccattgacgttaggttttcatgacgcagaaggcattatttgcccttatcacggcctgcgctttggggaagatggccgctgtaaccgaatcccctccagcccaaatcagccaataccggctaaattaaatctgacctgctacgcggcggaagaacactatggtctggtgtgggtgtgtctcgattatgatgctgacaatcccccgcggttaccgaccatgccgcactgggcagacgacggattccagcaactgacctgcccggcgtttgaggtcaatggctttgcaggccgtcaggttgaagggtttcttgatgtggcgcattttgcgtggatccataccgacaccttcgccgatgcggagaatcaacaggttcctgactacctgcctgaggaaacggaaaacgggtttgtcgtcgactactggagcacggtcggcaattatccggcaagcgccggctaccgcgctccggagggatttcaatggctgcgtcgctttgagatgcatttgccctttaccgccaccctgacgattcattttcccggtgaggcccgactggttattatgaatgccgcctcgcccgtctcatcacgggtcacgcggatgtttgctccaatcgcccgcaatttcgatctgcatgtgccggtggaggaggtcttcgccttcaaccttcgcgtttttgaagaagaccggctgatggtcgagaaccaacgcccggagacgctacctctggatcttaccctggaagcacatattccagccgaccgtagctcaattgcctaccgtcgcggcttgaagcggctgggtttcggtgagtttttcctggtctga

SEQ ID NO: 87892 - DNA, 969 bp, Enterobacter aerogenes
atgagtactctaattgaggtggttgtcgatggtctctggcgtgaaggagaacataatctggcggtcaggctggtgacgcctgacggcgacccattacccgcatggcagcccggtgcccatatcgatctgcatctggcgaacggcgtgacccgtcagtactcactcaccgggagccatcgcaggctggaacgttatctgatttgcgtggcgagagcggcagaatcgcgcggcggttcgcgctacatccatgagacgctgagaccgggtcagaggctgatgatatcaccgccgagaaatcagtttgccctgcaaacggcgcgacacgtcaccctgctggccgccgggattggcattacgccgctgtatagcatggcgcgggcgttagcggcgcaaggaaagccatttaccttgcattattacctcaagcgccttgaaaacggcgccctggtagccgcgattgcccgcaagctggcacctgaaaacgtgaggatttatagctcagctgaaggcgagagcccacgagaaaatttgcctggaaggttgagcgttcctcatcgtgaagatcggctttacgtgtgtggtccggctggatttatggccgccgcgcgccaggcggcggcgatacaaggctggcaggccgagcagatccatgaggaggcgtttcaggcgtcaatgcccgccaacgacgttcggcaggaagagacgtttacggtgacgctcgcctcttctggccagtgctggcctgtcgccgccaatcaaaccatcgcgcaggtattgcaggaaaatggtgtggcagtgccgctctcctgtgagatggggatttgcggcgcctgtctgaccagggtggtcgagggagaggtggatcatcgtgatacggtgcagtcagcagcagaaaaatgcgccatcgtgcagcatgtcgcgctgtgctgctcccgcagccgcagcacgaatttgctcattgatttataa

SEQ ID NO: 87893 - DNA, 603 bp, Enterobacter aerogenes
atgaaatatattaccagaaaccttattttaagtgccgttgtttctcgaaaaatggacactaacgatccgcagcagcttgaaaagcttaaagacagattaaaagaccggatgggtattccggtcggctggcatatgtcaggaataccgctggtaggggctatgattctgagcatgttcgcttttgccctggctcaaccttatctctggttggcggtgttcgagctatttgggctgccgcagtatgccgtgatggcggcgattgtgcctgtatcgctaatttatagtctggtaatggtactgacgatgtacttcgttgccagaggcaattttctggcgcttaaattatcactggctttgatggcttttagcggtctggttgcgattgtttattttctttctgtttgcctgggggcattattcggcgccggactaaaaccaggatttctcattagcgccgtgctggggtttgtattcattttaggcggtatccgatgcattaatagccagactttttaccgtgcaaacgccctttatctacataacagggtctggcgaaaacagcttaatattcagcgccagacgctgcgcggcgcttcacgttag

SEQ ID NO: 87894 - DNA, 975 bp, Enterobacter aerogenes
atgacaatgcctggagagtttgcaaaaaacaatttacccgattatggttttgcaaggagtctgggactgacctcaggcaatgattttgattttaaggctctggccaatcaattggattgttcccgagattttaaccatgcaggtattatttattctgacggtagccagcagtggcttgttagaccgtccagaaatattgctcaggaaaataaaagcaccgtcacccacgttatcgttacccgaataaatgctcaaccttcggcatataatgccaccaaagcactaaatcatacgattcagacgccatccctggcaaacgagatcacctcaacggctatttcatgcggtgcggctgtcgtaacgggagttttggctgtcggcgcaggtgccgccgttccaataaccgcaggggcatccggtgttgttgctgcgattattactgcgggaacggtagctacagtcgcgcaatgttttattggtttaggtcgtattaccctgattgcaacagatcatgatgatgtagtcacatggctcgacagcgaatcatggtatgtggcaacaagtaccgcattagatattgtttcgcttgcgggtgccggagctgggctgagaagcacgatagaaacatataagatgatgaaagctagcacttcaacgaatgtgataacctggcttaaagggctaaaccgtgcggaacgtcgccgaattacggaagaaattattcgtgcgcaaaaccctggaatatcgaatacaggaatgaaagccgctatgcgtgcagggttttatcccaaacgctttccttctgatgccttacagcgaagcttacaacgtgaattaaccacggcggtagtgaatacctccgcatttgcgggtagcgccatgactggaacaatccgtaatccgcaaaatatgagggcctcaacacaatatgccattggccttattcagtcattctccttgttgggaactcattaa

SEQ ID NO: 87895 - DNA, 840 bp, Enterobacter aerogenes
atggcaatcgtgttgagaaaaatgcgggcctccgatattagcggtggcctgatgcttagccagcagatgggttggccgcatcgtcgtgaagactggctgtgcgccttcacgctaggtgagggtattgtggcggaaatagaaggcgaactctgtggcacgacgctatgctggcgctggggtcaacatcacgccactatcggcctggtgctggtggctaaacagctgcagggtaaagggcttggcaagaagctctttgccgctcaattagagaggctgggcagccgcactatccaactgcacgccacgcctgccggagaaccgttatatcgtaagtttggtttccgtccggcaggatttctccagcaatggcacgcccacgcattacctgccgttgcttcttcgggcatcgacatctctgccgcgacggtcgccgatatatcacagctagctctgttggatggcaaggcctggggcgcccaacgagagcgtcttatccgctggctgctggccaacgcgcaccttgccgttatccgcaatagtcaggagcagatttgcgcctgggccgcctgtcgccgcatgggccgaggctatgtaatcgggccggtggtggccagccaaagcgatcatgcgcaggcgttatgtgctagttttctgaccacgctcgccggcgagtttgtgcgcctcgattgtccggaaggccaacatgaatcgtttacccactggcttgggcaaaacgggttcacgctggcggatcggccgttggcaatggtgaagggggatatttgccgccacagccatgatgtacgtctgtttagcctgatgtcccaggcgatggggtaa

SEQ ID NO: 87896 - DNA, 1257 bp, Enterobacter aerogenes
atggcgtatttgaatcatctgttgacgtttattgaaagtaatccggcattagcgatcggctttaaccttattctgctggtcgtctccggcatctttgcccatcttttgtgcaagtttttgctgattaaagtgatacgcaaggtgttcttcgccagccataaacaggacgtaccgctggaaaaagaccgccgtatcgccgagaaactgtcaaacttcattccggttattatcgtctactatgttctgcagttcatgcccaatatgccggcatcactggtaacggcgattaataccatctgcggaattttgttttttatttttctgtcgatctttttcaacgaaatgctggatatcgtcaatagctcttatctgcgtaagaccaagcgcaaaaaccattccatcaaaggctatatccagataggcaaaatcttagttcacattctggccgcgattatgatcctcgccgtgatgtcgaataaatcaccggtgattatcatttccagcctcggcgccgtcgcggcggtgctgatgttagtgtttcaacataccttgctgtcgctggtggccaacgtccagctatcgtcaaacgatgtcctgcaactgggcgactggatcgaaatgccagacaagaacctgagcggggaagtgacggatatcgcgctgcataccattactatccgtaactgggacaacaccatttcgcgtattccgaccaagaatttccttacagaaacgtataccaactggcaggcgatgttctcgtccggcgcacgaaggatcatgcgcagtataaatatcgatcagcactcggtaaccttcctgaatcaggagatgttaaccccgatgctggcaatccgcggggtgagtgagccgctcagtaaattactggatggccgggatccgggcggcgtcgcggatcgctggtttattgataacgggttgactaacctgacgctgtttcgccattacctgatgagctatctcgccgaacggccagatatcattaaagatatgtacatcgtggcgcgaacgttaaaaccgtcgccgtccgggctgccgctggaaatctactgctttacctcctcgacgctgtggatggattacgagaacacccagtctgctatttttgaatacattaccgccgtggccgggcagttttcactgcgtctttaccagtatcccgccgggcatgatttctggcgcttatcgcaggaaaacgccagccgcgcgagttcgccgccgccaacagaggggtga

SEQ ID NO: 87897 - DNA, 450 bp, Enterobacter aerogenes
atgttcaaagcacttgccgccatcgtcgcactcaccgcatccgccagcgtcatggcgcaaagcgatgttacgctgacttcacttgccaaagataatgcgaccaaagcgtcgttcagccagatggtaaaaggccataagctcccggcctgggttaacagcggtggtaccggatccccggcacagaccgtgaaactgggttctgaatcctggcaggtattaagcgcctgtaaaccacacgattgtggaagcgaacgtatcgccgtgatctggtctgaaaaatccaaacagatggcgggcgtcttctcagtggttgatgagaagacatcgcaggaaaaactgacctggcttaacgtcagcgatgcgctgtcgattgatggtaaaaccgtgttgtttgccgcgctgagcggcagccttgaaaaccatcctgacgcgtttaattacccgcaataa

SEQ ID NO: 87898 - DNA, 588 bp, Enterobacter aerogenes
atgccatacctgaacatcattctcgggaagcctttttacgatctcctgcagcatggccgggagatagaccgcgctattgcgcgccgggacggcacctcactgaatcactccacgccagaacttgaacgctacttttcgcgtccacctggcgaacgtccccggcaaaacccatttccggtcgccgcgctattcccactgttcttagtggcttttgcattcaatctgctaccatttttgcagacgctcccgccattctctgcgccgatacgggtagcgagtttctttgtacctgcgctagtggtggttattgttctgttgaccagcggcgtgttgctggctcgcggttataccctcgggctgaagggatttctggcgctatttcttctcctctcagcgtcaacggcggcgcaagcgttgagagcgatggtcagcgcaggtgaaagtctctggccgctggcgttcgccgcgctggcattactgtgttgccggctaatatttaaccgccagggattcgtgctgttcacgatttattgtcgtagccagcggttggctcttctcgcgggcaaactacgccggcagcgcaaatag

SEQ ID NO: 87899 - DNA, 393 bp, Enterobacter aerogenes
atgtttgctaactgccagctattcggtgtcgatttagccttccccgacgtctgtctgaccccgatgccagcgccgacgccaattccctatccggacatcgcgctggggccgacggcgatccctaacgcgctcaatattctgtttatgggcatgcccgcgcacaatatggcgacggtgacgccgctcaccaacggcgataaccccggcgtggcgaccggggtggcgtcaggtacggtgatggggccgtcgcgtcatctgaccggtgcatttaccgtgttgttaaaaggcacgccggcgacgcgtctaaccagcgttagcctgcaaaattcgacaaatgcggtcggtatgcgcatcgtccccagccagttcaaggtattgatgctggcgccgtag

SEQ ID NO: 87900 - DNA, 606 bp, Enterobacter aerogenes
atgacaaccattaatcacaaactggcccaggcggcgatgccgccggcgcaggcttccggcacggtgacccattgctttgccgacggcagcgtgaccgtcgagagcgaagggcgcggctggcactgtcggcgagcggtcagttgtctgatcgcgccgcaggctggggatcgcgtactcatcagcagcgtggacaaccagatctggctgttagcggtgctggagcgtgatgaaagccgccaggcggagctcagcgtaccgggtgacctgcatattcaaagccagggggaactcagcctcagcggtcagcggctgtgcgtcaatgccgcgcagggggactgccatatcagcgagatgaactacagcggcgataagctatcggcatgggtgacactgtcacgtattgttggcaaacgcgccgaatcggtctggcaaacggtgacgcaaattagccacaatctgctgcgcactacccggcagaccgagcaggtgcgcgccgggcagctggatatgaaagcggaagattacgcccgcctgcatgcgcacaatacggttatcacctcaaaagcgatcaccaaagtcgattcagaacagatccacatgggctaa

SEQ ID NO: 87901 - DNA, 1071 bp, Enterobacter aerogenes
atgacgatactgagcccggaggagatcgttcagcgcatcaaaaacggcgagccactcaatgaaatatcgctggatggtatcaacctgcagggctgcgatctctccggcggtctgtttcaggaggtgtcgctacgcggcgctaatctgcaaaacgccaatttgcatgaaaccctgtttaccgagtgccagctgcagaacctgcagctgcaaggcgcccaacttaagcagacgaccttcaatcagtgtgaaatggcccatcttcaggccgccgaaaccgcgcttgatagttgcgtgtttaatcagtgcgacctgcaagagagcgatttctcggcgacgacgctgcaaagcagccagtttatgcgttgccagatgagcaggagccgttttcgcggttcaacgctggaacgcagcgtgttttatgaggctgatctgacacacgccagctttgcgcaaagccgcggcctgttgaccaccttttaccatatcgatttgcgggacaccgcgctggacggaatgcagtgcgaccggctggtgtttttccagtgcgatcagcgcggcaaagactattcaaggcagggttttaccggctgccagttcaccgattgtccgctggacggcgcgaagtttaacggcgcccagctaacccagtgcaatttcaaaggcgcgtcattgcgtgaagcagagttcaatcaggtgaacgccagccaggcgctgtttatggaggccgatctgcgcggcgcccagtgtcgcggcagcctgttcgaccaggcgatatttgttggcgcgctcctggagcaggccgactttagccagagcaggttgttccagagtgttttacagcgggttcaggccgccggggcgcgattcgcgctctgcgatctgacgtggagcgatttttccgctgccgacctgcgtcaggcggatctgcgcggcgcgaccttttcccgtacccggctgcatcgcgcccgccaggacgaagcgctgtttaccggccgccaggggatcctggaatacgatgaagagttattagccgctgaggcgtggagcgcccagcgccacagccgttgttaa

SEQ ID NO: 87902 - DNA, 2541 bp, Enterobacter aerogenes
atgaaaatcattaaacccttacgcctgagcgtactgaaccggccattccgctggcagggcaaaaattatcttggcgtttcggtgctggcgttggcggatatggggccaaacccccagctgcgccccgagatggaactgtggcagcttgccgccgacgaactacaaaccagcggcggcgtggtggatatggccatccctaaagtccgcgccgaatttcttgccaccggttttgcctatacccatcatcagcaggaaaaaagcgcctgcgtggcgcgcatcgatatcgacaaactgagtaagtcgttggtggtgttcggcgatcgccagtggacggggcaacgtatgacccgaccgcagccgtttagcgaaatgcgcctcgactggagccgcgcctttggcggcggtgattatgccgacaacccgcacgggcttggtgtcgcgccggtaaaacagcaggggcgcgaacatcatcctctgccgaatattgaaccgctggagggaagagtaagctcgccgcagcagaaaccgcagccggcaagttttggcccgctggatattcagtggccgcggcgctttagccgtatgggcaaaaaatatgatgccagttggctacaacaggattttcccggttttgccagcgatattgactggaaagtctttaacgccgccagcccggaccaatggtgggaggatcgggataccttgccgccaggggcgaaatggcggatctggaatatgcatcctgagaaaccaatgcaggagggccagctgccgccgtggcaggctcgctgttttattcatcgccagcgcgcggatgaaacgctatttgaagaaattgccttacgcgccaccacggtatggttctttccccatcgggaacagatgatgcttatctggcaggggcacattcgtatcaatgaagacgatgccgccgacgtcctgcagctgatcccggcgctggaaaaagagggcgccgcccgttcgcttaatcactatcgcaaggtactggcccagcgaatggataaagagaagggcgcgctcttctccttccgcgaaaaggatctcataccggaagagaccatcggcccgtggatcgacaatgaaattgaacagtcgccgagtccgcagcaggagaatatgaaaaaccgcgcccgtctgctgcgtgaacagcaccgcgccgccattgaagccagcggcggtgatatcgatagcctgttggcggatatcgacgaacccacgttgcctaagcttgaagacctgccggagtttatcgccgacatggagcgtcaggcgcaggaaatggagaatgatgcacaacagcgcaagcgtgagatggaggcgcactatccgcagttgaataacgatgaaaaccaaccgcgcggccccgaatccatgcaccggatgcaggagatgctgcatcagcaccagcacgaactgagcgagaaaaagcgcgcgcaaacgcgcgaggcgctacatcagatgtacctggccgcggtgcagcatcagccgccggcggtccggctgaagggcgatctggcgatgatcctgcgccaacgcgccgagcgtaccatggcgcagggcggcaattttagcgggatggatctgaccggcgttgatttttccggcatggattttcgcggcgccaattttgaaaaggcgttactggaatgcgcggacctcagccactgtcagctggataacgcctcttttcagggggccgtgctggccagaacggagctacagcattcgtcgctgcgtaactgtgattttagcggcgccagcctggtactggcggagtgccatcaaagcgacttcaccggcgctcgctttgaagatagtcagctacagaacgcgctgtttgcgcaatgcattttcgataatgcgacgctaaaaacgctgatccttcgggaaatcagcctgattgactgccgttttcatcgcgccgagctggatggctgcgtctttatggaactgacgctggcacaacctgatttcagccacgcgcggctgcacaaatgctcgtttttacaatctgaactggagcatgccattttccatcaggcgacgctggaaagctgttctctggtgcagaccatcgcggagcgcgctgattttagcgctgcaacatggctagccagcgctgcggtgtcggaaagctcacttatcggcgccgacttcagccacgctacgctgcagcagagcaatttacgccagacgccattacagggcgcgcgctttgcgctggcaaaaatcgaaaacagcgatctgagtgaggcctattgccgtgatgccagctttatacgcgcgaatctggtcggcagtctgtttgttcgcaccgattttcgcgaggccgattttaccgacgccaatctgatgggcgcgttgctgcaaaaaagccagcttgccggagccaatttcgaaggcgccaacctgttccgcgccgatctttcacaatcctttaccagtaaaaccacgcggctggacggcgcatggaccaaacgcattaaaaccctgccgaagcgcgatggagaagtgatatga

SEQ ID NO: 87903 - DNA, 372 bp, Enterobacter aerogenes
atggaaatcgtctctaccatagtgctaaccatggcatgggccattccgctggtagtattgctctttgtggcctgggttgcgatgcagaatatacgttctgcgcgacaagataaaaaaacgaaaatgaatggtgtcaatgttaaggccaccatcctgcagatcaaatacgatcgcgaccagcgaattaataatcactactcagccattttgacccttcgttatcattggcatgagcaagaactgcagggcatccgcggcgttatattccccgcgcaagaccaatctgaggttcaggtgaatcaattaatcaatattcgcgttcaccaggacgacccacaacatttctactacctcgattatcgtaatgtctga

SEQ ID NO: 87904 - DNA, 381 bp, Enterobacter aerogenes
atggatatactcttttttatcgtcatggggctgattgtcctggtgtttggtatctatcccatggcccgttttctttatcaggatttttacccgtatttaaaggatagtttcacccacagtgaggtcctgcaatccggcattgcggtcaacgcggatataattgccgcacaccagaccagcgcctggagcggaagtaaaccgatctatcgtatcacctttaaatttaagacccgcgagcaggtggaagttcaagctagcctgaatcacaccctgaatttcagcgacattgaacgttttaagccgggtaatggcacaacgattaaatacgatccggcgaacccgcagagaattgcgctatacgacaggccgctttttttgtaa

SEQ ID NO: 87905 - DNA, 399 bp, Enterobacter aerogenes
atgtcatttgaaaaatggatcaccaatatgtctccaagggaaatgatacccgtgattattggtttatcagtaagtatattattcatgatggccacctatttcacattcagaaagtcatcgttacaactaaagtcagtgaaaatctatttaaaacgcgaacgctggcgaggagacttactgagttcgcggattgaattctggcaacaaactaatgtaatgctcggtaataatctatttttcgatatatattttcgcatcgatgaaatgcctcaattattttgcgccaaggcgctgattgcaccagcacaaatacatctattacgtaaagggctgtccattgtcgttaagaaaggacgcggcaataagattgctattatgcaaatcggtgatgtgggttaa

SEQ ID NO: 87906 - DNA, 348 bp, Enterobacter aerogenes
atgtttgactctatgtggggaacattaatattagccgttttaattttgtttggtttgttcttatattgttatcgttcaggctccaattatgataagtttaaggcaaatggcattcgtaccgaggctaaaatattaagcatggaaaaaattggcgcgagtggcggagggagcactaaacttaaaatggaattatctttcaatactgactcaggtctggtgacggcaacggctaaacagtatatttccccgcaaaatatggtaaaaatcatgagaaacaatactatttacatctactacatgcctgataatcccaaagagttattaccaacaccttgggagatggagtga

SEQ ID NO: 87907 - DNA, 390 bp, Enterobacter aerogenes
atgaactttatttatcaacactctttgttaattgttattgcatcggttgcatttagcttttttctattgttcggttcgctgcgaagtctcaaaggacagggcggggaccttactgaaataaaaaactggctaagccgtgagcgctggcccggtgagataaaaaacgcatctctggtaagttggcgtcaaactaacgcgaccaataatttcgattattatttcgtatttacctttgaggcgaacattgagggtacgacaaaacagtataatgctgctgccgtggtacgtgcttcagaaatccccaaattaaaaccggggcttcaattaactataaagcatgagggcgttccgccaaaacgaatggctgttatggatgtggattatgaataa

SEQ ID NO: 87908 - DNA, 387 bp, Enterobacter aerogenes
atggattttctaaatacaaaatggttttatattctgcttgtggcatgccttatagcactctatattattgggcggaattttcgtagttccgttatccctatgatcaaggctgggtttattgaaagcgctgttcttaaaacaggaatcgcagtaaatgccgatattattgcatctcatcaaactagtatgtggggtggaaataagccaatataccatttgaccttaaaatttaacactcttgaaggtgttgaaaccgaagcgagtgttgatatggggctaagctttgaagaaattgagagatttaaacccggcaatgggacaacaataaaatacgacgctaaaaatcctaaacgaatcgcaatttatgacagaccattatttttataa

SEQ ID NO: 87909 - DNA, 378 bp, Enterobacter aerogenes
atgaatgtcatcacggaaccatcttttatctttggcattgtggtgacaatcatagcattaggtatatcatttgctgccttcaaaccgaataaaactgaagtttcagcaattaaaaactggttgtcgagagataagtggtccggtcaaacaatccaggttccgctagaatcatggcgtcagacagaaacaaagtacggcaatgattatatttatgatttctattttaatgcaaatataaacggttctgtaaaaaaatacattgcgaaaggcattgtaagacccgatgatattcataaattaaagaaaggaatgttattatcagtaaagtacagtaataacacgcctgtaaagatagcggttacttccgttaattattaa

SEQ ID NO: 87910 - DNA, 333 bp, Enterobacter aerogenes
atgtggtctatctttataaccattttagttttggggtggttcttatacagtataatgaagtcaggaaataatgatgagaagtttcgtaaggaaggcattaaagttgaagctaaaatcattagtaaacaacatataagtacctctggcaccggaaatatgaaatttaagtttgaattggaatttatgactcccgatggaattgtcgtcacatatgctcgtcgctttataactccggaagaaatggttaaaattggtaggaaaaatacagtttttttatattacctcccaggtgcccctgaaaaagtctaccttgttcctggagatatggagtaa

SEQ ID NO: 87911 - DNA, 375 bp, Enterobacter aerogenes
atgaatttcctttctgaacactcaggacctattgcgttaggtgtaatgttgatattcatcttcatctgtctcagaggattaaagggacagaaggaagattttagtgaaataagaaattgggttgcaagagacaactggaacggcgaattagcaacaggaaaattaaaagaatggaaacaaacatcaactaccaataattttgaccatttctatatttttactatcgagtctaatttgagtggtgaagctcaaacatataaagcagcaactgtgttaaagacctctgaagtcattaaattaaaaaaggatatgcctgtaatgttcaaataccagggagtacccccaaaaaaaacagcagtcatgagcgtaggctag

SEQ ID NO: 87912 - DNA, 2397 bp, Enterobacter aerogenes
atgtctaacaggatcaccgttcagctccccgttgaggggctgcttttctggaaactcagcggacatgaagccatgtcggaaatgttcgagctcagcttaacgctgcttggcagcgatgcgcgtctggatcgcagcaagctgcttggccagccggtcaccgtaaccattccgacgcaaaacgcgctgagttcgcgttatttcaacggtaaaattacccgcgtggcggtgagcgccgttgaactgagcggtatccgctacgccgtttaccaactgatcgttgaacccgacttatggccgatgaaacgcgaccgcaacctgcgtatattccaggggcagacggtaccgcagatcatcaatacgttgctgagtgaataccaggtcaacgttgaggataagctgaacggcagttaccgcgtctgggattactgcgtccagtatcaggaaagtagtttcgcctttatcagccgcctgatggagctggaggggattgcctaccatttccgtcacgaggcgggtaaacatacgatggttctgaccgattcagccacccagcatcaaccggtaagcggctatgaaaccattccctaccaccagacggcatcgggcggtattaccactgaagaggggatcggtcagtgggcgctggaagatagcgtgacgccggggatttacagcctcgatgactatgatttccgtaaacctaacgcctggctgtttcaggcgcggcagaacccggcatcgccctctccgggcagtatcgacgtgtacgactggccggggcggtttgtcgatcacggacacggtgaattctacgcccgtatccgccaggagcgctggcaggtagaacatcagcaaattcaggcgtccgccaccgcggtgggcatcgctcccggcgcaacgtttaccctaaccaatgcgccattctttagcgataacggcgaatatttgacgacctccgcagattacttatttgaagagaacagctacgccagcggcggtaatagcgatatctcgcaccaaatccattttagagtgatcccctcttcggtagtctatcgcccggcgcaggtaaccgactggccgcgcacctatggcccgcagacggcgaaagttgtcgggcctgaaggggaaagcatctggaccgacaggtatggacgcatcaaagtgaagtttcactgggaccgccacgccaaaggcgatgacaccagctcatgctgggttcgcgtgtcgagcgcctgggcaggccagggctttggcggagtgcaaattccccgcgtcggcgatgaagtggtcattgattttatcaacggcgatcctgaccgcccgatcgtcaccggacgtgtgtataatgaagccagcatgccgccatgggatctccccggcgacgccacccggatgggctttatgacgcggagtaaggatgggaatcaggacaatgccagttacctgttttttgaagataagcttggtgaagagtccgtcgatttgcattctgaaaaaaatatgaacgtgtctgttgaagggatgcacaatgaagttgttcatcagcaaacgatctattcacatctaaatacgcgttccactagtgtggtaggccacgatacgcaaacctttaatgccgggcaaaccatcgctatcacggctaatggacgtaatgaaagcattgtcgatagtgaaacaaaatcggttacgggttattcaagtaatagttataccggcaatgtggtaaccgaaagcggtgatacggttagcactttggcggcatcgaagataatgtacgaaacgccagatgttatctttggtcaggttgtcgatgccaaaggtacagaaagtgcagttcccaatataccttttgatattaaaaataccgctgggcagattatggctgcaccagggaccaagctctacgcaacagattatttggcagcagcctctacaagcgcagtttccgctgccaccagagtgacatacaaaaaaggggttgtaacgcatatccaaggtattgacaaacttaccgtggataataatcaaatagtagacgttaaagggaatgttgctagaaatatcctgggtgaacttaatgaaacggttcaaggcaaaatatctattaactcaccattaaaaatatctataaaaagcgatactaaagtagaaattgtttcccctgaggggttgttcactaacaagggaataagtgtatcattaaatggcacaacacactccttcaacggacttagcacatctgtgaatggtgcatcgtttagttggacaccattaaacatgccaacgtcattagcaagtattgtccactctccaatgaatgtaactagatctctaacaaaaatagaatcttcattgcagaatgtagttattggttttatccacatgtttatgtaa

SEQ ID NO: 87913 - DNA, 375 bp, Enterobacter aerogenes
atgagtatttttactaacgtaatcgttctggccgtggtcctactgtttatttatatttttgcgtcattgctgattcgcgatgcgaaaaataaaaaactcaaagcggctatccacaatgatggcgttgcggtatctggcaccatcacaaatgtgagaagccgctcgggcggtaattccgggtttattaatattagcgtcgattttaattacgttaacgaaaaaggtgaattgctgaccggtcagcgggatatcgttattgatattacgcgtatccaaaactttcaaccgggaaagccgattccgttacgctacttgcgccttgacccgcaacaggtgctggtcgatctgccgaacccactgttaacgcgcagctag

SEQ ID NO: 87914 - DNA, 1425 bp, Enterobacter aerogenes
atgacggatcacgaaaacaatcggactgtcctgaacgcgctgccggtcgggtatcgttttaacgaatttgaaataaaggaagtgattggcggcggcggtttcggcattgtgtatcgcgcctgggaccatcagctggaacgtaccatcgcgataaaagagtttatgccttcgtcgctggcggtacgtaacgaagatatgaccctggtactgcgtagcgaacgcttcagcaaagcgttctccgccggattaaacagctttatccaggaggcgaggctgctggcgcgctttaatcatcccaacttgctgcacgtgctgcgcttttgggttcagaacgacaccgcctatatgggcacgctgttttatagcggcaccaccttgagccgcctgcgcgagcagcagccaaacctcatcgatgaggcatggatccgtcggatgctgccgatgctattcggcgccattaaaaccattcacgacgccggctatttgcaccgtgatatctcaccggaaaatatccagatccaggataacggcctgccggtgctactcgatttcggttcggcgcgccgcaccatcggtaatctctccgacgaaaccgaaaccatgctgcgcccgggttatgcgcctatcgagcagtataccgacgataatgacagcgaacagggcgcctggaccgatatttatgccgtcggcgcggtgctgcatacgctgatcgtgggttcaccgccgccggtgagcgtggtgcggagtattcaggacaactatcagccgctggcggaactgaagccggcgggttactcgctgccgctgctacaggcggtggataaagctctggcgctgcgggtggaagatcgtccccagtcaatcgacgcgtttgccgagctgattgaaatgccggtgtccagtatcgatgacgtcttgtcggtcaaaaaaaccggcaccatgctggcgctggtcgaagaggaagaacaggcgccggccgcgacagactggcggcgctataaggttccggggatggtcgccgcaggcgtactggtcggtattattgccggcggtatgctgttcagcggcggcggcagcgaggcgcaacctgcacagagcgccagcacccagccgccagcggcggttacgccgccggtaccaacgcagaccgctaacgcgcagcccgctccgcccgttgccgttaaagagagcaaacctgcagcggcggcggcgcctgttgctcaggtttacgtgcgcatgcgggaaggggaaaagctcaaactcaatggcgaaccacataatacgcaaccggccacaaacggcttcgcctcgctgaaactggcgccgggacattatgaaattaccctgcagggtaatggacaaacccgcgagcagacgctggagatcgccaaaccgggaacctggcttattaatccatcgagctga

SEQ ID NO: 87915 - DNA, 2613 bp, Enterobacter aerogenes
atgtcagaaatcagccgtgccgtactcttcggcaaactggatacgctgttgtttacctcgctggaaagcgcaaccgccttttgtaaactgcgcggcaacccttacgttgagctggtgcactggctgcatcagctgatgcagcagcaggacggcgacctgcaacacattatccgccatttcgcccttgatgagcaggcgctgacccgcgatatcatcgcggccctggatgcgctgccgcgcggcgccagctctgtctccgacctttctgagcatatcgatagcgccgtcgaacgcgcgtgggtttatggctcgctgaaatatggcgtcaaccgcatccgcggcggccatttgttaatagggctgctgaaaacctggaatctggctaacgttctgaaaggcatttcgccgcagtttagcaaaatcaatgtcgatgccttgagcgagagctttgagacgttgctggccgccagtaaagagagccagcaggcggcggtggaggcggccaacacgagcgcgacgccgacggcgcagggtacgctggcccagtacggacagaacctgacgctgcgggcgcaggagggcaaaatcgatccggtggttggccgcgatgaagagatccgccagatggtggatatcctgatgcggcgcaggcagaacaacccgctgctgaccggggaggctggcgtcggtaaaaccgcggtggtggaggggctggcgcggcggatcgccgcaggcgatgtcccgcagccgttgcgtaatattgagctgtggctgctggacatcggtatgctgcaggccggtgcgggcatgaaaggcgaatttgaagcccgtcttcaggcgttaattaacgaagtgcaatccagcccgacgccgatcgtgctgtttattgacgagatccacaccctgattggcgcaggcggccagcagggcaccggcgatgcggcgaacctgctgaaaccggcgctggcgcgcggacagttacgcaccatcggcgcgaccacctgggcggagtacaaaaaatatattgaaaaagatccggcgctgacccgccgtttccagacggtgcagatccacgagccggatgaagataaagcgttgctgatgctgcgcagtaccgtatcgccgctggagaaacaccatcgggtgctgctgcttgatgaagctgtcaacgcggcggtgaagctgtcgcatcgttatattcccgcgcggcagttgccggataaagcggtcgcgttgctggataccgcctgcgcccgcgtcgccgtcagccaaagcgcgccgccgccgcagttggaagattgcctgcagcgcattgccgccctggatgtggaattggagattgcccaacgcgagaaccgggtggcgattggcgatgctcagcgcattgagcaactcaagcaggcgcgtcagcagcaggaaactgaacgcgataccttgagtcgtcgctgggagcaagaacgcgcgttggttgatgaagtcatcgcgttgcgcgcgcaattgcaggaggctgatgacgacgcccagccggcgctgcgccagacgcttaatgaaaaacagctggcgctaaaaaccctgcagggtgagatgccgctgctgttcgcggcggtagatgagaacgtggtggcggcggtggtcgctgactggaccggcattccgctggggcggatggtcaaaaatgaaattgacgccgtactgagcctggccgacacgctcaaccagcgagtgattggccaacgccacgggctggatctgatcgccaaacgtgtgcgcacttcacgcgcgcggctcgacgatcccaataagccggtcggggtctttatgctttgcgggccatccggcgtaggtaagaccgaaaccgcgctggcgctggcggaatcgctgtacggcggcgaacagaacgttatcaccatcaacatgagtgagttccaggaggcgcataccgtctcgaccctgaagggcgcgccgccgggttacgtgggttacggcgaaggcggggtgctgactgaagcggtacgccgccgcccgtatagcgtggtgctgctggatgaaatcgagaaggcgcatccggacgtgcacgaaatcttcttccaggtgtttgataaaggctggatggaagacggtgaaggccgccatatcgatttccgcaacacaatcattatcttaacgtctaacgtcggtaccgagctgattagcgcaatgtgcgccgatccggatctgatgcccgagccggaagcgctgagcggcgcgctgcgtcagccgctgttacaggtcttcccgccagcgctgcttggccgcctgttggtggtgccgtactacccgctgagcgatgcgatgctggggcaaatcgtgcgtctgcagctggcgcgtattcagcgccgtctgcaggacaatcacaacattgtctgtgagattgacgacagcgtcgtcgagcaggtggttcagcgttgtaccgaagtggaatccggcgggcgtatggtcgatgcgattctgaccaacacgctgctgccgcagatgagccaaattctgttaaccgccaaccgtaacgatgagcagtttacgcaactgcgcatcagctatgcgcaaggcgagtttcattgtcagtttgccgcgtaa

SEQ ID NO: 87916 - DNA, 1044 bp, Enterobacter aerogenes
atgagtgacacgttggctaccattcatcgcctgacgccgctggcggacgttttctggcgcgaggttaccgccgcgccctggcgctacgatctttttcatctgctgcgccgcattgacgcacaagggggcgaacgttatccgcttgggcgcgcgccgctgccgaaatttgaatcgctgcgcatcgggcaaacgccatcaatggggtttgcccccgcgacgctggccagcgcgcaaaaacgggcaaatagcgcggtgcatgagatatcgattctcagcttcggtctgttcggccccaatggcccgctgccggttcatatgaccgaatacgcccgcgagcgtattcatcatcatcaggacgacagcctgagcgcttttgccgatctctttcatcaccgcctgacgctactgttctaccgcgcctgggccgacgcgcagccaacggtatcgttagaccgtgcggacaaccgccgctttgagcgctatctcgcctcactcatcggcatgggccagccggggcaactggagaagggcgacctgagcccgcatgcgcgtttcacccacgcaggccatctcagccgccatggtcgggatccggaagggctggagaagatcctgcgaaattacttcaaagtcccggtcaacattatcaacaacgtgccgcaatggatgccgctgacctcgcgagaacaagcgcaactgggggcgggaaggcgtttacctcgcctgggcgtctcggcgtttctcggcgtcgcggtacgcgatgttcagcataaattccgccttgaaatcggcccgcttagcgccgccgaatacgcccgttttctgccgggcgaaaacgcggtaaacgaattacgcgactggatccgccagtatcttgggatcgaatatgcatgggatgtcagggtacttatccgcggcgatgaaataaccggtacggtcctcagcggcgacggcaaactgggttacagcacctggcttggccaccagccagcccccgcgccgcgtggcgatttagtgtttagcgtggagcagagcgacgcttga

SEQ ID NO: 87917 - DNA, 1872 bp, Enterobacter aerogenes
atggaaggcaaactgcttgaatattacaaccgcgagctggcctatctgcgtgagatgggcgctgaattcgccgaacgctatccgaaggttgccggcaggttgggcatgcgcggtattgaggtcgccgatccttacgttgagcggatgatggaggggttcgcctttctgacttcccgcgtgcagctaaaaatggacgccgaattcccgcgtttttcacagcgcctgctggagatgatcgcgcccaattatctggcgcctacgccgtcgatggcgattgccgaactgcagccggacatcaataaaggcgatctgagtaaaggtttcgtggtgccgcgcggtacgatgatggacagccaggtactgaagaaaaacggcgtcacctgtagctataccaccgcgcacgatgtcacgctgttgccgctgcgtattgagaaagccgaacttggcgggatccccgccgatgtgccgctggccgcgcttgggctcagccagcgcggcgccgtcagcgctttgcgcctgcgtataagctgtgaaggggctcaacatcttggtcatctgacctttgaccggctggcgtttttcttaagcggcccggatattgaggcgctgcgcctgctggagctgattcttgcccaccaggtcggcgtggtgtgccagaccaccgggcgcgatccgctgcgtttttcgctgagcgaagaggctatccaacaagagggtttcgccgccaatcaggcgctgttaccggaagatcttcgcaattttgacggctaccggttgctgcacgaatactttgccttcccggcgcgcttccgctttatcagtattaacggcctgagcaagctaattgggcagtgcaaggaagaaaaatccttcgatatcattattctgctggataaaaccgacgaccgcctggaacaagtggtggaagctaaccacttcgcgttgcactgcacgccggtgattaacctgtttccgaaaatcgccgcccgccagtcgctgagcgacagccaacatgaataccatctggtggtcgataacatccgcccgctggattatgaaatctattcggtgagtaaaattcacggcagtgccgatggccaccgcgacgatcgcgagttccgtccattctggagttcatggagcaaggatgccggagattacggcgcttatttttcactgcgccgcgaacagcgggtgctttccgaacacgcgctgcgctatggcacgcgtaccggctataccggctctgagacctttgtctcactggtcgatgagcagcatgcgccgtggcaggaagatctgcgttacatcaccgccgaggtgctgtgcaccagccgcgacctgccgttgatgctacaacaggagctggggcaattcgtgctggcggattcgctaccggtaaaaacattgaaaatgcgtagcggcccgacgccgccgcgaccggcgctggcggaagggcttagcacctggcggctgataagccagctgcagatgaactatctcagcctgatggacggtgaaaatggcgaaggcgcagcagcgctgcgccagttgcttgggctgtatgccgggctggcggagaccgccgtggcccgccaaatcgaaggggtacgccactgcgtgctggagccggttcatcgccgggtgccggagccggggccgatcgtcttcgcccgcggtatcggcattaccttaaccgttgacgagcgcgctttttccggcgccagcccgtggctgtttggtagcgtactggaacgggtctttgcccggctggtgtcgctcaacagctttaccgaattcaccttatgtagccagcagcgcggcgaaatcggttactgggcgccgcgaatggggaaaagggcgctgatatga

SEQ ID NO: 87918 - DNA, 564 bp, Enterobacter aerogenes
atgaacaaaccggtacgcgacggtgacgcgctgcgcagcggctggcaggcgcgtagcaaacaagagaccattggtgcccgcgataagatgcagccgtcgctgctcgaccgcctgaccgataatcagccgcagaaaaaatcggagccgcttaacagcaacctgatcacccacagtacgctgcgccgtcacgtgctgcgcgatctgcagtggctgtttaataccatcaatcatgacgatccgcaggcgttggacgcgctggcgcacgtgcgccgttcggtggttaatttcggcgtcgcgccgctggccgggaaacggatgtcggatattgagtggcaggatattcagcgcaaacttaccgaggcgattatcagcttcgaaccgcgcattctgccgcaggggctgcaggtccgctgtatttctgatacccagtcactggatttacataatgtcctgtcgattgaaattaaagggcggctgtggtgcgtaccgtatccattagagtttctgttccgtaccgatgtggatctcgaaaatggccactttgaattgaaagacgcggggtaa

SEQ ID NO: 87919 - DNA, 795 bp, Enterobacter aerogenes
atgaacacgctatatcaacagctggctggcgaaagcgtcggcgcgacgctgcaacgcctggaaagcgagatcaaaagccgtcccgccgatgccgatttacgtgcggcgttcgttcagtttctatgcctgagcggtaactggacgcgcgcgttggcgcagctaaaaagctggctggcgctgaagccgcaggcccagccaacggtcaccctgctggaacagagcattcagggcgagcagcagcgcgatgcggtatttgctggcagcgcccgcccgcagatgccggacagccagtggccgtggctgtctgcgctggcctccgcgctttgttccgattcagaaaccgcccagcgacagcggctggccgcctttgaacaggcgccccttaatcctggtaatctcaatcagacggatacccccgcggtcgcttttcactggttgatggacggcgacgcgcgtctgggcccggtttgcgaacttatcgtcaatggccggtattgctggctgccgttcgccgctatcgccgaaattcgttttcaggccccggcgagcgtcaccgatctggtgtggcgccatgcgctggtgcgcctgaccgatggaagcgagcaggtgtgtcagatccccgcgcgttaccctgtcacgccgcaggcggaagcacgcttccagttaggccgcgccaccgagtggcagccgctggacgacgaaggcgcgctgtatcagggccacgggcagaaagtgtggcttaacgataacgatgaattcccgattctctctctcgacgtggtgagttttgcatga

SEQ ID NO: 87920 - DNA, 984 bp, Enterobacter aerogenes
atgaaacattggatattgggtgcggcactatttgccgccaccggcgtcgcgcaggcggaaaactaccgtatcgtgcaatcgccttcgcaaaaactggatgtctggatcgataacatcaagggcaataccgcgcagagctggtgcgctaatgaagtggcgctacgcatcgtcgccaatggcaataagaacgtcaagatactggataacttcctgccgcgcgtcggcgcgttaatggagcatcagtgttcgcgtttacagcagctgaactggacgctggttgacgctaacaatgggcatatcgcccaggggagcgcggcgaaaaacaaaaaatgggcggtaaaagtcgcgcccgccgagaccgccgcggcggcggaaaagcccgtcgcgccagcctggctgccgccggaagagaaggcggaaaaactgtctcccgccgccgaccgcacgccgtggcaggagttcacattgcagggcggctgtcgactgcgcaccttctggcaggaaaacgccgccgccttattcatccccgccgttgaatccggtagttgcgaaaagggcggctggctgagcggtcgcaccgtcatcactcaatccgttaacggtaaagaaaagcagagcaccgtgaccttcgtacatggtttcccggtcctgggtctcaatgccgccgctgaccccaataaacttctgatcaccgcggtcaataatcaacgcatggtagtcagcaatgaaaacgctcaacaaagctggatgatcctgccctatgtcgccgggcaaaacggttggcagatgaccggcacgctggctatcgaaatgtcccaggaactggccaacgatccgtcgcgtctacaggcgcggatagaggcggcgcgtagcgtctggacgccgtggctggcgccggatattaaactcaacgttgtgcttatcgacggcctgcacccgctgctgcgtaacccggcggccggcgcatggcgcgcggcaaactaa

SEQ ID NO: 87921 - DNA, 795 bp, Enterobacter aerogenes
atggacattaccacggcttctctttcccgccagggaacgcgcgccagcaatcaggatcagaccggcgaatgcgtgggtgagcgctccgcctgctttgtggtctgcgacggcattgccgggttgcccggcggcgaggtggcggcggaactggcgcgcaacgcgattctggatcagtttgacggcgataatcatctgaacgcccagaccattcgccagtatgtacagcaggccaacggcgccattctccagcaacagcaggcgacgccggattatcggcgaatgggcactactctggtgagcctgtttatcgatcgcgattataagctggcctattgggcccacgccggtgatagccggttatacctgtttcgccgcggctggctgtaccacgtcaccactgaccacagtctggtccaacagatgaaagatgccggacatcagaccgacgatattaacagcaacctgctgtaccgggcgttaggcatggccagcgacggtgcggaagccagctatagcgatgtggtgccggtcgaagatggcgatgcctttttgctctgtaccgacggtttctggcacggcgtcggcgaagagcagatgaaatcctccctgcagatggtcaacaccccgcaggagtggttaaccctgatgaatcagtatcttcagagaaacaatgacggcgaccaggcctcgcaggacaactacagcgccgtcgcggtatggatgggcagtccggaagaggcgacgctgctgcactcgctggccgacgccgcgcaatttttccccctgcgggattga

SEQ ID NO: 87922 - DNA, 1728 bp, Enterobacter aerogenes
atgcgattcacgattatttcgaccaaagccggtcatcagcccccgcagggcagctgtgacttttacgcgccgggcggtaccattgggcgcggtacggacaataacctggtgctgccggatgacgaccgcgccatttctcgcctccaggccatcgttcacgtggcggcagacggcgagtgcaaaattaccaatcgcggcaacgtgacgcgggtggtactcaacgagatcccgctggagcgggggcgtcaggttgaactccaggatggcgatatcctcgccattgacgactatcgcatcgaagtcagcgatctgctgcaggatagccaaccgataagccgaatggcggcgagcggtcagccgcctgtcactacgaaaccgtcgacaccagcgccatccgcagcgcccaccgtggcggaagccgcgccaaccgcggtaccgtcagaaatctgggatagcctgatgcaggaattctcgattgccgacagcatctccagcagccgggcaaagccgcaggccgataatgcgccgaatcccttcgctgagccgaagcctgctgaacgtaatccggaagatccgctggcgatgttcgctgatagtgaacctctgtttgagcgcccgccggtggcgacggacgacctgtttgccgatgacaccccatttgatcgcgacagtatttttgccgacgttacgccaacgacgctggtgccgccagttgaaaaaccggctcagcctgtcgccgatgagccgcaggcagaattggatccgctggcgctctttggcggcgacgccagcgccaaaaccgcgcgtcatgacgatccgctggggctaatgggcggcgcgccgctgacatcggtagatgccttcagcaacgaagagcctgctaaaacggttgccgacgagcctgatgccgcttttgattcgccattattgatggcccagccgccgcaggagccgcccgctgcagcgcgtgaagaagcgccggaaataaccttaccgacgccgcaggccgtggcgcggcaagccgcccaaacgccaaaagggcgcttgcgtatcgatcccgtacgtcatgaacatcaggcgaccagcacgccgcagccgggtaacggcgaagtgctgcagggagagctactggaagccttactggaaggcatggggctcggcgatatgcagccggtgccgcagttcgacaaagagaatatgcggcagcttggtcaaatgctgagcatgttctcgcagggaaccgtcgcgctgctctcttcgcgttcgatcctcaaacgcggcgtcaaagccgatatgaccatggtactggacgacgccaataacccgttcaagctgttgccttccgggaaaaccgtgctgatgcagatgttcggcgcgcggatgccgggctttatgccgccgaaaaaatcggtacgcgatgcgttgattgacctgcaggcccatcagttagggatgatctcggggatccgcgccattattgccgcgatgctgcagtcctttaatcccgagcagctggaagaagaggctaagcgcgatggccatacttcgcgcctggcgcttccggccagccgcaaagcggcgttatgggactattttgtccgtacctacggcgaaaccgccggggaaattgaagacgatttccacaccctgtttggcgaagcgttcctctatgcctatgacatggaagtgaatcagtacaaagactcacagagcggatcggaagaataa

SEQ ID NO: 87923 - DNA, 483 bp, Enterobacter aerogenes
atggctattgatatgtttctgaaggtcgagggtgtaaccggtgaatcaaaagattctaatcacaccggttggactgatattacctctttttcctggggcgcatcccagccgggtaatatgagcgtgggcggcggtggcggtgcgggtaaagtgaatttcaacgacctgcacgtaaatgcgctgatcgacaaatccaccaccgcgattctgaagcactgctccagcggcaagcacctgaccaaagttgaactttcggtctgcaaagccggtggtcagcaggttgaatatgcgcgaatcaccctcgaagatgtactggtgacttccgtgcagtacaccggcgccgataacggcgacaccgttggcgtaacctatgccttccaggcggcgaaagtgaaacagcagtactgggagcagacttccgctggcggtaaaggggcagaaagcagcgccggctggaatatcaaagaaaataaagaagcataa

SEQ ID NO: 87924 - DNA, 417 bp, Enterobacter aerogenes
atgaacagaatcattatcagtctgctgcttgctagcagtgcgtcggcttatgccggggacgacccggtattgtttgttaaacagctaccttataagcaggttgttaaagacgtggttttatcccgctgtctggcgcaggtagccgatgataaaagtcagttttctgtagatgctgcgcgcagtagcaatgcgttgctggagtgggtgcctttcgatattgaaaacggtaatgacaaaattaacgccattattgctcaatgcaaaagtgccaccaatggctttcattccgaaagacaacccgcaattcagggcgtcactttgaattgtttgcgcctttatcatagtacggaactgaataaattaacttaccagataatcatcggtgatcctaataaaacctggagtcaggataactag

SEQ ID NO: 87925 - DNA, 495 bp, Enterobacter aerogenes
atgagacctctttatgcacagctcaaaatgcaacattattcggcgaatgaatcacgcccaggctatgtacctcgtgaaacgctatttaatgagattggctatgacgccagtgcgctcattaaatcaaatcctggttatatgaatacctgtgcggtacgtatgagcctcgcactgctgaaatgcaatgtgagctttagcgggcgtttacccataaaagcaggcgcttacaagggtaaaaagattgaaccgggcgccaagctattggccgaccaactgtataaaaataacctgtttgggaaagctgagatttatcaggagatacgtcaggcagcagagagtttgcgtaatcgcaaaggcgttatcttctttaatagaataaccaactataacggtggacatatagatctactggaaccccttggcgacaacatgatgcaatgcaactctgattgctacaccgactgcaaagaaatatggttttgggaattgaggtag

SEQ ID NO: 87926 - DNA, 417 bp, Enterobacter aerogenes
atggaagaaggtaaagaaatgaaattattaccactctgcacgctgggactgctcacggtgctgacgccatttactgtcgtccaggcggctgatgattccgccaatttactgcgcgatcccaatcaactatcacgtaatgatgtgcggttgagcggcgaaaagtttctcaaggcctggctggcgcaagacaatacccagcagcagttaaaggccaatatgtatctgcttggcgtgatggatgcaacagaaggtaaagcctggtgcggttatcagcaggcactgccgggatcgcttcgagaaagcgtctacagctatttcaaaaagctgcccgacgagcgtaaaaaacagcctgcggcgatgctgattaccgaagcgttggcgaaggagttgccttgcaaaaagggagcgacgtcatga

SEQ ID NO: 87927 - DNA, 1500 bp, Enterobacter aerogenes
atgagcaacccgactcaacaacatgagcagcagtccagccaggcctttagccaggatgaattcagcgcgctgctgaacaaagagtttcgcccgaaaaccgaccaggcgcgttccgccgttgagagcgcggtaaaaaccctcgcgcagcaggcgctggaaaacaccgtcacgttttccaacgacacctatcgcaccatccagaacctgattgccggtatcgatgaacagctgtcgcgccaggtgaatcagatcctgcatcatgatgagttccagaaactggaaagcgcatggcgcggcctgagctacctggtcaacaacagcgaaaccgacgagatgctgaaaatccgctttatgagcatctccaagcaggagctggggcgcactctgaagcgttacaaaggggtgggctgggaccagagcccgatctttaagaaaatttatgagcaggagtacggccagtttggcggcgagccattcggctgcatcgtcggcgattactatttcgaccatagtccgcaggatgtggaattactgggcgaaatggcgcgaatcggatcggctgcgcattgtccgtttattaccggtaccgcaccggaagtgatgcagatggagtcctggcaggagctggcgaacccgcgcgacctcaccaaaatcttccagaataccgaatacgccgcctggcgttcgctgcgcgagtcggaagacgcgcgttatctggggctggtgatgccgcgcttcctgtcgcgcctgccgtacggtattcgaaccaacccggtggacagttttgattttgaagagcagaccgacggcgcggatcacaacaattacgcgtgggccaactcggcgtatgcgatggcggcgaacattaaccgctcgttcaaagagtttggctggtgcacctccattcgcggcgtggaatccggcggcgcggtggaaaatctgccttgccacaccttcccgagcgacgatggcggcgtggacatgaagtgcccgaccgagatcgccatcagcgatcgccgcgaagcggagctggcgaaaaacggctttatgccgctgatccatcgcaaaaactccgactttgccgcctttatcggcgcgcagtcgttgcagaaaccggcggaatatcatgatgccgacgccacggcgaatgcccgtctggctgcgcgtctgccgtacttgttcgcctgctgccgttttgctcactacctgaagtgcattgtgcgcgacaaaatcggctccttccgcgagcgcgatgatatggaacgctggctgaacgactgggtgatgaactatgtcgatggcgatccggctaactcgtcacaggagaccaaagcgcgcaaaccgctggcggccgctgaagtacaggtagcagagatcgaagacaacccgggttactacaccgcgaagttcttcctgcgtccgcactaccagttggaagggcttaccgtgtcgctgcgtctggtttccaagctaccgtcgctgaaaaccaaggaagcgtaa

SEQ ID NO: 87928 - DNA, 525 bp, Enterobacter aerogenes
atggcaataagtaaaagtgggcagaaatttatcgcacgcaaccgtgcgccccgcgtacagatcgagtacgacgtagagatttatggtgcggaacgcaaaatccagcttccgtttgtaatgggggtaatggcggatctggtgggtaaaccggtcgacaaccaacccgcggtcgatgaacgtaagtttctcgacatcgatattgataacttcgacgaacgtatgaaagcgctgaaaccgcgcgtcgcttttcaggtcgacaatacgctgaccaacgaaggcaaactgaacgtcgacttaaccttcgacagcatggacgacttcctgccggatgccgtggcccgcaaagtggagccgctgaacaaactgctggaagcccgcacccagctttcaaatctgctcacctacatggacggcaaaaacggcgcggaagagctgattgccaaaattttgcaggatccgacgctgctcaaatcgttgagccagatgccgaaacaagatgacagtgcgaaaggtagcgaggagtaa

SEQ ID NO: 87929 - DNA, 1011 bp, Enterobacter aerogenes
atgaatattgatgaattccttgctccggttagcgcggagcagccctgcggtgaaaacctagaatatgacgctgatttccaggcaatggaacaagcgatgcagggtaaagccgagcagcagtttggcgacaccattatcccggcggaacccgctgactggacgacggtagaaaagctggcggctgggctacttagccgcaccaaagatttgcgcgtcatgctggcgctgactcaggcgtggacaaaacgccgcggcctgagtggctacgcggatggcctgctgctggtgcaacaggcgctgtcgctttactggcagccaatctacccgctgctggaagagtatggcgaaattgacccgttttaccgtatcaatgcgctcgcggggctaagtgataaatcagcgctgaccagcgcgttacgcaatgccgtgttgttacgcagtaatggcgatgaactgctattgcgcgatgcgcaggcgctgctcgatggcagtaaaaccgaatgcgcggattatcccggcggccgttcgcgattgattgatgaactggcccgcggcggacagccggggattgacgccatcctcgccattcaccagcgcttgcagactatccgcgaaatattaagcgattgtctgggtgaaagcggcgtgccggaaatggaacagctgcagaagaccgtcggtatcgtcgccggcgcctgccagataaccgatatttcgtcctttcacgcgtcccgcgaggagagtgccgtgagtgaacatcaagcgattcccgacgcgcttgcgccgtcagccgttgactggcgcagcgcgcaaatcagcagccgcgccgaggcgcagcagatgctggaaaaagtaaaacagtacttcgcccagcacgaaccgagtcaccccgcgccgctgatgattgaacgggtacagcggctgattgagctggattttatggacatcatccgcgatttagcgccggacggcgttcatcaactggaaaacatttttggacgtcgcgactga

SEQ ID NO: 87930 - DNA, 708 bp, Enterobacter aerogenes
atgactcacgcccctgcgatgagctggtacgggaaactccccagtaccggcgattttttacaacgtcgatttccggacatgctggttcgccagtggtcgcaatggtttcaggtggggctgttggcctggcaacaggagcaacagcgtagcggcgaacgccagttcagcaacgcgccggtgtggaattttatcgtcccgccgatgttgagcggccagatggtacagatggggtgtctgatccccggacgcgatcgggtaggccgccagtatcccatctgcgcgcaaatggccttcaacccgctggagtggtcgccttcaatcctcactcaggccggagagtggtatcagcaggtgggcagaacgctgctgcatgcggtacgcaatggcttttccgctgaacaacttgaccaggcgctactcgccattccggcaccaaagctggtagagacggaaaagcgttcggaaatactcgacgtgattggctatcagcaagatgggcaaagctcccttggctggcagcaggcggcggactgttttgatccgcagcgtcagaccagtttttggtggaccaaccgcgccgatggttatccgctctatacccacgtccatagcggtaatttgaccggccagctgttcacgctgctgtttgatcccgccgggggcgcgagaccgggccgtcacggtctgtatccgccgatgtttgaataa

SEQ ID NO: 87931 - DNA, 3612 bp, Enterobacter aerogenes
atgctgacacttctgctttccatactgaccaaccggctgctgtggggttttctcggcgctacggcggtggcggccgtcatctggatgattggcccgctattgtcgattgtcgataccaggccgctagaatcggaacaaaaccgcgttatatctattgcgctggtgtacctcatctgggcgcaaagccacattctgccgcgtctgtacaacgcctggctcaaccgcaagctgatggataacctgaaggaagacacgccgaagggcaacgatccgcagcagcgcctcaatagcgaagaccagatcctcgccgatcgctttgatgaagccgcgcaaatgttgaaaaaagcgcacttcagcaaaaccggtaatggtcagtggacccagcgctttagcacccactatctgtatcagctgccgtggtatgtgattattggcgcatccggctccggtaaaaccacagccttagccaactccgggctgcagtttccgctagccgaccgcttcggtaaaacggcgttacgcggcatcggcggcacgcgcaactgtgactggtggtttaccaacgaagccgtgctgctggacaccgccgggcgctataccacccaggagagcgagcaggcgcaggacgccagcgagtggctgaagtttatggggttattgcgtaaataccgccgccgccagccgattaacggcgttatcgtcacggtaagtatctccgatctgttaacgcaatcgacggaggcctcgcggcagcaggcggttaatctgcgccagcgtctctctgaactacatgaacaattgggtattcgtttcccggtatacgtactggtgacgaaggccgatctgcttaaaggcttccgcgcctggtttgccggttacgacaaggcgcagcgcgatcaaatctggggcttcactttcccgtgggaacaggcaagccttgccgacttcgatctgatgggccgttttacccaggagtttgcgttactgcaacaacggctagaagccgggctaccggatacgatgctgcaagagcatgatgccaaaacccgcgccgaagcctggctgttcccgcaagagtttgcggcgttgcgaccgctgttagcggactatcttagtaccgtttttgcccgctctaactttgaaaccgagttttcaccgcgcggcatttatttcgccagcggcacccaggaagggctaccgttcgaccgcgtgatgggcgaactcaatcgcgcgctgtctttgccgcagggaaatgaaaacgacaactgggactcggtcagtaaagaagcgccgatccccggcgccaagggccagagttatttcattaaaaacctgctgcaaaacgtgattttccaggaagccggcatcgccgggcagaaccgctggtgggaactgcgtaaccgcgcggcgatctggtcaggctatgcggcgctcgcggcgctgttaatcatttcatgcgtactgtggctgaccagctacggcaaaaacaaggcctacctgcaagaagtctcggcgaaggtgccgcaggttgagcagcagagcaaagcgctgcaaaaccccgagcagcgcgatctgttcgccatgctgccgctactcaacggcctgctggaattgccgaagagcgccgattttgacgtcaacgacccgccggtcagccgccggatggggctctaccgcggtaatgatgtcagcgacgcctcgcagacgctgtatcaaaaagcgctgcagcaaatgctgctaccggatgtcgccatgcgaatcactacctggttgcgcaacgacaacggcagtgacgccgaatatagctacgaggcgttgaaagcctatcaaatgctctatcagcccaagcagtatgacggcaagtttttactctcctgggtgatgcttaacctgcagcgtaacctgccgcaaaacgtgacgcaggcgcagctacgacagctggaagggcatctggtccagctactggaaccgcaaatccagtcctcgccgtatgccaaagacgatgcgctgatcgcccgcgaacgggcgttgattaaccagcaaccgctctcctcaagagtgtatggtcggctgaaacgtctgcttgagcatgacgacaatctgaaagcggtctcgctggcgacgctcggcgggccgcagagcgaactggtgttctcgcgtaaaagcggtacaccgatcgcagaaggcgtgccagggctgtacacgccagatggctactggcaggtgttcaataaacagatcgataacgtgaccagcgcgctgcatgaagatgatatttgggtgctgggcgccgccagcgcgtcggaagataagcagcaaaccgataacgccgtccgccagctctatatgcgtgattttatcgccaactgggatcgcttcctcgccgatattcagctcaacaatagcgccgatctgtcatcgcggatcaacaccgcgcgcctgctttcagccagtaactcgccgctgcgccggctggttatcagcctgagccaggtgctgaacctggcgcgcgctgagccggatacggttaaaagcgaaagttcagccgagcagggcaaccgtgcgacccgaacgctggaagcgctttttcgccatgatgagggcggcgcaacccagggcgcggcgcttagccagacgccggaacagctggtaaccgaacactacgcgccgctgatcgagctggcgcagccgttggaaaagggcggcaaaacgattgtgtttgacgacttcctcaaacagatcgacgaactttatcgctacttgaccgcggtacaggatgccgccaacagcggtatgcaaccgccgggcggcgatgcgattagccgtctgcaggccagcgccgggcgtttaccgggcggcctgcaaaccatgttcagcaaaatggcggtcggcgccagcagtgatacccagcgccgcgatctcgataacgtacgtaaacggattaacgtggaagtcggcggattctgccgccaggctatcgccgggcgctatccgctggttcgcagcgccagaagcgaagtcacgccggacgatctggcgcgtatgttcgcgccgggtaccggcatgatggataccttcttccgtgataacctgaccaataaagtcgataccacgcaatcaagctggcgttttatgcccggcatcgatggcaaaacgttgccgggtagtgaagggttattaaggcctttccagcaggcgcaatcgatccgcgacgcgttctttgccaatggcgcgaccacgccgtcatttaaagtgacggtgcgcaccatcagcatggacaacaggatccttaacctgacgctggatgttgatggccagcagttgcgctacagccacggtccgcaggcggtgcaaatgatgagctggccagggccgggcggcaccaatcaggtgcgtatgcaactcggtctggccgatggtaccacctcgacgctggtgaccagcggctcatgggcgctgaaccgcttttttgataaagcgcgcaccgcgcccggcagcagcagtttgagccgtcaggcaacgtttaacgtcgatggttatcaggtcacgctggagtttgcgccgaacagtattcgcaatccgttccagcttccccgtttctcatgtccataa

SEQ ID NO: 87932 - DNA, 1230 bp, Enterobacter aerogenes
atgatgcaggaacaacaggccgatgccaaccatggcgtgagcggcaataatcccctggtgacggccgccaacccattacttaatgcgattccccagatccgtcattcggtatcgcacgatgaccaggccggtttgcgccagcgtttgattgatgaaatccgccgttttgaagtgcgcggtcagcaggcggggttaccctacgaagtaatagtcggcgcccgttactgcctgtgtaccgcactggacgaggctgcggccttgacgccatgggggagtagcggcgtctggtcgggcagcggtcttttagtgacctttcacaatgaaacctggggcggggagaagtttttccagctgcttgcacgcctgtcgcagaatccgcgcgaacatatcaatctgttggaactgatcaactactgcttattgctcggctttgaagggcgttaccgggtaatggataacggccgcacgcagttggaaactatcaaacagcgcctgtggcagatgatttgcggcgtacgcggcggctacgcgccgccgttatcggttcacggcgaggatcgcccggtgctgcgtaaactgtggcgtccggtggtgccgctgtgggcctgcgtcgcgctggcggggttcgccgcctgtctgttctatatcattcttaactggcggcttggcgatgctaccaacccggtgttggcgaaaatttaccagacgccgttgccggaagcgtcgattgctcagccggcggaaaaattgccggcggtacttaacctgcgaggttttctgcgcccggaaattgccgaagggctggttgcggtccgtgacgaagcggaccgcagcgtggtgatcctcaaaggcgacgggctctttgcttcggcctcaacggtggtgcgcgatcgctacgacccggtcattgaccgtattgcgcaagcgatgaacaacgtcagcggccgcattctggtggtcggctatagcgataacgtgcctatccgcagcgcgcgctttgcctcgaactacgagctgtcgctggaacgcgcgcgttcggtacaaaaacaactgcaaaatcatctgacgcagcccgaacgcgtaaaagccgaagggcgaggggaaatgaaccccatcgcgccgaataccactcctgagaaccgtgcccgtaaccgccgtgtggaaattactctgctggtgtcgcccgataatacccgggctgagctgaacggattgccccaaggaaattaa

SEQ ID NO: 87933 - DNA, 1344 bp, Enterobacter aerogenes
atgaataaagcagaaaaggtggtctggaccgaaggcatgtttttgcgtccgcatcactttcagcgggcagaaagctacctgcaaacgcaaattcgcgaatggggcggattacagcgctcctggctgtggggttttcttgagattgaacttgatgatgcgatgctgcgtcaggggtgcattgccctgagctatgccagcggcctgctgccggatgggacgttcttccagtttcgcgatgctcgtcagggcccggcgccgttgcaaatcccggataacgtcacgggcgaaaaagtcgtattggccttgccggtacgccgcggcggtcgggaagaggttatcttcagcgaggaaaaagactcgctggcgcgatttaccgcgtttgaacaggatgtggaagatgacaatgcgctgtcggttggcgatgccaccgtgcagtttgcccgcccgcggctcaccctgatgctggaaaaggatttaaccgccgagtggacggccatcggcgtggcgttcatcgccgaaaagcgcaacgataacgccgtaaaactcgataatggctatatcccgccgatgcttaacggcatcaatcatcctttgatttacgcgatgatcaacgacttgcatggtctgctggcgcagcgtagccagcaaatcggcagccggctccgacagccggggcgttttaatacttccgaattaattgagttcactctacttgcgttggtcaatcgccatctcggccatctctcacatctcaaaacgctgccgttagttcatcccgagtcattgtggaatagctggctgccgttcgccgccgagctgacgacctggatggcgcagcgcggtccggatgctgcgttgccgatttatgaccatgacgatctcgcgagctgcttcggcaaactgatgctgttgctgcgccaggggttatcacaggtaatggaagacaatgccatccaactgccgctgatagaacgatcgcatgggttgaacatcgcaacggtacccgagagcagcatggtgcgtgatttcggattcgtattggcagttaaagccagcgtaccaggtgatgttctgcaaacgcacttcccggcgcagatgaaagtcgcgccggtgagcaaaattcgcgatctggtgcaactacagcttccgggtttaattctgcgcgctatgcccgccgcgccgccgcaaattccgtggcatgccggttacaactactttgcagtcgagaagggcggcgagctgtggaacgacatggagaaatctggcgccttcgccctgcatctggcaggcgagttccccggcctggatatggaattttgggctatccgtagcccgtcggaataa

SEQ ID NO: 87934 - DNA, 507 bp, Enterobacter aerogenes
atgaataataactctcttttacgccaggtcatgctggcgttttatttgtttctttttacgttggttagtggatgtggttcgtcttcacacagcgaccctgcccgatacaatcttcagttccaggcccacccgcaaattaaccgttctgcgccattaaaggtcagagtgttagtgctgaaatccgatgcggaattcatgtccgccgatttctactccttacaaaataacgcgcaaaaagttctcgccggcaacttgctgaacagcgatgaatttttcctgatgccggggcaactggcaaaaaaactcagcgggcaaagctcgccggaggcgcgttatatcggagtgatggcggaataccaatctctggatggtaaaaagtggcgcatttctcttcctctgccaacgcctggcgaaacccctttctggcagttctggaaactgtcggcagatcaactgcaagccaatttatatcttgacgttaacgggatccgcgtcgtgcagcaatag

SEQ ID NO: 87935 - DNA, 495 bp, Enterobacter aerogenes
atgaaaacgcgagtgtttttagccgctatgattgcggtttcactggcagggtgcgaagcgccgccgaagccgcaaattaccgatgacaccattgaaaccacgcaggttaacggcgtcaatttgacccatcgccatattgttgttcctccaacggaatttaccccgattaacgcagaatatcgcgcgctgtattccgccgcggtaatgagccaggccgggtatggcggcaaagtgattgtgcaattagttccaggtgctaattatattgcattgggacaggcccaggacggctggatagcgttagccaatgaaggtcaggaaaatttaattggctatgctccggccaatgccgttgtcaaaagtgagctgtatgataaaacggttcgcgaacagtcgaagcgcccgaaggcgcgtaagaaagcgacctgcgtgagcgtcgacggaaataccaaagcctgcaaaaacggcaataacggtacctggattctggattaa

SEQ ID NO: 87936 - DNA, 315 bp, Enterobacter aerogenes
atgcgaaaaatattattgctggccgccgttttgctggcatccgcaccgatcgtcacccaggccgaggagattacgcttttaccggctattaaactgcagataggcgaccgggattcctacggtcattactgggatggcggccgttggcgtgacaaagactactggcatcgtcattatgaatatcgtgacaagcactggcgaaagctagagaaaaaacagcgtaaagcctacgagaagggctatcacgacggtcgtaaagacgcgaagaagcgtgagaaagaatactataaacaccacaagaatcatcatcactaa

SEQ ID NO: 87937 - DNA, 1323 bp, Enterobacter aerogenes
atgattatcgcttctcgtcgcctcctctccgtcacctgcatgacccggctcggcgcagttgctgccgccgtattgctgctcgtgacttgcaccagtaaagcgccaaaatctctggtgaccgccagcaaaccgcccgttacgcaaaaatcggcaaagaatcagcagccagtacgcggcgtttggatcaccacggtttcccgtctcgactggccgccggtgggttcaattatcgccagcagcccggaaagccgtatcagccagcagaagctggcgctgattgccaaactcgacaatctgcaacgcctgggcatcaataccatcttcttccaggtcaaaccggacggcaccgcgctgtgggattcccacatcttgccgtggtcagacatgctgaccggcaaaattggcgaaaatcccggctacgatccgctgcagtttatgctcgatgaagcgcataaacgcgggatgaaagttcacgcgtggttcaacccgtatcgggtatcggttaataccaaacccgctaccatcgccgagcttaaccacaccctgactcaggtccccgccagcgtgtttgtcctccaccgcaactggatacgcaccgccagcgatcgctttgtgctcgaccctgggatcccggaagtccgtgactggatcaccagtatcgtggcggaggtcgtgcaaaactatcccatcgatggcgtgcagtttgatgactatttctatactgagacgccgggatcgacgctgaacgataatcaaacctatcagcgatatggccagggttatgcctcgaaagccgactggcggcgtcacaacacccaacagctgatagcgcaggtctcacagaccatcaagaaactcaatccgcaggttgagtttggtgtcagcccggcgggggtatggcgcaaccgctcccacgatccggccggttctgacacccgcggcgcggcggcctatgacgagtcctatgccgatacccgcagttgggtacaacaagggctgttggattatatcgcgccgcagttgtactggccgttcgcccgcgacgccgcgcgctatgatgtgctggctaagtggtgggccgatgtcgtgaaacccactcacacccggctctatatcggcgtggcgctgtataaagtcggcgaaccgtcaaaaaatgaaccagactggattgtcgacggcggcgtgccggagctgaaaaaacagatcgacctcaatgaaaccacaccgggtattcaggggacgattctgtttcgtgaaaacaaccttaaccagccgcaaacccagcaggcggttcagtatctgcagcagcgctggggtagctaa

SEQ ID NO: 87938 - DNA, 978 bp, Enterobacter aerogenes
atgcaaaaccattctgttagccatattctcggtattgaaaaacctgtcattcaggggccgctatcctggctaaccgacgcccggttagtcgccgcagtcagtaatgccggcgggctgggcgtattagggccgaacgcaggtttaaccgcacaaaccgctgtctcgacgccgcaggaaacggcagaaaagatgcgtgaagagatccgtaaaacgaaacgactcaccgagaaacctttcgctgtaaatctcattccgacggttgaaaacgatatctggacgccgccgattgtagaggtagtcaaggaagagggggttaaagcggtggtttataccggctatggtcaaggagctattattccctcgctgtttgccacgcttaagcaggccgggatcagcattatttatcgtgatattaacccaacaccggaaaacagccgcgaggccgaggagatgggcgctgatgttattgtcgccaccggcttcgacgaaggcggaacgcttccgggaacggcgctagggacgttttcaatcgtgccattgattgttgatgcggtgaagcgtgtgccggtgctggcggctggcgggattaccgaccggcgcaccgccagggccgcccacgcgctgggcgcgcagggggtatttgccggctccgtgtttatcagcaccaccgagagccgcgtgccgccatcggtgaaagagatgatcgtgcaagctaacggtctggatttgcagctatttcgcacattgccagattactatcgttcgctgccgggtaaattagccgccaggctggtggcgttagataaatccggcgccagtaatgaaaccatagccgcggaaatgggcggtttacgcggcctgcgaattggtatgctggagggcaacactgacgaaggctacatttcactgggaaccggcatcggcagtattcagcggatcaagagcgtagcggaagtggtggaggaactgacggtttaa

SEQ ID NO: 87939 - DNA, 885 bp, Enterobacter aerogenes
atgaacttaaatttgtttgaatctattaagatttttatcgagattatcgagtctggcagctttacgcgcgccgccgagaatctacagatccatcgcccggcggtcacgaaagcgctacagcagcttgagcagcactgcggcgttcggcttctgcagcgaaccacccgacagatccacctcacccctgatggcgaggcgttttatcgtcgtagtaaacccctgctggcgcaggccgatgatcttatggaatctttcgccccgcagcgtccgctacgtggacaactgcgcatagatatgcctatctccctggcgaagttagtggtcgtgccgaatctccccgccttttatcagcaacatccggagattgaaattgtgctgagcagctccgaccggcggcgggatatgcttcgcgagggcctcgattgcgtcctgcgcattggcgagcttgaagacggtgactatatcgcacgtcatctcggtaccgtcggtatgaaaacctgcgccagcccggcctatctggcgaaatacggcgttcccgcaacccttgacgacctgcggcatcatcaggcgatcaactggctgaataacagtaatcatcagaccatgcgctgggtgtttcaaactgacgccgggcagcagaacatttcgctagcgggtaaactggtggtggataattcagagacttacatcgccgctggccttgctggactcggcattatgcagggtctggatcttttccttcacccctggttgaaaagcggcgagctggttgaagtcctgccgaataatccggttccctccaggaagttatcgcttatttatccccatcgtcatgtttcgcgcaaggtgcgcgtcttcgccgagtggctggcgacaatgttatag

SEQ ID NO: 87940 - DNA, 549 bp, Enterobacter aerogenes
atggcgggggaatcacggctgctgtctgcgcttgccgcctgtcgtgcgcgtttaagcgcgtttattcgcggtagaaccgccgtacgtgacgatgccgatgacatcctgcaggaagtcaccctgcaactgatgaaggtcgagcaaccggtggagaacgtggcggcatggttattccgggcggcgcgtaatgaaatgaccgaccggtcgcgtaagaagcgcgagttgccattaacattcgatactgatgaagatggcgatggcggctttgccgaggatgagctggcggaaacgctgtttggcgtcgcgcagacgccggaggaagcctatcttaaagaactgctgtgggaggctttaaccgaggcgctggcggagctgccgccgctgcagcgtgaagccttcgagaaaaccgagctgcagggctatagctacagggagctggcggcagagagcggcgctagcgagcaggcgtggctgtcgcgtaaacacaaagcggtgctgtttcttcgcagccgtttgcgaacgctctacgatgaacttaccgcaccttaa

SEQ ID NO: 87941 - DNA, 423 bp, Enterobacter aerogenes
atgagagattttgaacgacacgggcatcatcaccagggttttggacgtcacagaatggcgcggccgctgattatcggcgcggtgattgttgtggtgctgagtctggtcgtgatgtcgctatggaacgcattgctgccagctatcttcggggtgaaaagcatcggtttctggcaggctttgggattactggcgctgtgccgtatcttgtttggcggtttaggttttcatcgcggtatgtttggtatggcgcaggcgcgtcgacgcatgcatgaacgctggatgaccatgaccccggagcagcgagaggagtttgcccaacgtttcggccgccacggacatcgcggccgttgcggctggcatgaacgtcgcggtgggcaaccgactgacgataacccatcggcgaaagcgccggatgccgagtga

SEQ ID NO: 87942 - DNA, 954 bp, Enterobacter aerogenes
atggtatttggtgttccgcgtacgtgctggctgctactgacggtgcttttagttagtcaggaaagctatgccctggacggcagtcggctaaagcagcgcgcggacgcggtgctcaccttaatgagttacaccgtggtacctgacgttaccgccagcgatctgaatattggctccggcgcgaatgagaaaaacgaactaaccctcacgcaatttggcggcggcgccaccttgagtgaggattttccgctctatctggaaggcaccctcggttacagtcgctacgatccgcaatttgtggtcagcgatggtgcccagagccgtaccattcccaccaaatggaacagtctgaccgctaccggcggcgtcggctgggactttccattgtatcaggaccgatggggcggaaaactggtgctacggcctatcttcaatatgatgctgggcaccatggccagcgatgcacgcctcggtcgctgggcgctcgaacgtaaaacggaggttgatattcgcttcctcgatggtgggcgactgaacgcttatgggttgggcggttcgttaatgcttgattatgaactgttttccaaaacgcaggatattgacatagaagcgcgctattccgcgatgaatttgcaaaccttcggtagcacatcagaagcggtccaggggcaggccagcgccgaaaatctgggtatctaccttcgtcgacgcgcgccaatagccgactggacgctgctgaaaagcccggtgcgctacgtgctggaaggcgctcatactatctatcttggcgaccagcgcggtgaactcggctttgatagcctgagttcgctcggcattggtctggaactcgacagcagccagtatccggtatttatcacccgtacccgactggtggcccgctatatgttcggtaataacaccgaagggtatggcctcggtttagcgatgagtttctga

SEQ ID NO: 87943 - DNA, 1107 bp, Enterobacter aerogenes
atgcgtaagagtttgtggtggttattggcggctgctttttcggtatttgcccaggacccggtattaccgacgattcccgttaaccatgtcagcccggtagtgggtgaattatcgccgccggaatcgctgcgcccatgctgcgccttcggtttcgatctgcgggtgcgcgccattggcgtgccaatcccggtttatcagattggtaatgtgctgacgctcgataccttaggtgagcatcattacaacgatagcgcgctcggcgcggtcaaaaatctggttggcttaagcgatgagcacaatggccttatttatacccgccgcggcggttttattgatatcgcccatgtgcgtgataccgctgattacaccttttatttattcagccgaatttacccgacgctggggcagccaggacgcatcttttatagcgaggaactgggcgtacgccgcgtccagttaaatgcctttacgccgccggcttcaatgccgcagcgatatacgattgccgcctggcttgccggccatctggccttcgaaattgcgcaatggcatgagatcgcccaatggtatggtttccagtcggttccgggtttttcagaagaaatttccgccttttcgccggaggacctctattccaatctgcttggcgcgcgtctggcgattaacgttattttgcaagggcaagcgggttcagtcgatgcttataaccgggcgatggaagcggcgttaaaacaggcgctggtcaaactgttggtcgcgccgcaaagtgagaccgagaggatgttccgtgaagtcgacggcgactggtggaacagtaaacggcgagtgccggataaatttctggtgctgaagcggaattacgatctcagcgaaaatcgcctgccaacgccggttccttttgaacgcacgccgccgtatcgcctgacgatgccaaaggaagttgccgggtttacgctcgcggaactgggtcaactgcaaatccatccggggcaggatatgcagtcgctgccagcgccgcataatttttattctccgcagcagttccaggagctcgctgataaagcgcagcaggcggatgccattcagctgcagcgtattgaaaaataa

SEQ ID NO: 87944 - DNA, 933 bp, Enterobacter aerogenes
atgacgctgctgttgacctctggcgccgtgtggaatgcctgtgcggcggaaagtgacgacagtgatagctactttcccatctggggagacgaagcccgcgcccgcggttattccatcccgctgccatttggcgtcaatctcagctatatgaatatgcgccaggatattatggtcgacagcatcaccttttccggactgaagctgggtaaccatccgatccccagcgatatgttcgccatcgatgccgggcacacgcgggagaagagcaaaaccgagaatcttcgtctcgatatgtgggtgtttccgttccttaatgtctacgggattttaggccacacccgcggttcgtcggtgtcgaatgtgtcggtcgatgccgacccaacgcaataccgaggtctggatcgcatcatcgccggcgcagtgcataaccttaatcaaagtggcgagttgcaaaatatcgattttgttctcgattttaaaggtaccacctggggaggcgggttcacgctggctggcggctatgagaactggtttgccctcgtcgatacaaactacacccgcaccgatttcgatattctcgacggcagtatttctgccgtgacagtgtcacctcgcgttggctatcgcttcaaccttcaggggatttccggcccttcgcatctcagcgtgtgggtcggcagtatgtatcaggatgtgcagcaggaatttaaaggcaacctggccgatttgcatatgccgccacagctgcagccattgattgccgcggtcaataaagacggcgacggcaagtttgatgtcaaacagaaactcacttcaccatggaatatgctgatcggcgcccagtacgaaatcacgcgtaacttcaacgttctgaccgaatttggctttaacgatcgcaatagtttctttgtcgccggtgaataccgtttttga

SEQ ID NO: 87945 - DNA, 1125 bp, Enterobacter aerogenes
atgaagctggcaggccttactcttttactgatgcttgctctcgcgcctggcgcgtctcgtgccgcccaattgttcgaccctgaagatggcatgctcgatatgagccagtatctgcaggataacccgtacggttttttgccggtgccggtgatgattaccgaaccggctatcggctacggcggcggtctgtttggtttatttctgcatggtaaaggctcccgcgagggcgatcgttttattccaccggcgctgaccggattcggcggcggtgggacgcaaaatggtacctggttcatcggcgccgcgcatcgtcatacctggaatcatgacagtattcgttatctggttggcgcgggctacgccaatgtcaatctcgatatctattcgggtgacattgccgggtttaacaaaaatgtggcagtgcaaacccataccaaaggctttggcggtctgcaaaagctgttgttccgcgtgggggactcaccggtttttctcggcgcctcgcaattctatgcgcacaccgatgtaaccgcggacaatcagctgatcaacaaggtgtggcagcgggtgttgggggaaaacagcacctcttcggccttgggcgtggtggcggaatatgacaccactgatatttttttctaccctaagaaagggttatcactgcagggcgagtaccgtttttaccgcgctcttctcggcggcgactatcattacaatcagttgtcgctggatggtaaatactttctaccgctggcgccgaccttaaccctggcgctggcggcaaattatcagtcgctgactcatcatgacaagcatctaacgccaatggcccggccttacatcgaactgcgcggcatctcgcgttttcgctatcagggcgattatgtcgctgtcgcccagacgcaactggcctggcaatttgcgccgcgctggatcctgcaaggttttgtcggtatcggcagcgcgagcgatgaggcggggtcgctgtggcagcaaaccgaagtggcgtggggcaccggttttcgttatctggtcgcccgtcagtatggtttatttaccggcgtcgatgtcgcatttagcgaacacgaacaggcggtctattttaacgtgggttccggactgtaa

SEQ ID NO: 87946 - DNA, 696 bp, Enterobacter aerogenes
atgatgattcccgcttttacccaaggtctttacggtcgactgcgcgagcaggccggtggcgaatggcaacgctacgtgtcgcaccctttcctccagcaattagccgcgggtacgctgccgcaggcagcctttcgtcattatttaacccaggattatctgttcctaatccatttcgcccgcagctatgccctgctggtcagcaaacttcgcacgttgccggagatgcgcgccgccgccgcctcgatgaatgccatccttgctgagctaccgctacatgtaggctattgcgagcaatgggggttgagcgaagacgctatggccctgcaaagcgaagcgatggaaaccatcaactacacccgctacgtactggatatcggccactccggcgacgcgttggatctactggcggcgctgctgccctgcgtcgcgggatatgcggagatcgggcttggtctgctgcacaacccgcaaaccaacttgcacgataacccctacgcgccgtggatccgcaattacggcgacgagagctatcttcacggcgtcaacgcggcgatcgacctgctggaaacgctctggcaacagcgcggcgcggaatcccggttagccggactgagcgacatattcactaccgctacccggctggaaggtaatttctggcagatgggactgaacgccgccgggcaggaccaggggtga

SEQ ID NO: 87947 - DNA, 723 bp, Enterobacter aerogenes
atggcgccaggtattcacattcgcgatttatgtctgcgctttggcacccggcccctctttcgcgatctctcctttgatattgccgccgggcaatgggtatcgctgctgggggccagcggcgcgggcaaaaccagcctgttgcgtattatcgccgggctggcggcgccaacccgcggaaccgtcgtcgccagcgatggccttcctgttactacgcgattggcgtggatggggcaaaaagatctgctctatccgtggcttaacgtgcgggaaaatgtcgccctcggcgccaggctgcgcggtgaaaaggccgataacgcgcgggtaaacgagcttcttgagctggtcgggctcgcctcctgcgctgatgaacgcccggccgcgctgtccggtgggatgcgccagcgcgcggcgttggcacgcaccctctatgaggatcgtcccattgtgctgatggatgaaccgttttccgccctcgatacgcttacccgaacgcggatacagacccttgccgcgcgcttgctcaccgggcgtaccgtagtgctcattacccacgacccgatggaagcctgccgcctcagccatcggctgctggtgctttcgccgacgggcaggattgatgatagtcatcatttaagcggaatcccgcctcgcgccccggatgatcccgcgctgctggcaagccaggcgcagctgctgcagcaattgatgagggcgaacggatga

SEQ ID NO: 87948 - DNA, 741 bp, Enterobacter aerogenes
atgaggggcaagttactgcgcgggtgcagcgtattttgtggcctactgttgctctggcagttggcgagctacagcggcattcccacttttttgttgccttctccggcggcggtcgctgaagcgctgtggaataaccgtagctatctggccagccatacccttgtcaccctgagcgaaattctcagcggaatggcgctcggcgtcacgctcggtatggtgttagcgttctgtatgaccatgtctccgcgattacaacggtgggtaatgccgctggtactgaccagccaggccattccggtattcgccctcgccccgctgctggtgctgtggtttggttttggtatgagcgccaaggttatgatggcggtgctggttatcttctttcccgtcacctcggctttctttgacggtctgcaacgggtcaatcgcgactatctcgatctggcccgcaccatgggcgcctcctttggcgctcagttgcgccatgtccggctcatggcggcgctacccgcgctcggttccggcctgcggatggccgccgccgtcgcccccattggcgcgattattggcgaatgggtcggctccgccgaggggcttggctacgtaatgctgaatgccaatgctcgcctgcaaaccgatatctgcttcgccgcattgtttattttagtgctgctgaccatcgcgctgtggttggcggtcgatgcctttttgcaccggctgatcaattggtcgccggaataa

SEQ ID NO: 87949 - DNA, 930 bp, Enterobacter aerogenes
atgcgtatacctctgttggccggcctcactctgctggtttgcggccaggcatcggcaaatgaaaagctgaccctggtactggactggtacatcaacccggatcatgcgcctattatggtggcggaacagattggcgcctttcgggatgccgggctggatgtcaacatcatccccccttccgacccggcgctccctccgcgcctggttgccgctcgccaggcggatttagcgataacctatcaaccgcaggttcacttattcgccgatgaaggactgccgttgattcgcgtcgggacgctgatccactcgccgctgaataccgtgattgcgctggatccgcgcatcaaatctccggccgatctgcaagggaaaaaagtgggatactcggtgagcggtattgaacaagcgacgctggccaccatggcgcagcacgccaacatcgaccctaatagcattaaactgatcaacgttaatttccagcttaccagcgcactgctggccggccaggtcgatgctgttatcggcggttatcgcaatatcgaagcgctggaactcaaactgcagggcaaaaaaccggtggtcatgaatgtggaagactatggcgtgcccgcttacgacgaactggtgatcgtggcaaacaaagccgaggtcaacgcccctaaaatcaaaaaattcctcgacgcattacagcagggagtgagctatttgcgcgcccatccgcagcaaacctggcagcgatttgccaaagcgcatccggaactcaataccgaactgaaccagcaggcgtggttgcagagcgtgccgctgttcgccaccgatccggcagcgttagataagccgcgctacgacgcgtatgaacaatttttatataacaataagttggtgaaaaaagtaacacctttagcaaattatgcgatcgaactgcgttaa

SEQ ID NO: 87950 - DNA, 1383 bp, Enterobacter aerogenes
atgacggataaagtccgtattgatactttaagtgcagatttattggacgcgaacaacgaaacctttttggctcgtcaggctgaattcgaatcgaatgtcaggagttaccctcgcaagttaccgctcgctatcaccaaagccgaaggcgtttggctgaccgatgcggataacaaacagtacctggactgcctcgccggcgccgggaccctcgcgctgggccataaccaccctgaagtactgcagagcatccaaagtgtcattaccagcggcttgccgttacataccctcgatctgacaacaccgttaaaagatcgcttctctgaatacctgctctcttgcctgccgggcgaagggaaagaatattgcctgcaattcaccggtccttccggcgctgacgccgttgaagccgcgctgaaactggcgaaaaaatacactggccgtacggcggtgatcagcttctccggcggttatcacgggatgacccacggcgcgctgtccgtgaccggcaatctgtcgccaaaagcggcggtcaacggcatgatgccggaagtccagtttatgccttatccacacctttaccgttgcccgctgggtatcggcggcgaagcgggcgtcaaggcattgacttactacttcgaaaacctgatcaacgacgtggaaagcggcgttcgcaaacctgcagcggttatccttgaagccgtacagggcgaaggcggcgtgaacccggcgccggttgagtggctgcagcgcatccgcaaagtcaccaaagagcacggcattctgctgatcatcgatgaagttcaggcaggctttgcccgtaccggtaaattcttcgccttcgaacacgccggcatcgagccggacatcatcgtgatgtcgaaagccgttggcggcggtctgccaatggcggttctgggcattaagaaagagttcgatgcctgggaacctggccatcataccggtaccttccgcggcaaccagctggcgatggccaccggtctgaccaccctgcgccatctgcgtgataacaagattgccgacaaagtcgccgcccagggcgaatggctgaaaggcaaactggcggaaatgcaaaaacgctatccggttatcggtcacgtacgcggtctcggtctgatgatcggtatcgaaatcgtgaagccgaacgaggcgcaggatcatatgggctgctacccggctgacggcgaactctccgcactgctgcagaagaaatgcttcgaagctggcctgatcctggaacgcggcggccgtcacggttgcgtactgcgtctgctgccgtccctgctgattagcgacgcggagctggaagtgttcctcgataagtttgaacaggccctgctggccgccggcgtaaaaccggtctga

SEQ ID NO: 87951 - DNA, 1473 bp, Enterobacter aerogenes
atgtccaaattgaatccgattctggctgggtccgcggcaagcattgacgcttaccagcaggtcatttcccaggccagccaggcggttgcgcagtggctgcaacaacctgaaatgtatcaggggaaaagcgttgatgaactccgtgagcgcatcacccttgattttaacgaacagggtctgggcaaccaggcggcgattgaacgtgcgatcgagtacttcctgaaagacagcctgtcggtgcaccatccgcagtgcgtggcgcacctgcactgcccaagcctggtgatcagccaggcggcggaagtgctgatcaacgccaccaaccagagcatggactcctgggatcagagcccttcagccaccatcattgagatgaagctgatcgagtggttacgtgcgcaggtcggttatccggctggcgatgctggcgtcttcaccagcggcggcacccaaagcaatctgatgggcctgatgctagcgcgcgacgccttctttgcccgtcaggggcattccatccagcaggatggtattccgggcgacattcgtcagtacaaagtgctgtgctcggaaaacgcccacttctcggtgcagaagaacatggcgctgatggggcttggctaccgctcggtcacactggtgaaaaccgatgaattcgcccgtatggacgtcaccgacctgaaggccaagattgcgcaagcgcaggccaacggcgagcagatcatggccatcgtcgccaccgccggtaccaccgacgcgggcgcgattgacccgctgcgtgatatcgccggtatcgcggcggagcaccagatctggctgcacgttgatgccgcgtggggcggcgcgctgctgctctccgagcagtatcgcgattacctcgacggcctggagttagtggattccgttaccctggacttccataagcagttcttccagaccattagctgcggcgccttcctgctgaaagatgctcgccactacgagctgatgcgctatcaggcggcctacctgaactccgagtttgatgaagaacacggcgttccgaacctggtctccaaatcgctgcagaccacccgccgcttcgacgcgctgaagctgtggatggggcttgaggcactgggcaagaaacaatacgcttcaatcatcgatcatggcgtgacgatggcgaaaaacgtcgcggaattcgtgaagtctcagccaacgctggagctggtcatgcagccgcagctggcaagcgtgctgttccgctcacgtccggcgcaaatggccggtagtgatagcgccgcgatcgccctgctcaaccagcgcgtgggcgacgccctgctggaatccggccgcgccaacgtcggcgtgaccgagcataacggcgtaacctgcctgaagctgacgctgctcaacccggtggtgacgctggacgatgtgaaggtcttgctgagcctcgttgaacgcaccgcccaggaactgctggcgaaataa

SEQ ID NO: 87952 - DNA, 1191 bp, Enterobacter aerogenes
atggctgttgtgattgcatttttggccggtatgttgacgctgctcagcccctgtaccttaccggtgatcccgctggtgtttgccagcgtaagcgggcgtaaggggcaactcatcctattgttgttcggtatggggttgatgtttaccgctgtatcgctgctggccacgacggcagggggatggttagtcaatctgactatcgtcgggcgttggctggcgctgggctttttggtcgttgtggctatcagtttgctgtcaacacgcgttgcaggctggctcggatcgccagcggttgcgttgggtaatcaacttaaccaacagagctatcgttatggcagtgggctcgcttcagtattcgccggactggcgattggactactttgggcgccgtgcgcgggaccggtgctgggggcgatttttagcctggcgttgttgcaaggaaattcagtgactaccggcatcttgctgctttcctatgccagcggatgcgcgttgatgttgctgctattggggtggttcggcgcgcggctgatttcccgtttgcgcggtggtcaggtgataagtgggcggttacgccaactggctggcgtggcaatgttggccgcagtggcattaatcgccagcggtagcgatcgttatctgcagggcgccagcggtttaacccatcgtctggagcagcggctcagcgcgtttatgccccaggatcaacaacgagttcgtctggagccgatcgttgcgccgcggccaaccagcgctatgccggaattgcaaggcggtaccgcatggattaatagcccaccccttaccaatgcggcgttaaagggtaaggtggtgctgattgatttttggacccgcgattgcatcaactgtcagcatacgctgccttatgtacggacgtgggccaataagtatcgcgatgcggggctggtggtgattggcgtacatacgccggaatatccgtgtgaacggtcgttgccgcagcttcgtgaagcggtcagccagcggcagctaaactatccggttgtcgcagataacaactacgccatctggaatgcgtttggtaatcagtactggccggcgcattatttcttcgacgcgcgggggcaactgcgttataccgcctttggcgaaggcgattatgcccgtcaggagcaggtgatccaacaactgctgcgcgaagcgcggacgtga

SEQ ID NO: 87953 - DNA, 1353 bp, Enterobacter aerogenes
atgaaagtgtggccggcgtcattgcagtcgcgcttaatgataatgatttttctcgctctgctgctcgcaaatgccctgacgctatcgcttctgctctacgagcgcatgagcagtgcccgtagcgtcatgctgggcaaccttgaatacgatgtcgccaccagcgtggctatccttgatcgtcttcctgcgcaagaacggccgcattggttggcgcgtctggcgcgcggtaactaccgctatcagctttctgccggacaaactggcgattatcccaccagctggcgtacccgtgatgcggtacgctcgttacaggaagccctgagcggtcgctatcctgtgagtattatcgccgtccctggaccgcgcgaacatattcaggcccacgtgaccctgcgcgacggcgcgccgttaagcattgacctgtggccaaagctgccggccatcgcacgttggctaccgctggtgctggtcgcgcagtttctgttactactattttgcgcctggtacgccgtccgccaggtggtcgcgccgatgacccgctttacccgcgccattgatacgctgcaaccggctactccggctgcagggccgctggccgagaagggaccacaagaggtgcagcgcgcggcgcgcgccttcaacgcgatgcaaaagcgaatacaggaccatttgcaggagcgcgcgcggatcctggcggcgatctcccacgatttgcagacgccgattacccgtatgaagctaagagtcgagatggccgaccaaccggcactccgcgataagctgttacaggatctcgatagcatgacccgactggttcgcgaaggcatcgcgctggcacgatcggccgaaccgctggcagaagcgccgcagcggatgagtctcaatgcgttactggatagcatcgcctgtgattatgccgatatcggtaaagcggtcagttttcgtgccggtaaaggggcggacgtcatgacgcttcagccgcaggcgctgcggcggatcatgagtaacttaatcgataatgggctgaaatacgccgaaaaggtggaaatcagcctgagttacccgccgaatggcgatgttatcattcacgttgttgatgacggccccggcatcccggaaggagagctcaccgccgtactgcagccgttctatcgcctcgagcagtcacgtaatcgcgataccggcggtaccggtttggggctggcaatcgccgcccagctcgccgggcagatgcagggaagtttgaccctgcacaacctgcaacagggcggtcttgaggcgcgggtacgtctcaatgccgccgttttgtatccttctgtatccattccaactgcagataaatccatatactaa

SEQ ID NO: 87954 - DNA, 738 bp, Enterobacter aerogenes
ttggaacgtattgaccacatcctggttgtcgatgacgaccgcgatatccgcgaactgatcgttgggtatctggagaaatcgggctatcgcgccagcggcgcagctaatggcaaagcgatgtggtctgtacttaaaaaccatcaaatcgatttgattgtcctcgatatcatgctgcccggcgatgatggtttaaccctttgtcgtcagttgcgcaatgatggccaacaggatatcccggtgctgatgctgaccgcgcgtagcgaagatagcgaccgtatacttggtctcgaaatgggggccgacgattatctggtgaaaccgttcgtggcccgggagctactggcgcggatcaaagccatcttacgccgcgctcgcgcgcttccccccaatttacaaatcagcgaagccggcaggcttatcgcctttggcgactggctgctcgatacctcggcgcggcatctactggacgagagtggcacaattgtggcgctaagcggggcggaatatcgcctgctgcgggtgtttcttgatcatcctcaacgtgtgctcaaccgcgatcagttgttgaatcttacccaggggcgtgatgccgaactgtttgaacggtctatcgatctgttggtgagccgcctgcgtcagcgtctgcgggaggacgcgcgtgagcccgcctatatcaaaaccgtgcgcagcgagggttacgtgctgtcagtgccggtgtcgatccgcgaggcgcgataa

SEQ ID NO: 87955 - DNA, 993 bp, Enterobacter aerogenes
atgaacagattatccgcaatccgtcatgtcagcgcggcggcgctgtgtctctccacgctgtggtctgccagcgtgtgcgctgctgaagacgcaggcgctttcgacaaggtgcaacaaatcaacgccggcgatttgaatatcggttatgtcgatatggggccacgcgatggccaggcggtaattttgctgcacggctggccgtatgatattcaaagctacgcgcaggtggccccggcgttggcgcagaagggttaccgggtcatcgtgccgtatctgcgcggctacggctccacccgtttcctgtcggctaaaacgccgcgtaacggtcagccatcggcgatggcggcggatattgtgcatctaatggatgcgctaaatattaagcaagcggatttcgccggctttgactggggcgcgcgtacagcggatatcgtcgcggcactctggccgcagcgggttaagtcgctggtatcggtgagcggttatctgattagcagtcagcgaattggcgagaagccgttaccgccgcaggcggaactgtcgtggtggtatcaattctactttgccaccccgcgcggcgaggcgggctaccggcaaaatacccatgactttgccaaatttatctggcatcaggcttcgccgcggtggacattcacggatgccacgttcgccaatagcgcgaaagcgctggataacccggatcacgttgccgtcaccatcagcaactaccgctggcgcctggggttggagcagggcgaagcgaaatatgcggcctacgaacagcgactcgcgaaactgccggcgattagcgtacccacgattaccatcgagggggaaaacaatggcgcgccgcatccggcgccggatagctatcgggcgaaattcaccggtaaatatgagcatcgggattttaaaggcgcagtgggacataacccgccgcaggaggcgccagcggaatttgttcaggcggttattgatgccgatcgcttataa

SEQ ID NO: 87956 - DNA, 1020 bp, Enterobacter aerogenes
atggcgatttttgatggtcacaatgacctgctgctcaatttatggcttcaccatcgcgaggatccttcaactgctttctttgccgggattgagaacggtcatctcgactatccgcgcatgctgcaaggcgaatttgccggcgggctattcgcgctattcgtgccaccgcaggaatatattgcccgtatggcgccgcaatacgccagccaacgatgggatccgatcgatatcctctggcagcaactggccatcctgaaacaacttgtcgcgcactccgctggacgcttgcggttatgtctgagcgcggcggatatcgaacgctgccacgaggataaggtactggcgatggtggcgcatattgagggcgccggaggttttgatggcgagggccgcgacctgcaggccttctatgccgccggggtccgcagcattggtccgttctggaacattgcaaaccgcttcggcagcggcgttaacggttcctttcccggcagcccggacactgggcctggactgacagcggaaggtatcgatctgattaagcaggccaatgccttgaagatgcagattgacgtgtctcatatgaatgaaaaagcgttctgggataccgcccaacactcgacgtcaccgctggtcgccacccactctaatgcccacgcgctatgcccgcagccgcgtaatctcaccgatgaacaactgcgggcgattcgcgacagcggcggcgtggtcggcgtcaatttcggcaacgctttcctgcgcgccgacggcaaacgcgacagcgacaccccattagttaccatcgttcaccatatcgactatcttattaacattatgggcgacgatcacgtggcgttggggtccgattttgacggcatcaccctgccggacgaattgggcgacgtgagcggtttaccacggctaatcaacgcgttgcgccatagcggttatgaacaattggtgctggataaactgctttggggcaactggcaaaaggtattaaaaaatgtttggcaacaatag

SEQ ID NO: 87957 - DNA, 918 bp, Enterobacter aerogenes
atgtttataaaagtcctcggttccgccgctggcggaggttttccgcagtggaattgtaactgcgccaactgtcaggggctgcgcaatggcacaattcaggccaccgcccgcacccagtcttccattatcgttagcgataacggcaaagagtgggtgctgtgtaacgcctctccggatatcagccagcaaattgcccacacgccagagttaaacaaacaaggcgtactgcgcggcacgcatattggcggcattatccttaccgatagccagattgaccatactaccgggctgctgagcctacgcgaagggtgtccccatcaggtctggtgcacgccggaggtacatgaggatctcagcacgggttttcccatttttactatgttacggcactggaacggcggcctgattcaccatcctgtcaccccgctgaatagttttaccgttgacgcctgtcccgatctgcagtttaccgccgtccccatcgccagcaatgcgccgccctactcgccgtttcgcgatcgcccgctgccgggccataacgtggcgctgtttatcgaaaaccgccgtaacggccagacgctgttctatgcgccggggcttggcgaaccggatgaagcgctcctgccgtggctgaaaaaagcggactgcctgctgattgacggtaccgtctggcaggatgatgaactacaggcggccggcgtcgggcgcaataccggtcgtgatatgggccacctggcgcttggcgatgaacacggcatgatggcgttgctggcctcactcccggcaaagcgcaaaattctgattcatatcaataacacgaatcctatccttaacgagcaatcgccgcagcgcaaggccctgacgcaacagggaattgaagtgagctgggacgggatgcctatcacgcttcaggactaa

SEQ ID NO: 87958 - DNA, 756 bp, Enterobacter aerogenes
atgcagatacgcgaaaccctatcgccacaggcgtttgaacaagcgctacgggaaaaaggcgcctactaccatatccatcatccgtaccatattgcgatgcataacggcgaagccagccgcgagcaaatccagggctgggtggcgaaccgtttttactatcagaccaatatcccgctaaaagacgcggcgattatggcaaactgccccgatccacacacccgacgcaaatgggtgcagcggatcctcgaccacgatggcagtaacggccaggaaggcggtattgaagcctggctgcagttgggtgaagccgtggggctaagccgtgatgagttactcagcgagcgccacgtgctgcccggggtgcgttttgccgtcgacgcctacgtcaattttgcccgccgggccaactggcaggaagcggcgtgcagttcgctgaccgaactgtttgccccgcaaattcatcagtcgcgcctcgacagctggccgcagcactatctatggatcaaagaagaaggctatttctacttccgcagccgcttaagccaggccaatcgcgacgtcgaacatgggctggaactggcgaagatctactgcgatagcgcggaaaagcagaaccggatgctggagatcctgcagtttaagctcgacattctgtggtcgatgctggatgccatgaccatggcctacgcgttgcagcgcccgccctatcatacggtcaccgacaaggcggcctggcacacgacccgactggtataa

SEQ ID NO: 87959 - DNA, 279 bp, Enterobacter aerogenes
atgcaaaaaagcgcaatcatcgcctttcgtcgcggctaccgcctgcagtgggaagctgctcaggatagccacgtgatcctctatccggaaggaatggcgaaactgaatgagaccgccgccgcgatcctcgaactggtcgatggtcaacgcgacgcggcaaaaataatcgccgaactcaacgcccgtttcccggaagccggcggcgtcgatgacgacgtcatcgaattcctgcagatagcttaccaacagaagtggattatcttccgtgagccagaataa

SEQ ID NO: 87960 - DNA, 1143 bp, Enterobacter aerogenes
gtgagccagaataaccccgccgttaatccgccgctgtggctactggcggagctgacctatcgctgtccgttgcagtgcccctactgctctaacccgctggactttgctcagcaggagaaagaactcaccaccgaacagtggattgaggtctttcgccaggcgcgggccatgggtagcgtgcagatgggtttctccggcggcgaaccgctgacgcgcaaagatctgccggagcttatccgcgccgcgcgcgacctcggtttttacaccaatctgattacgtcaggcattgggctcaccgagagcaaactcgacgccttcagcgaggccgggctggatcatatccagattagcttccaggccagcgatgaagtgcttaacgcggcgctggcgggcaacaaaaaagcgttccagcagaagctggcgatggcgaaagcggtaaaagctcgcgactacccgatggtgctgaactttgtcctccatcgccacaatatcgaccagatcgataaaatcatcgatctgtgtatcgagctggaagcggatgatgttgagctcgccacctgccagttttacggctgggcgttcctcaatcgtcaggggttactgccgacccgcgaacagatcgcccgagctgaacaggtcgttgctgattaccgccataaaatggcggctaacggtaatctgaccaatctgctctttgtcaccccggactactacgaagaacgccctaaaggctgtatgggcggctggggctcaatattcctcaacgtgaccccggaaggcaccgcgctgccgtgtcacagcgcgcgccagttaccggtcgagttcccgtcggtgctggagcagagcctggaatcgatctggtatgactcgtttggcttcaaccgctaccgcggcttcgactggatgccggagccgtgccgttcctgtgatgaaaaagagaaagatttcggcggctgccgctgtcaggcctttatgctgaccggcaatgccgataacgctgacccggtgtgcagcaaatcgccgcaccatcataaaatcctcgaagcgcggcgcgaagcggcctgtagcgacatcaaaatcagccagctgcagttccgtaaccgcacccgttcacagctgatttataaaacccgggaattgtga

SEQ ID NO: 87961 - DNA, 2298 bp, Enterobacter aerogenes
atgaccaccgccacccgcatcgtggaactggcagacgggattcgcgcaacgctggttcatcagccgcaggcgacgcgtgctgcggcgttggttaaggtgggtgccggaagccatcacgaaaccgatgccctgccggggctggcccatttactggaacatttgctgtttcgcggcagccagcgctatcacgcagacgagcgattaatggcgtggatccaacgccagggcggcagcgtcaacgccaccacccttgcccgccacagcgcctatttcttcgaggtcgccgccagtagtctggccgagggcatcacccgtctacgggatacgctccaggcgccgctgctgtcgcctgaagatatccgtcaggaactggcggtcatcgatgcggaaaaccggcttatccagcagcacgatccctcccgccgtgaagccgcagcccgtcacgcgatggcggcgcccgcggcttttcgccgttttcaggtcggcagcatggattctctgggcggaaacttgcctgcgctgcaggttgcgctcggcgagtttcatcagcgctattatgtcgccagccatctgcagctatggcttcaggggccgcagtcgcttgatgaattagccgcattggcccatttttttgccgcggggttccctggcggcctgccgccggaaagcccgccgtctgcgtattttagcaacaatgtggatcttcaactggccgttgaagaccaaccgacggtatggcgttgtccgctcattgcagtaagtgacaatgtcactacttttcgtgaattcttactggatgaagcgcccggcagcctgctggccgggctgcgtgaatgcgggctcgcggacgatgtcgcgctgaactggctttaccaggatgaacgcgtcggttggctggcgctggtattcagcagcgaccatcccgacgccatcaatcagcatctcgagcgatggctgcaggcattgcgccatacctcgcctgaacagcagttgcactattacaggctggcgcagcggcgttttaacgcactcaccccgctcgaacagttacgtcagcgggcattgggttttgcgcccgattccccgcccatcgactttgcccgtttctgcgccagcttgctgacggcgccagcctcttcgctggtgtgccgcaaaatagcggctggcgatggcgtggcaacccagggctttaccttgccgctcggccgcaggcaaccacggacagtcgtgattgatccgctggcatttagcttctatccgcaggcggcgaccgcggcagcgcctgacctgccgccaacgaccagcccgctgctgcatgtcattgcagataatcaaacgccaacgctgatcgttcgcaagccattctatagcgtgcttagtcaggcgcaggggatggcgataagccagcagctccgtcccttgctcgcgcaacttcgccatgctggcggcagcggcgagtggcaaacggtggacggcaactggcagcttaccctacagctaccggaatccggcggcgtagcggagcgcgtcgtcaccgcacttatgcgccgattagcccaacccgcgccggggacgacggtcgcacctgaaaccattgcgattcgccagctactgcaacaattacctgaacatctgactatcgccccggcgcaagagggttggcttgcggcgatggtgggcggcagcggcaatctggcgcagcaggttgcccgtcagttgacgctgctcaataccccgatcaacgccgagcttcactcttcggcgggctgtcgccgcggtattcagcgtattccccacgccagctcggataacgcgctattagtttttattccattgcccgagggggcatcgctggccgcgctgcaactgctggcgctactttgcgagccgcaattcttccagcgtctgcgggtcgaacagcagattggctacgtggtgagctgccgttatcagcggatcgccgatcgcgatggcctgctgctggcgctgcagtcgccagatcgttccatcagtaacctgctacgctgctgtaaaacctttctccgccagttaacgctgggtgggcaagctgagttcagccagttacaacaccagctggctgagcagaacggtcaggcgcaggacgccagcgccaccgcactctccgccctgcgccagcgctatcatctaccggtagccacgccgcagaacgttaacgacctacagctggacgaggtcatcgcgctatggcgtgagataactcgccgtcgccgcagctggcgaatcctgtttagcgcgccgacgacgtccgccacttaa

SEQ ID NO: 87962 - DNA, 1920 bp, Enterobacter aerogenes
atggccctattgagagatgagatccgcgaccactcggcagaagagatgctgtttatccgccgcgccgttattgctttcctgttggtggtggtctgctttggggtgttgattttcaatctctaccatctccaggtagagcagcacgacttttatcagacccgctccaatcaaaacgacattaaaatgttgccgatcgcgccaagccgggggctgattttcgaccgcaacggtattccgctggtgcaaaatatcaccctgtatcgcctgcaggtgatccccagcaagattgccgatatgtcggcgctgttgcaggcgttaagcccgattgtcgacctgacggcggatgatatcgccagtttccgtgacgatatgcaccacaatagccgctataaagaggtgacgctgaaatccgatcttaccgatgtggaagtggcgcgctttgcggtcaacgaattccgttttcccggcgtcaccgtcgagagctaccagcagcgaagttatccctatggcgcggaactggcgcacgttgtcggttacgtttcgaaaattaacgataacgatttacaacggctggcgaaaaacggcgaagcagaaaactacgcggccgatcgcaatatcggtaaacaggggattgaaggctattacgagaaagagctgcatggcaccaccggttatcaggaagtcgaggtagacaaccacggtcgcgtcgttcgcctgttgaaagaagtcccgccggtcgccggcaaaaatatctatctgacgctagacctgcatttgcagcagtatattgagtcggtcctgaagggccagcgcgccgcggtcgtggccgtcgacccgcgcgacggcggcgtactggcaatggtctccagccccagctatgaccccaaccccttcgttaaggggattggctaccaggcttacaaatcgctgctcgataaccaggatcgcccgctgattaaccgcgtcactcagggcttgtatcccccggcttccacggtcaagccgtatatggcgctctcagccctttccgccggggtgattacgccaaataccaccttcttcggcgcgccgacctggacgctaccgggtactcagcgccgctatcgcgactggttaaaaacgggacatggtatgttgaatgtgaccaaagcgattgaagagtcggcggataccttcttctaccaggtcgcttttgagatgggcatcgaccgtatacacgagtggttgagcaagtttggttacggacaatcgaccggcatcgatctcaatgaagaatacgccggggttttgccgagccgcgaatggaaacagcgggtacataaaaaaccgtggtatcagggcgatacgatttccgtcggtatcggccaggggtactggatcgccactcctattcaaatggtgaaagcgctgaccaccctaatcaacaacggcaaggtacaaaacccgcatcttttatactcaatgaagcaggggaataaggtcgaacgctatcagcagccagccaatttaccgcaggtcggcgatccgaaatcgccatactggggggttgttcgcaatggtatgtatggcatggcgaacctgccgaacggaacgggatataagctgtttcataccgcgccgtaccagattgcggcgaagtccggcacctcgcaggtgtttagcctgaaggagaaccagacctacaatgccaaaatgatcccggtacgtctgcgcgaccacattttttataccctgtttgcgccgtatcagcatccgaaagtggcgatggcgctcattctcgaaaatggcggcggcgatggcgttgtcgccggcccgacggcgcgagcgattctcgaccatatcttcgacccggcgaatgcgccggctgcggatagcgcgcaaagtaacgttccgcaggtcgaaagcgccgatgcgcagtaa

SEQ ID NO: 87963 - DNA, 162 bp, Enterobacter aerogenes
atgaactggcagaaatgtatcagtatgttagaacgtgagttgcctttctcaacgagagaaaggcataagaacgcgttgtcaggtggtaacgattattttttggcctcaaaagcgatctttaccgccattccggcaagtaccgtcgccatcagccaacgctga

SEQ ID NO: 87964 - DNA, 633 bp, Enterobacter aerogenes
atgcctgaattagcttcattatcggcttttgccgcggtggcgttggggttggtgttaacgcctggccccaacatgatgtacctcacttcacggtcgatttgccagggaaaacgcgccggctttatatcccttgctggcgttgcggtggggtttttcttttatatgctgtgcgcggcttttggcataaccgcgctggttttcgccgtaccctatgcctacgacgcgttgcgaatttgcggagtggcttatttactctatttagcgtggcaggcgattaaacccggtgggcggccgattttcgcggtgcgcgacttaccggctgatagcgggcgtaagctgtttctgatgggctttcttaccagcctggcgaatcctaaagtggctatcttgtatttgtctttgctgccgcagtttatcacccccggactcggtagcgtgctgagtcagtccctaatactaggctgtacccaggcgctaataagcgtggcggttaacgggcttattattatgctggccgggcaggtggcgctgtttcttggacggcgaccgggctggcaacactttcagcgttggctgatggcgacggtacttgccggaatggcggtaaagatcgcttttgaggccaaaaaataa

SEQ ID NO: 87965 - DNA, 504 bp, Enterobacter aerogenes
atgaatatgttgatgattattttgtcgctgattggcggcgcattgctaagcgtacaggctgcggtgaatggccgtcttggcgcgcaagtcggaatattgcgtagcgcctttttgaccttttccattggcgcattggtgaccggtttattcatcgttttctttgctccgcagcagtcaatgacgctactggatgtaccaaagtggcaactgcttggcgcgttctgcggggtaccctatattgtcatcatggtgctggcagtacagcgaatcggcacggcaacggcgacggtggcggtaatatttggtcaactcgcgatgagcttgctgattgataatttcgggtggttgggaaatagcgctattgccttttcgccacaacgcctggcagcggtgctgtgtttggcgttagcactgtactttatatacgcgtctggcgtatcaggagcagttgcaccttctaaacggccgggaaaggcgaaatggttgtcgaccgaacgggaataa

SEQ ID NO: 87966 - DNA, 435 bp, Enterobacter aerogenes
atgcagcgtgtgctgatttttttagtgattgccggcggaatggggctgtccgtagaggcaggtctattggggccgctggcgggtcaggtcggtgatttatgggcaacaatgagtattttcgccattggcgcggcattaacgtttttactgatgcttttttttagcccgcgacaaagtccctcttttttttcgctccccggttggcaattaaccggtggtctattggggccaggttatgtgctgatattaacgattgttactccgacgatcggtatcgcaatgacgattaccggtattctcgccggtcaagtatgtaagagtctgttaatcgatcattttggctggtttggtagcccgcggcgaaaaatagatcgccgccgggttattgctctgttgttcattgtggcggcattagtgctgattgccgttgattga

SEQ ID NO: 87967 - DNA, 933 bp, Enterobacter aerogenes
atggccgacgtaggtaacatcaatctccgcgccctccagctgtttatcgccgtgtatgacagccatagtttttccgttgtcgcgcgacgtgaaggcgtgtccccttctctgatttcacgagtcatccagcaacttgaggatgcgcttggccagcagctgttctaccgcaatacccgtgcggtcgttccaacggaggccggaaacctgtttgctgactatgcccgcgggatgaccgagcaattcgctcacgcgcaacgcgaattacaggatcgcgcccaacaacctggcggactcgtgcgcatcaacgccccggtctactttggccaacggcatatcgcgccatggttagcgggactggccgatcgttatcccgagctggagtacgaattaatcctgaccgatgactttgtcgatcctcatcgccaggcgactgatatcatttttcgcatcagcgccctgcctgatgccagctatcacgcaaaggtttttggcgcccagcgctattacctcgccgcagcgcctggttacctttcccgtttcggcgcgccgcaatcgccttctgagcttaatcaacaccgcacgctggtgtatcgcggttcacagggtgctaaccgttggctttttcgccagagggaagaagagtggacccattacccgcaaacaccgcggctaatctcaaacaacgccgatgcccttctcacttcagcgattggcggaatgggcattgttttgtttccggactggatggtgagcgacgcgctggcgcagggaacattagtagcgctgatgaatgactacagcgttggcattaaccatttgccctcttacattgccgcgatttatccgcatgctcgtcatccgtcgctcaatgtacgcaccgttattgattattttaccgacgttttcggcacgccactttactggcaacactaa

SEQ ID NO: 87968 - DNA, 2178 bp, Enterobacter aerogenes
atgagcacgtcaaatgatcccactaacaacccatccgcagggaaatgtcctttccacgccgggacgccgaagcaaagcgccggcagcggtaccgccaaccgtgactggtggcccaaccaacttcgtgttgacctgctgaatcagcactccaatcgttctaacccattgggtgaaaacttcaactatcgggaagagttcaaaaagctcgactactccgcattgaaagccgaccttcgcgcgctgctgaccgactctcaggagtggtggcctgccgattggggcagctacattggcctgtttattcgtatggcgtggcacggcgcggggacttaccgtaccgtcgatggccgcggcggcgcgggtcgcggtcagcagcgcttcgccccgcttaactcctggccggataacgtcagccttgataaagcccgtcgtctgctgtggccggtgaaacaaaaatatggtcagaaaatctcctgggccgacctgtatatgctggcgggtaacgtggcattagaaaacgccggcttccgtaccttcggtttcggcgcagggcgtgaagacgtgtgggaaccggacctcgatgttgactggggcgatgaaaaagagtggctgaaacatcgccacccggaaagcctggaaaaacaggcgctgggcgccacagaaatgggtctcatctatgtcaacccggaaggccctaacgccagcggcgatccgctttccgccgcggcagccattcgtgcgaccttcggcaatatggcgatggacgatgaagaaatcgtcgctctgatcgccggcggccatacgctgggtaaaacgcacggcgccgcaccggcaagccacgttggcccggaaccggaagccgccccgctggaatctcagggtcttggctggagcagtacttacggcagcggtgtaggcgcggacgccatcacctcgggtctggaagtcgtatggacgcaaaccccgacccaatggagcaactacttcttcgagaacctgttcaaatacgagtgggtacagacgcgtagcccggcgggcgctattcagtttgaagcgaaagatgcgccggagattattcccgatccgtttgagccgaataaaaaacgcaagccgaccatgctggtgacggacctgacgctgcgcttcgacccggaattcggcaaaatctcgcgccgtttcctgaacgatccgcaggcctttaacgaagccttcgcccgcgcctggttcaaactaattcaccgcgatatggggccaaaatcccgttatctcggtccggaagtgccaaaagaagatctgatttggcaggatccattaccggctccgacgcataacccgaccgcctccgacatcgctacgctgaaaacggccattgcggattcaggcctgtcggtcagcgaactggtctccgtggcctgggcttccgcctcaaccttccgcggcggtgataaacgcggcggcgctaacggcgcgcgtctggccctgctgccacagagagaatggccggtcaacgccattgccagcaaagtgctgccaacgctacaggccatccagaaagcatcgggtaaagcgtcgctggcggatatcattgttctggcgggcgtcgtgggggttgagcaggccgcagcggctgccggcgttcaagtaaacgtgccgtttgcgccgggtcgcgttgatgcgcgccaggatcagaccgatgttgaagcaatggatctgctgcagccgctggccgacggtttccgtaattaccgtcgcatcgaaggcggcgtatcaacggaaaccctgcttatcgataaagcgcagcagctaaccctgacggcgccggaaatgacggcgctggtcggcggcctgcgcgtgctgggcgctaacttcgatggcagccaacatggcgtcttcaccgatcgcgtcggcgtcctcagcactgacttcttcgtcaacctgctggatatgggcaccgtatggaaagccgcggatgaacaggctgagctgtttaccggtcacgaccgtaagagcggcgaagagaaatataccgccactcgcgtcgatctggtgttcggttctaactcggtcctgcgcgcgctggccgaagtctatgcctgtgccgatgcgcaacagaaattcgttactgatttcgttgccgcatggaccaaggtaatgaatctggatcgtttcgatctgtaa

SEQ ID NO: 87969 - DNA, 1023 bp, Enterobacter aerogenes
atgccacagtacgctgatttctgttttagcgccgtgatggctcaacgggcggcaaaagaaaatctcacccttgatgccgaccagctcgcgttggttgccaacttgcaaacgctgagccatcagttattccggcagcaaacggcaatacaaggattgtacgtctgggggcgaaccgggcgtgggaagagctttattctcgatagtttctttgccagcttgccgctgcgtgaaaagcggcgggtgcattttcatcactttttccgcgaactccatcagcggctgaacgccccttcggcgccgcggttgcaagaggtcgtcgcgcaaatgaccgacaactgtcgtctgctctgttttgatgagtttcatcttcatgacccggctgatgcgatgttgataaaggtgctactggagcatttgtttgcgcgaaatatcgtcttattagcgacctccaattatccccccgaccgtttgctggcgaatccgctctatcacgaacgttttttgccttccattaacctcattaaacgtcatatgacggtaacggcgctcaacggcgaacaggattaccgcgagcgacatgcctcgctggagaatgatttctgccagggaaaactgttggtgcagccaacccccagtactcgcgcggcgctcggtttgccggctattgccgcgcaggcgcaggctctgcaagtaggttatcgaaccctgcaaacggcatcgccgcaaggtacctttctgcatttcactttcgaccagctctgccttgcgcctacctcggtcatggattacctgacgctatgtgagcaacaccagaactggctcgtcgagaaggttccaccgttggcgcgagttagccctgcggcacagcagcgctttatcaacgtggtggatattttgtatgaaaaacagtgccgcttaattttaattaccgattgcgggctggaaacactggtggcggatgtggagctggatgatattcaacgcacctacagtcggttacagcagctcgctcgggaagcataa

SEQ ID NO: 87970 - DNA, 609 bp, Enterobacter aerogenes
atgttaaataattcagaaacgtaccataagctgattgtcgccgcggcggcgtgctttgccgaaaaaggatttaatggaaccagcgtgcgcgaaattgcactgcgcgcaggtattagcctcggcgcgatgtacacctacttcaaaggcaaagatgaactcattgaggcgattatccttgaagagcaaaaatcggcattagctaagcatcaggagcgcttcgaaggttcccattttgcgcagatttgcgccttagccgtttcctgtatagaagaagtggggtatccctcttcgcaccagctgtgggtggaaattattgcggaatcggcaagaaagccggcgctgcggcagattttcgtcaatagcgacaggatcatgcgcgacggaatggcacagattattgctcaaggaattgccgcaggcgagctcagcccacacgttaacgtcgaagaagcaacgctcaccatctttgcattcatcgatggtctgattggccgtaaagcgatgaatcccgcatttaccgtggctaaggatctgccgcattttgacaacgtcatggcgaccattctcaataaaaatagcgctagtgaatcccatgccacagtacgctga

SEQ ID NO: 87971 - DNA, 870 bp, Enterobacter aerogenes
atgccaaatacccaatccagtctgcgtttgctttttccgcaatggcaaggcggcaacaatccgccctacttcttcggctcccggatgctgtcctggctggcgccgcctgcgcaaggcgttgtcgaggaggtctgtgtccccgaaccaggacacgctcaactggcaaatgaagatggaattgtcggccgccgggcgatcgttgaacagttgcttgatgcacaagacaaaatcactcgaaatcagccagagaccattgtcaccttagggggcgattgcctggtctccctggctcctttcgcctggcttgtggaaaaatatggcgataaattgggggtattatggattgattctcacccggacgttatgacgccagagcagttcccacatgctcatgcccacgttcttggggcgttaatgggcaatggcgacgcggaattaacccaggtggtcagaaagccattatcaccaggcaaagcgctcattgccgggatccatagcccgctcgatgtcgaaaaacagtttattagtgaacgcggcatcgccaccttaagcccatcagagctgcgtcagaatccgcaggcgattgacgagtggatagcgcgtgaacgtattgagtacctggccatccatctcgatcttgatgtcctcgacccggccctgtttcgagcagtgctatttgctcgtccggggcgcggcgtacacgattttggcgatgtcgccgaagggaaactgacgattgccgaagtggttaatcttatcaatcaagccgccgctcaggccaaaccggtcggcctcaccgtcgccgaacacctgccctgggataccttaaacctgaagaatatgctcgaagctctaccattattgagttaa

SEQ ID NO: 87972 - DNA, 2733 bp, Enterobacter aerogenes
atgactgacatgaaagtagaaaaccggaataccaaccggtctgcgtcagaaaatgataagcagcataaaaagagctttgcgattgaaacggaggcctttaatagtccggaccatacgttggcacgtttaaatagcagtcggcagggactaacgaccgccgatgcactggaacggctggacgactatggtcgcaacgaagtggcacgcgaaagtgtgccgccgttttatattcaattactgcaggcatttaataacccgtttatttacgtactgatggcgctggcggcagtcagttttattaccgattactggctaccgctacgaaacggtgaagagacagacctcaccggcgttattattatcctgacgatggtgagcctgagtggtctattacgcttctggcaggaattcaggaccaataaagccgcgcaggcgctgaaatccatggtccgtaccaccgcaacggtactgcgccgcgggccgggcaatattggccccagccaggaggaaatacccattgaagagctggtgccgggcgatattattttccttgccgcaggcgatctggtgccggcagatgttcgtctgctggaatcacgggacctctttgtcagtcagtccattcttagcggtgaatcactaccggtagaaaaatatgatctgatggccagcgtgtcgggaaaatgcagcgaccgtctaccgacgccggataaaaataaaagtctcttagagatgggcaatatctgtctgatggggacgaacgtcaccagcggcagggcgcgggcggtggtggtggcgaccggcgaccggacctggtttggctcgctggcaaaatcgattgtcggcacccgcacgcaaaccgccttcgatcgcggggtgaatagcgtcagctggttgttaatccgcttcatgctgatcatggtaccgatcgtgttgttgattaacggtttcagtaaaggcgattgggtagaagcctcgcttttcgccctggcggtggcggtcggtttaacgccggagatgttacccatgatcgtcagttcgaacctcgcgaagggcgcgattgccatgtcgcggcgtaaggtgatcgttaagcgtctcaatgccattcaaaactttggcgcaatggatgtgctgtgtacggataaaacaggcaccctgacccaggacaatatcatccttgagcatcatctcgacgttggcggcgcggaaagcaatcgagtattaatgctggcgtggctgaatagcagcagccaaagcggagcgcgtaatctgatggacagagccgtgttacgctatggggaagggcggctggcgccggcggaaaaagagcgtttcgtgaagctcgatgaattgccgttcgattttgtacgccgccgcgtatcggtctcggtggaagacagccgctatggcgataaaagcctgatttgtaaaggggcggttgaagagatgctcgaagccgcgacccatattcgtgagggcgacaagatcgttgaactggacgcgctgcgccgggaactattgctgacgaaaaccgaagattataacgctcagggttttcgggtattgctggtcgctacccgcaagctggatgataccgcgctaaatgtgccgctcaccgccgctgatgaacaggggctcaccgtcgagggcatgttgacgttcctcgacccgccgaaggaaagcgcgggcaaagccattaccgcactgcgtgataacggtgttgcggtcaaggtacttaccggtgataacccggttgtaacggcgcggatttgtcttgaagtgggcattgatgcgcacgacatactcaccggccaacaggttgagtcaatgactgaccgccagcttcagcaggaggtcgagaaacgcgcggtgttcgccaaactgacgccgctgcagaagtcgcgcattctgcagatgctacagaaaaatggccataccgtaggttttctgggcgatggcattaacgacgccccggcgctgcgcgatgccgatgtgggtatttctgtcgatagcgcggcggatatcgcgaaggagtcctcggatattattctgctggaaaaagacctgatggtgctggaagagggggttattaaaggacgcgagacctttggcaacattattaagtacctgaacatgaccgccagctccaacttcggcaacgtgttttcggtattagtcgccagcgcctttatcccgttcctgccgatgctggcgattcatctgttgattcagaatctgatgtacgacatctcacagctgtcgctgccgtgggacaaaatggataaggagtttttgcgtaagccgcgcaagtgggatgcgaagaacattggccgctttatgctgtggattggccccacgtcgtcgatattcgatatcaccacctttgctctgatgtggtacgtcttcgccgccaatcatgtggaagcgcaggccttgttccagtccggctggtttatcgaagggctgctgtcgcagacgctggtggtgcatatgttgagaacgcagaaaattccgttcattcagagccgcgcgacgctgccggttttgctcaccaccgccgccattatggccatcggcatctatatcccgttctcgccgcttggcgccatggtggggcttgagccgctgccgctgagttatttcccgtggctcgttgccacgttgctgagctactgcctggtggcgcagggtatgaaacgtttctatatcaagcgctttggccagtggttctga

SEQ ID NO: 87973 - DNA, 501 bp, Enterobacter aerogenes
atgttaaagcgtcaggcaataaaaacggcgttggcaatggtgatgtcggtaacgatggccgcggcaccggcgcttgctaatcccgggaacggtaatggcaatggtgaacatggcaatagcggtaaaaacatctatcatggcgataaaggtaatcatggtcatagcgccagccaaagcgataacggcggcggcaagggccagcgtaagaattacggcaaaccggatcacgtcgatagggatatcagctataccaccgctcgcgcgctagcggtgaactacggcttgaccggctataaagcgctgcctccggggattgcgaaaaatctcgcgcgtggaaaaccattacctccgggcattgccaaaaaaacggtgcctgcctcgatgctcaaccaattaccttattatcctggctatgagtggcgggtggtgggtgacgatctggttctgattgcgctcagtaccgccgtggtcaccgcgatcattaatagcgtctttgattaa

SEQ ID NO: 87974 - DNA, 1407 bp, Enterobacter aerogenes
atgtctactacccaggttctcggcgacgcctcctttagcccgccaggacaacatcccgatagcttaaccgcgcgtatcgacgctctgccctcctcccccggtctttggtcctttatcaccctactggcattaggcggctttttcgaactttacgacctgttccagaccgcttatatcagcaccggcctgctcgccgagggtattttccataccggtaaagatggggtatttggtattgccgatcaggcagccttcgcttcctcgacctttatggggctgtttatcggcgccagtctgctcgcaccgctggcggacagacttggacgccgcctgacctttatgttcgcgctggcgtggtatggcatcttttcgctgattatggcgctgcaaaatagcgctgaaggggttattttctttcgtttcctggtggggatcggcctgggaattgaactggtgactatcgatacttatctcagtgaatggatgccgacgcatttacgtaataaagccttcgcttacgccttctttattcagtttctctcggtaccgacggtggcactgatgtcctggctactggtgccaatgaccattctcggcctgagcggctggcgttgggtgattattctcggcgcactgtgttcactggtcatttgggttatccgcaaaaagctgccggaatccgcccgctggctggaaagcaaaggtcgccacgatgacgcgcaccgggttatgggtgaaatggaacaacgctgcggtttatcgccttcccggcgccatgccagtccggcggtagcggtgccgcaacgcagcaattttaaagagatttgggcgccgcagtaccgtcaacgcaccctcatgttaatggtgatgaactttttccaggccatcggcttctttggtttcggtaactggctgcccacgctgctctccggccagggcgccagtattacccatagcctgctgtacgccttctttatcacccttgcctacccgcttggctgcctgttctgtactcgctttgtccatcgttttgaaaacaaatggcaaattgttctgtcagcgctgatgacggtgatcttcggcacactgttcgctttacaaaatagtccggtactgctggttatctgcggctttatgatcacctggtccaatgcctggctcaccatcagctatcacgcctatcaggcggaggtgttccctacccacatccgcgcccgggcggtgggcttctgttactcctttagccgtctgtccaccgcggttaccagcattatgattggcgtgatcctgcaatatgccggaacgccgggcgtgattagctttatcgtcgccagtatgctgatggtcatgctgtcggtaggcatatttgggccaagaacccggggtattcgtctggagaatatttaa

SEQ ID NO: 87975 - DNA, 1191 bp, Enterobacter aerogenes
atgaccataaatctacggcgaatgggcgcgatcatcgcttttatccaatttaccaacgcgctcgaatatatgatttttaatccgttatttgtctatatggcgccaacttttcaggtgccggtgagctgggcaggttatgtcagcggtatttacacgctcgcgtcggtcatttctggaatcggcgcgtggcgcctggtgggaaagctaaatccgcgtaagtttctactggttaatatggccttactgggagcattaacgctgatggttctggctacccagcactttatattgttgctgatactgcgttttttggccgggctcctcggcggaatgacgatgggggtggccagcagtttactgatcaacgcggcggaccagaaacatcgcgcgcgattgttggccacggtcatctctgccttttcgctggtcagtattatcggcatgcccggcatgttgtttctctgcgaacgtttcggctggcagacggcgccggcattgattggcgttctctgcctgctggcgctcatcatgatctatgttggcctgccgaaggcttccggcggcgctggctctggtacaaagatacgcatcacgccaacgatgctgttatttgccagcggcaatgcgttaacccagtttagcccgatgctattactgccgatcctggtgcctttgctgctgggcaatatgcgggcaagcagcgaggcgctaccgtggttattctttctcggcggtatggcgggattcgcggcgacaaagttgagcggcagcctgtgtcaacgctttggcggctatcggctgagcctggcggcaaccgcagtttttatcatcagtttgctgatggtgctgtggctggacggcgcgagttggttgtttatgattaccttccttggggcatcttatagccggctggttgcctcctcggcggtggcgattcgtttcccggacgatgactggcgcgcgggatttaccactctgcaaggcggtgtcatgtcattcagtacggcacttgcttttatgctctgctcactgtggctggccgacggcgagatgagtcagcaggcgtctactgggttgattgcatttagcggcgctagcgccttgctgctgccatgtttactgcgctatcaagaaaaaatactcgtacgcaacgccgccgaacgggcaaccggcggcgttggtgagctttaa

SEQ ID NO: 87976 - DNA, 903 bp, Enterobacter aerogenes
gtgagtaaactggatttgaatgcactacgcgtgtttgtgaatgtcgtggaaaatggcagcttcagcggggcggcgcgggcattacgcatgccttcgtcaaatgtcagtcgccagatttctcaactggaagaaaaactgcaattgcgccttatccagcgcagcaccagacatatgcatctcaccgatgccgggcaggctttttttaatagtatgcgtcccctgcttgatcagctcgcggcaaccgaagcggccttaactcaacagcaggccgatcctgaggggctgttgcgcttatgtcttcccaacgagattggaccgaccctttttggccccatgctggcgcagttcgccatgcgttatcccaaaatcgaagtaagctgtgtggtcagccttgccggagccgacgcgcttaaagaagatatcgacattgccgtcgccatcgtccgaggcaaaatggaggatgccagctatatcgccatgccgttggcgacatttccctgttgtgttgtcgctgcgccttcgctgctggaaaaatgcggacagccagtacgttgcgagcagcttgcctcacttccctgcatcaccaccgtcagcgcgctgaaggggcaagcctggcaatttatcaccgcacgaaacgcgtttaaaaaagtgaacgtccaggctcattttcgggtgaatagcggagagatcgcccttcatgccgccgtcgccggcgtaggtttcgccatccttgcagaacaggcttgccgcccgtttatcgcctcaggtcagttaaaggtggttgaactggagctaccgccggcaccgctacatttagtggcgctgtatcgcgaacgccactttttacctgcccgatctcgcgtctggctcgatttcatgcagcagcatttggccgccaattaa

SEQ ID NO: 87977 - DNA, 897 bp, Enterobacter aerogenes
atggacattaaacagctgaaatatctgatcgcgctcgatcagacgcgccatttcggccaggccgcggcggcctgccatatcactcaaccgacgctttcaatgcgcattcgcaacctggaagacgaacttaatctcacgctgattcagcgcggccaacgctttgaaggcttcaccccggaaggggaacgcatcctcgcctgggcgcgggcgctgctggcggcgcacgatggcctggcggctgaagcggcgatttgtcgcggccagatggtgggccagttacgcgtaggcatggtgccgttagccagcctgaacccgatgcagctgatcaaaccgctggcggaaaaataccctgaactgcagttcagtctgctgtcgatgacctctgagcaaattattgacggcgtcagccgtaatcagctcgatctaggcatctgctatttgcaccacgtcgatagcgcattatttaacgtcacctggctgccgaaaacgcgaatgggcctgctgcacgacagtcgccatttccagtttgacgcaggcatacctgagtgggagacattagcggggctgccgctcggtttccttaccaagggaatgtattatcgtgaatcgattgaaatgagctttaaagccaaagggttaacgccaaaatatgtctttgaaagcgattcgacatttcagataatccaggcggtacaggccgggatctgttgcgccatcatgccgctcaataacggcctggaagcgctgagcgacaatctggcgattatgcctatcggggaaaccgaggttgattccacgcttgcgcttatcatgcgcaaccaggagccggtgtcgtcgttggcggaaaaatgtttcgccgatgcgcagatgatttttggcgaagcgccgcaaatttaa

SEQ ID NO: 87978 - DNA, 2301 bp, Enterobacter aerogenes
atgaataagaaaaaacgcgctgtccccggtgttcatccctatgatggcccagcgggtggatggggggcgttaaaagcgaccgccatcgccgtgcgtacgcaaatggacgcgcttgacgccccggtcacgctgctgcgtaccaaccagcctgacggttttgactgccccggctgcgcctggccggataaagaacataaatcaaccttccagttttgtgagaacggcgcgaaagcggtcacctgggaagctaccagcaaacgcgtgacgccggagttcctcgccgccaataccgtgacctcgctactggcgaaaagcgactttgaactggaaggttacggacgtattacccatcccttgtcttacgatcgcgaaagcgacacgctgcgcccggtctcctgggaaagcgcgtttgcccgcattggcgaagtattacagggcatgcagcccgatgaagttgagttctatacctccgggcgcgcctctaacgaagcggcatatctgttccagctttacgcccgcgagttcggcaccaataacttcccggactgctccaatatgtgccacgaggcaaccagcgtcggtctgccgcaatcgatcggcatcggcaaaggcacggtgtctttggacgactttgataaaaccgaactggttatttccatcggtcacaaccccggaaccaaccatccgcgcatgatgggtacgttgcatgaactgtcccgccgcggtgtgccgattatcgtctttaacccgctgcgtgaaagggcgctggaacgttttgccgacccgcagaacgttattgaaatggcaacctacagctcgacgaatatcgcctcaacctatttccaggtgaaagcgggcggcgatgccgcggcgctgaaagggatcgctaaagcattactggagatcgaagcgaaccagggccaggtgctggaccaggcgtttattaacgagcacaccctcggcttcgaggcttttgccgaagatttacgtcagaccagctggccggaaattgagcgtgagtccggattaacccgcgacgatctgcagcgcgttgccgttgcctacgccaaatccaacgccactatcgtgacctatggcatggggatcacccagcataacaaaggcacctctaacgtccggttgattgccgaccttctgctgatgcgcggcaatatcggcaaaccgggggctgggatctgcccgctgcgcggtcactctaacgtgcagggcaaccgtaccgtcggcattaccgaaaaaccgagtgcggagtttctgaataacctcgaaagcgtgttcggttttgtcgctccacgcggacatggtcacgatgcggtgaaagccctgcaggcaatggttgccggcgacgcgaaagcgctgatctgtcttggcggtaatttcgcggtggcgatgccggatcatgaacgggcgttcccggcgatgcgtgggctggatcttagcgtgcacatcggcaccaaattgaaccgttcgcatctgctggtagccaaagagacctttattctgccttgtctgggccgtaccgaactcgatatgcaggagagcggacgccagtcgattaccgtggaagactcgatgtcgatggtccacgcctcatccggcaaactgaaaccggcctctgaccggctgcgctcggaaccggctatcgtcgccgggatggcggcggcgacgctgccgaacagtaagatcgactggttatcgctggtggctgattacgaccgcatccgcgatctcatcgagcagactatccccgggttcgaggattataacgaacgtattcgtcatccgggcggtttccgtatgccgctgccgccaaccgagcggatctggccgacgccgaccggcaaagcgatgttctcggtgttcaaaggcgtccatgagaacttccgcgttgacggcgacgacgtgatgcgcctggttacgctgcgcagtcacgatcagtacaacaccacgatttacgcgatggacgatcgctatcgcggagtgtttggccgccgcgatgtgctgtttatgaatgagcaggatatggccgagcaggggctggagcatggcgaccgcgtcgatattttcaccgcgctgccggatagcgacctgcgccttgaggatatcaccgtggttgcttacagcattgcgccgggcaccgttggcgcctattacccggaagccaacgtgctggtgccgctggattacatcgatgaagagagcggcacgccgtcgtacaaatcagttcctatccgcctgacgctgcgttcgaaagaggtgcgcgccgtccccggtctgcgttaa

SEQ ID NO: 87979 - DNA, 1410 bp, Enterobacter aerogenes
atgttcggattagatgccttttatttagccaggatacagtttgcatttactgtatctttccacatcattttccccgccattaccattggtctcgccagctaccttgcggtactggaagggctgtggttaaaaacaaaagaggatacctaccgccagctctaccatttctggtcaaaaatatttgccgttaattttggtatgggcgtcgtttccgggctggtgatggcctatcagtttggcactaactggagcgggttctcgcagttcgccggtagtattaccgggccgctgttgacctatgaagtcctgaccgccttcttcctcgaagctggctttcttggcgtcatgctgtttggctggcatcgcgtcggccgcggcctgcacttcttcgcgacctgtatggtggcgctgggcacgctgttttccaccttctggatcctcgcgtccaatagctggatgcacacgccccagggctacattatcgagaatggcatcgtggtgccggtagactggctgaaggtcgtttttaacccttcattcccgtatcgcctgctgcacatgtctaccgccgccttccttgccagcgcctttttcgtcggcgcttcggcagcctggcatctgctgaaaggcaatgacacgccggctatccgcaagatgttctcgatggcgctgtggatggcgctgatcgtcgcccccattcaggcgatgattggcgatgcgcacggcctgaatacgctcgaacatcaaccggcaaaaatcgccgcgattgaagggcactgggagaataaaccgggtgaagccacgccattggtgctgtttggtctgccggatatggatgaggagcgcaccaaatataaaattgaggttccctatcttggtagcatcatcctgacccatagcctcgataaacaggttccggccttaaaaagtttcccgaaagaagatcgcccaaattccaccattattttctggtcgttcagggtgatggccgggctcggtatgttaatggtactgctcggcgtggtcagcgcctggctgcgttggcgtggccggctctacacctcaaaaccgttcctgcgttttgccctgttgatgggcccttccgggctggtcgcgctactggctggctggtttactactgagattggccgtcagccgtgggtagtctatggcgttcagcgcacccgggatgcggtctccgcccatggcgatctgcatatgtccctcagcctgctggcctttatcgtggtctacgcctcggtgtttggcgtcggctacgtgtatctgattcgcctgataaaaaaagggccggaaagtgcgcacacgccagaagacccgactcagaaccaaactccagcccgcccgctgtccgcggtacgcgaacctatgaatacttcggggagaaaataa

SEQ ID NO: 87980 - DNA, 1011 bp, Enterobacter aerogenes
atgggtatcgacctgtcaattatctggttcacgatcatcgtttttgccaccctgatgtatattgtgatggacggtttcgatctcgggatcggcattctgttcccgtttaataaaaatgaaaccgaccgcgatatgatgatgaatagcgtggcgccggtgtgggacggcaatgaaacctggatggtgctgggcggcgcggcgctgtatggcgcgtttccactggcctacgcggtgattatcgatgcgctcagcatcccgttaaccgccatgttactggggctgattttccgcggcgtagcgtttgaattccgctttaaggcgacgccggaacatcgtccgttgtgggataaggcgtttatcggcggctcgctactggcgacgtttagtcaggggatcgccgtaggcaccctgctcaacggcctcagcgtcacgggtcgcgaatttagcggctcgaccctcgactggctggcgcccttcccgctgttttgcggcatcgggctggtgattgcctacgctctgctgggctgcacctggctgataatgaaaaccgaaggcgcactgcatcgcaaaatgtccgagctggcgatcccgctgacgctggcattgctggcagtggtcgccattatcagcatctggacgccgctgactcacccggaaatcgctcaccgctggtttaccttccccaatatcatctggtttatgccggtgccgttgctggtgctggtttgctgctgggggattgtccgtagcgcctataatcgtcaggccagctatgggccgtttttactcactctggcgctggtgttcctcgggttcagcggccttgggatcagcatctggccgaatattattccaccggcaatctctatctggcaggccgcttcgccgccgcagagtcagggctttatgctggtcggcgggctgctgatcattccggttattttgatgtacacctgctggagctactacgtgttccgcggcaaaatcaaacccgatgaggggtatcattga

SEQ ID NO: 87981 - DNA, 162 bp, Enterobacter aerogenes
atggcgactcaatctgataaaacgttaacgacgcatcatcgtccgttctggcgcaaactgatgtggctggtgattatctggggggccagcgtgctggcgctcggcgtggtcgccaccttctttaagctattgatgacggcggcaggaatgcgcactcactaa

SEQ ID NO: 87982 - DNA, 918 bp, Enterobacter aerogenes
atgatcatccggccagaacaacactggttttttcgtctgtttgactggcacggttccgtgctgtcaaaaattgttttccgcctgctattgaacgttctgatgtcggtcatcgccatcatcagctatcaatggtatgaacaacttggcattcacttaaccgttgcgccatttagcctgttggggatcgcgattgcgatttttctcggctttcgtaatagcgcgagctacagccgtttcgttgaggcgcgtaatttatggggaaccgtgctgattgccgaacgaaccctggtcaggcaattgaaaaatatccttcccgctgaggaggaaacgcataaaacgttagtcagttatctggtggcgttcagctggagccttaagcatcagctgcgtaaaaccgacccggcggttgacctctatcgcttgttgccgaaagaaaaagtggcggaaattctcgccagctcaatgccgactaaccgaatattattattgattggtaatgagttaggtaagctgcgcgagcaggataagctcagcgatattacctacggcttgatggataataaactcgatgagttagcccatgttctggggggctgcgagcgtctggcgagcacgccggtgccgtttgcctacaccttgattttgcagcgtaccgtttatcttttctgcgcgttattgcccttcgcgctggtgggggatttgcattacatgacgccgtttgtttcggtgtttatctcctacaccttcctgtcctgggattccctggcggaagagctggaagatccgtttggcacctcggccaacgacctgccgctgaatgcaatgtgcaataccattgaacgtaatttgatggatatgaccgggcaacatccgttaccggaaaaaatgcagcccgaccgttattacaacctcacataa

SEQ ID NO: 87983 - DNA, 945 bp, Enterobacter aerogenes
atgaaaattaacgaacctcaggcgattactttaccgctgccgcgaacggcgatattcatcgtcgcgaccgtagcgcgcagcgctgagagcctgagccgcgtgcgcgactggtgcgatgattttgccgcggtggtgcgttccgttggtacccgcatgccggaggcggggatttcctgcatctgcggatttggcgctgagatctggccgcagttgtttggtcaacccaccccgcagcaactgcatcctttccgccgcgtgggcagcggagagcgcgtggcggtctctacgccgggcgatctgctgctgcatatccgttccgatgatatggggcttagcttcgagctggcgacgcagttgatggataagttgggggatgccgtaacggtcgtcgatgaagttcacggcttccgctatttcgaccgtcgggcgatgatcggtttcgttgacggtagcgaaaacccgcaggggcgcgcggcggcggatttcaccattatcggtgacgaagacccggatttcgccggtggtagctacgtgattgtgcagaaatatctgcacgatatggcgggctggaatgcgttaaccgtcgaacagcaggagcgtattatcgggcgtaaaaaaatgaccaacatcgaactggatgccgatgtcaaacccagctgttcgcacagttcgctgaccacccttgaagagaacggcgaggagattaaaatcctgcgcgacaacatgccgttcggcaagcccggtatgggcgagtttggtacctattttatcggttatgcgcgcagcccggcgcccatcgaacagatgctggaaaacatgttcgtcggtcgcccggccggtaattacgatcgactgctcgattatagccgcccggttaccggcagtttgttctttgtaccttccgcgacgctacttgaagaattatccagccgccaggctgaataa

SEQ ID NO: 87984 - DNA, 927 bp, Enterobacter aerogenes
atggcaaataaaaatcaacagaatgataataaatatcatcagcgttcacaggctgcgcgtaaaagcaccctggttagcgtcgtggttaatctttttttatcgaccgggcaaattatcgccggcctgttttcagggtcgcaagggcttattgccgatggcatccactctctttccgatttaattgctgattttgtggttctgattgccaataagaaaagccgtaaaccttccgacagcgatcatcattatggccactggcgctatgaaaatggcgcgtcgctgatattgggcgcgattttaatggttgtcggtgtcggcatgttgtggtcggcggtggataaactactccatccggaaaccattcaatccgtgcatgtaacggcattatgggtggcccttgcagcgctgatcgcaaaagagacgctgttccgttatatgctggcggtagcaaagcgcattcagtcgtcattattaattgccaacgcctggcatgcgcgctcggatgcggcgtcgtcggtagtagtggcggtagggatcgttggtaacctcgccggtattgtctggttggatcccgtggcggcattgttagtaggggtattgattacacgaatgggttacacttttgccggcgatgccttgcatgatttaatggatcgctcggtcgacgcgggaacccaaaacgcaatacgtgacaccatcgccgcaacctgcggcgttgtggggcttcacgatcttaaaacccgcaaggcgggcgacctgatcctcgtcgatgtccatattgaagttccgggcgagctgtcggttcgtgcaggccatgctatcgcgctggcggtgcgggaaaatgtgctcgcgcgccatgaggtgctacaggtgatgattcacattgatccctacgaagcgcccggcggtgaactggctcacgcgtaa

SEQ ID NO: 87985 - DNA, 906 bp, Enterobacter aerogenes
atgttggtggcgttacggatagcgacgggcaacgcaatgaacagcatacgcggcatgattgaatcacaggtcctgggtttaaccgggatggcgttaaaagagattgattttgaaaacccgaagggcgagccgggcttatttggcccgcggtcggctatctggcaggtacacggcgactttacctcaatgctctgcggcggcattagcgcgctactgttacagatgctgcatccgctggcgctggccggtgtgtgggatcattcgcgttttcgtgaggatatctttggccgtctgcgccgcaccagtcaatttatctcagccaccacgtttggcactaccgacgatgccgaaagattaatcgctaaagtgcaggggatccatcagcgcatcagcggcgttgcgccggacggtacgccttatcgggccagcgatccggcgctcttaacctgggttcatgtggccgagtgcagcagctttatggcctctcatctgcgttataagcgcaccatcgtcactgccgcgcgtcaggagcaatactaccgcgaagcggcggaggtcgcccggcgacttggcgccgaagacatccccgaaacgccacgtcaggtggcggagtatttgcaggatatgcgcccccagttacgttgtgatgaacgaacgcaggaagtggcgcaggtgctgctcaccacccgtctgccgggccggctaagccagccggtagggcgctggatgatggtcgccggaatcgatctgcttcccgattgggcgcagcagatgctggcgatccccatcaatccgctgcagcggcgaaccgccagagtggcggtcaatggcgtggcgcgggtacttcgcgcttcggtgcgcaatggcgcttatcactgcgctatgcgccgaatggcaacatcataa

SEQ ID NO: 87986 - DNA, 432 bp, Enterobacter aerogenes
atggcaattcataagaaaggtcaggcgcattgggaaggggatctgaaaagcggtaaaggcaccgtctcgacggaaagcggcgcgcttaaccaacaaccttatggttttaatacccgctttgaaggcgttaaagggactaacccggaagagcttatcggcgcggcccatgccgcctgtttctcaatggcgctatcattaatgcttagcgaagagggctatacggcgacctctatcgataccgttgcggtggtcacgctggataagagcggcggcggcttcgccatcaccaagatcgcgctgcagagcaatattgtcctgccgggtatcgataaagcggcctttgatccgattatccagaaagccaaagctggctgcccggtttcgcaggtactgaaagccgacatctccctcgattatcagctcaacgcttga

SEQ ID NO: 87987 - DNA, 885 bp, Enterobacter aerogenes
atggatcgagttatcgccgcccaggtatatatgcgcatatgcgagctgggcagtttgagcgcggcggccagggcgcttggtatgtcgcgaccgatggtgagtcgctatctggagcagatggaacactgggccggtacccggctcattcatcgttcgacgcgcaaactgaccttaaccagcgcaggcgaaaaggtattgcagaaaacacgtagcctgacgcaattggcggatgagatagcggggcagacggaacgcgcggtgccgagcggcacgttgcgggtcgcctgcgcgcactttaccgccatgcagttgctctcaccgctgctaccggagtttttggcccgttacccccaactgcgcctcgaactggatatcaacaaccatccggtgagcctgattggcgagcgtatcgatgtcgccatccgaatcaccgataatccggagccgggggcgatagcgcggcggctcggcatttgccgctcggtgctctgcgcctcgccgcggtggttacagcagcatggccagataaattcgccggaggagcttagtcaacataactgtctccactatagccatttcgcctccccaacatggcagtttaccgatccgcagggcgaacccgtgtcggtggccgtctccggcaacctgagcgctgggatctcctctctgctgatggaagcggcggtggcggggtgcggcatcgccatgctgccggaactggaagcccggcgcgcgctaaacagcggcgcgctaaaacaggtgctgcctggctatacgccaaaatccctggccgtctatggcatctatctgtcacgagattatcagcccagcgcgctgccgctgtttctggaggccattcagcaacagttgtcccaggtcagctag

SEQ ID NO: 87988 - DNA, 852 bp, Enterobacter aerogenes
atgaaagtatctgccctggctatcgccaccgccctgttcagcactaccgcttttgccgcgccgttgaccctgcaaacctacaacccgcaggagaacgcgatcttcgcggtgaactccacgctggcctccggcccgcacgaagcggtgctgtttgacgcccagttcagcgttaaagatggcgaaaagctggttgagatgatcaacaaaagcggtaagaagctcacgcacattgtgatcacctctggcgatccggatttctattttggcctcgagccgctggtgaaagccttcccgcaggccaaagtggtggcaaccgagcaagtggttaagcatattgaagagaccaaagcggcgaagctggcatactggggcccacagatgaaagacggcgcgccgaagcaggtctatgttccacaggtattagccgcagatagcttcaccattgacggcgagaaagtggaaattcgtcagccgcagaactacgccgcgttcgtctggatcccggcgaataaagcgattcttggcggcaccggcgtcgcctggggcatgcacgtctggaccgccgatacccaaagcgcggcgagccgtcagcagtggcgccagacccttagcgatatggccgcgctgcatccgcaacaggtgatcccgggccactatctcggcacgccgccggcgggcgacaaggctatcgtctttacccgcgactatctggagaaattcgagcaggcgctgaaagcgcataaagattccgccagcgtcatcaaagccatgaaggcgcaatatccgggtctcgcggaagaaagctcgctggagctgagcgcgaaagtgaataccggcgaaatgaagtggtaa

SEQ ID NO: 87989 - DNA, 141 bp, Enterobacter aerogenes
atgaaatcgaaccatcaggcacgtcatcttctcggtctgaactacaagctttcccgccagaaaaaagtggtgctcgaaggcgacgaagaaactaccgttaaccatatccatgctacgggccgcaaacgccgcggtggttaa

SEQ ID NO: 87990 - DNA, 1698 bp, Enterobacter aerogenes
atgcaattcatctataaaaaaaaccgctctctttatatcccctacgctggcccggttctgcttgagtttccgttactcaacaaaggaagcgccttcagcatggaagagcgtagcagcttcaacctgctgggcctgctgccggaagtggtcgaaaccatcgaagaacaagctgaacgcgcgtggatccagtatcagggatttaaaactgagattgataagcacatttatctgcgcaacatccaggacaccaacgaaaccctgttttatcgcctgattggcaaccatcttgatgagatgatgccggttatctatacccccaccgtcggcgccgcctgtgagcgtttctcggaaatctaccgtcgcgcgcgcggcgtgttcatctcctaccagaatcggcacaacctcgacgatatcctgcaaaacgtaccgaaccataacgtcaaagtgatcgtggtgaccgacggcgagcgtattctcggtctcggcgaccagggtatcggcggtatgggcatccctatcggtaagctgtcgctctatactacctgcggcggtatcagcccggcctacaccctgcctatcgtgctggatgtcggcaccaacaaccagcaactgctcgacgacccgctgtatatgggctggcgtcatccgcgcgtgaccgacgacgagtattatcaattcgttgatgacgttatccaggccatcaaaaaccgttggccggacgtgctgctgcagtttgaagatttcgcgcagaaaaacgccatgccgctgcttaaccgctatcgtaacgagatttgctcgtttaacgatgatattcagggcaccgcggcggtcaccgtcggcacattaatcgccgccagccgtggcgcgggcagccagctcagcgagcaaaaaattgtcttcctcggcgcgggatccgccggttgcggtattgctgaacagatcatcgcgcaaatcatgcgcgaagggttaagcgaagaagaagcccgccaacgcgtatttatggtggaccgcttcggcctgttgaccgacggtatgccgaatctgctgtcgttccagagcaagcttgtgcagaaacgcgaaaacctgcaaggttgggatacgaccaacgaagcgctctcgctgctcgacgtggtgcgtaacgtgaagccgaatatcctgattggcgtctccggccagccggggctgttcacggaagaaattattcgtgaaatgcacaagcactgcccgcggccgatcgtcatgccgctgtcgaacccgacctcccgcgttgaagccacgccgcagaacatcctgacctggaccgacggcgaagcgctggtggccaccggcagcccgttcaccccggtgacggttaagggcaagcagtacgccatcgcgcagtgtaacaactcctatatcttcccgggcatcggccttggcgtgatcgctgcgggagcatcacgcgtcaccgacgaaatgctgatggcggcaagcgaaaccttagctaaccactcgccgctggtgaataacggcgaaggcccggtactgccggaactgaaagatattcaggccgtatcgcgcgctatcgcgtttgcggtcggtaaagtggctcaggaacagggcgtggcggtgaaaacatcggccgaagcgctgctgcaggccattagcgataatttctggcagccggaatatcgcaactatcgccgaacctcaatttaa

SEQ ID NO: 87991 - DNA, 1134 bp, Enterobacter aerogenes
ttgcccgcctgttcgctcaccgataaattagcaaacagataccgcggcgctgaaataagcgcgcagcagaaaacagaaggtttaagtatggcgaatattcgtgatgtcgcccggcgggctggagtttcaattagtagcgtgtccaacgtacttaataatcgcacgcaacagatgcgcgaagagacccgacagcggatagtcaaaacgatggctgagctaaattaccgccctgcgcgttgcgctccgccggtcgccgattcagcaaccaaaatgctcggcctgatggtaccgtctatcgtcaatcccagcttttcagcgctggcgcatgaactggatactgcggcacgcgcgtttcgccaccggctgttattaggcatttgctgccgcgatgccgacgaggagtcagcctttatcgcggatatgttctcccacggcgtgcgcgggttgatagttgccgccagcgacgtacgcaaaacccactttgtgcgcgcagcggaacaaggcatgaccattattagctatgacaaccggctggccgaaagcgtcccgcctcgggcgcgctacttcgatagtgtctcaatggacaacgttgaagcgggacgtctggcggcgcaacatctgctggacaacggttgccgtaatatcgtctttgccaccgaaagcgggttaacgctgggacgcagccataaaatcctcggctttcagtcggcgctttcccaaagcggtacagcggccagaggcgtggtgatagaaggcaaaggcaatcgggaattcggcgacgccgagatgttcgaactgggcgtaagcctggcgcaaaaaattagcgccttaacgccgcgagtggatggcgtggtagcgattaacgatgctttagccatcggcctgatggttgggctacgcgcgcagggcctgaaaatagcggaagatatttcggtgattggcatcgataacatctccctgtcggcgttatcgtcaccgggcctcacctcggtaatggccccgctttcggcaatggcgtcgatgatggttgagcggcttgtccagagaattactgagccgggattacaaaccgacgaatttatctttgcaccggaagtgatacagcgtcagtcggtaaaaataaagcaaccctag

SEQ ID NO: 87992 - DNA, 1308 bp, Enterobacter aerogenes
atgaacctacaatctgcgcaagatatagaaaagagcgccattaagaaattgacatggcatattgttccattaatgatattgctttattttctggcttttcttgaccgtaataatatggcctacgccgcaatggccttagaggatagtctcggcctgacggccaccgcctttggctttgcttcgggaatatttttcatcggttattttatgtttgaaattcccagcaacgccggcacgattaagttcggtccgcggctgtggttcgcgcgtattctgatcacctggggaatatttgccactttgatggggttcgtcagaacgccgaccgaactctatatctgtcgttttatgctcggcgtgtgcgaagccggtttcttcccttcagtggtgtactacttcacgatcttttttccgccagcctggcggaccaaaattctcggcatgttcattattgtccagccgctatccaacgccgtgggttcaccgatttcaggcttaattctgcatatcgataacggctggtttggccttgaatcctggcagtggttatttatcctcgaaggtattccgccgatcgttatcggcctgttcatcccttttattattaagaattcaccgcaagaagtcggctatctcaacgctgaagaaaaggcgtggttaatgagtagtacgaaccgttcaaaatcagggagtaaagtctcgctggctgagttcgccagcggtattaaaaatcccaaatacctgctttatgcgctgctgaatttcgggatggtgtgtgggatttacggcttcgggatgtggctaccgtcgattattaccgctatttccggcgatgatattcttcgcgtaagcctgattgcccttatcccctacggcctggcggcgctactggtttatccatggagtatgctggccagtaaaacacgcaaaatcgccgtttttgccggtatcagtatggtcgtcgccgcattagggctcgccggcgcggtggtgttctttaagttcaacgtcgcgatttcactctcattcctgaccattgccgccattggtatctataccgcggtaccgtgtttcttatcgatgcctgccaacgtctcggcaggcgcagcgacggccgcgggtctcgccgtggtgagctgcatcggcaacctgggcggcttcgtcgccccttacgtggtcggcctccttaacgacttcagccacagcagcacgccgggcctgattttcctcgccatgtgcctgctgatcaccggcctgatttgcattttctactgcgccagacagcgcgaaggcgtcattcaatcctga

SEQ ID NO: 87993 - DNA, 765 bp, Enterobacter aerogenes
atgggaactcttattggaaaaaaagcatttatcaccggctctgaacaaggtatcggctgggctacggcggaaaaactgattctggcgggatgcgatgtctttttgcactatcacagcggtgaagaaggcccgcaaaagttggcggctatcgccagcgcgcgagggcaaaaagcggcctggcgctatgcggacttgattgacactgaggacgcgaccgcctgcgtgcaggccgccgcggaattcctcggcggtatcgatatcctggtgaataacgtcggcggtatcgtcgggcgtaagtggcttggcgaaattgaccgtcagttctggcaaacggtgttagacgtcaatatgaccaccatgcttaacgtcacccaggcggcgcttccctggcttaaatcggcaacggatggcgccagcatcattaacctcgcctcgctggcggggcgctccggggggcatgccggttctctcgcctattcaaccacaaaaggggccatcctgacctggacacgctcgctggcggctgaactgggcgagcacggcgtgcgcgtcaatgcggttgcgccggggcttattctcggcacccgttttcataaccgccacaccacacaggcttcggctgacgaaaccatccggcaaattccgcttcagcgcgcgggaacgcccgatgacgtcgcccgcgccatcactttccttgccggcgagtatgacggatttatctccggcgccactatcgatattaacggcggaatttatcgcatgtaa

SEQ ID NO: 87994 - DNA, 414 bp, Enterobacter aerogenes
atgatcaaattcgaaattattcatccacaactgctggctgctctggcgtgctgcggccataaatcacaaattctcatcgcggatagcaattatgcctgccgcgttaatgccaatgccgaagccacgttgattcagctcaacctggctccgggcatggtaccggcaacttatatcgtcgaaaaactgcttacctccgttaatgtcgaacacgcgacgctgatggcatcaccagcggaattcactaacaccatcgccagtgaattccgggagcttctaccgacaaactgcccgcttgaatatgtcgaacgcgaagctttctacgcaaagtcccggctgccattgacccaactggtcatcgcttccggcgaacagcgtcgttttgccaacctactactcaccgtggccccggcctaa

SEQ ID NO: 87995 - DNA, 1716 bp, Enterobacter aerogenes
atgagcacacttttaagcgcacaatctctccacgttgatacggcctttggcccacttttcaacgacctctcctttaccctgaaaaaaggcgatcgcattggcctgattggctataacggttgcgggaaaagcacgttattgcaggtgctggacggcactctcacgccgaattctggcagcgtatcgcgggctaatcactgcctgctggcgcgcgtagaacaacatctgcctgacgccctactcagccaaccgctattgcaggtggtactggaaaaactggcgcctggcgaacgggattcgctgcgctggcaagcggagcgactgctcgctgaaatgggttttaccgttcaacagacccaacagcaagccgccaccctgagcggcggacaacatactcgtctgttgctcgcccgcgcgttgatccaacagcccgatttgctgttgctggatgagccaggcaaccatctcgatctgccgaccctgctgtggctggaaagcttcttgcaaacctggcaggggagcttcgtggtggtgtcgcacgataacctcttactggatgctgtaactaataccagttggattttacgcgacaaaacgctgcacgctttctcgctaccctgcagcgccgcccgtcaggcgctggaggagcaagatgcaagcgatgctctgcgccacaaagcggaacaaaaggagatcgaccgcgtcgctgccagcgccaaacggctggccatctggggtcgggtttacgataacgaagatctggcgcgtaaagccaagcagatggaaaagcaggtttcacgcctgaaggatagccagacggaactcaccgccggcacgccgtggcgtcttgaggtgcatggcgacgccgttcgcgccgaccgtctgctggagatggaaaatctccccgtgccgccggcgcccggtctccccgccctgttcaccaccggtctggcgcggctgcaaagcggcgaccgggtagcgataatggggcgcaacggcggtgggaaatcgtcgctgctgcgcctgttatggcgacaaatgcagcaaccggctagcgaagccgggctgcgtttacatcctcgactacatccgggttattacgatcaaaccctgcatcaactggcggatgaggccagcctgctggaggcgctggagccctttgagccttcgccggaaacgcgcaagcgggcgctgatttccgccggcttcggctgggcgcgacacgggcagaaggtcagcaccctcagcggcggcgaacgttcacggctgctgtttgtcggcctgtcgctggcgagctatagcctgctgctgctcgatgaacccaccaatcatctggatatggagggaaaagaggcgctggcggcgacgttgcgggagtatcccggggggctgctgctggttagccacgaacgacagctcctcagccagagctgtaaccgcttctggttaattgatgaaaacgggttaagcgagtggcacgacgtcgacgaggtgtacgcccgtctgcgcggcaacgagcgccttcaaagcccggcgacgcaaacgccgccgcaggcgccgcccgtcgacgacctgcaagaggatttgctggaacgtctggtgatgctggaacagctattggcggacgatctgcagcgtaagccgaagcatcagaagccgcagctacaggcgctgtggcgtcaggagattgaggagataaatacccatctgagttaa

SEQ ID NO: 87996 - DNA, 1011 bp, Enterobacter aerogenes
atgccagggccattgacagagcgtgttgataatggttgtattgtgcaactacctttcgcggatattaccatgcctgacactttacttatcaatcaaattcgttccgcatcacgattgatggtgcgcgagctcggctttatgaacagcacgctggcggcgaccgactattcaccttcagcggtgcatgcgctgctggagatttctactcatggcgcgatgaccgccgcgcaactggtgcaggtattggggctggacaaatcgagcgtcagccgaatgttatcgcgcctgcagaccgctaacgagatagaggaaaatggttgtggtgatgacgggcgttttaaacaactctcattgacaaccaaagggcaggcgacggtcgcccgcattcatgagtacggcgccatgcgggtgattgaggcgctggcgcatttggatagcgcacagcagcagatcgttgccgaggggttgacggcctattcgtgggcgcttgagcgctgtcgtcagcagccggtcacgagcagaccaaacgacatcacgatagttaccggctatcagccgggaatgattggccgcattgcgcaaatgcacggtgagtattacgcccgtcattacggcttcgggcatttttttgaaggtaaagtcgccagcggtctggctgaattttctggcaggctgaacaatcaacgtaaccagatttggctggcggtcaaaaatggcgtcatcgtcggctctgtcgccattgatggcgaagacctcgggaataatgaagcgcatctacgttggtttattctcggcgatggctgtcggggcagcggcgtggggcgccgcttgctgactgaagctatcaacttttgtgataatcagcgcttcgatgcggttcagctatggacgtttagcggcttgcaggcggcgcgtaaattatatgaatcctttgggtttacgctgagtaaagagtggcagggcgatcaatgggggaagaccatgcttgagcagcattttacccgccgctaa

SEQ ID NO: 87997 - DNA, 1011 bp, Enterobacter aerogenes
atgaaagctgctgtagtcacccacgaccaccagattgatgtaaccgataaaaagttacgcccgctggagcatggcgaagcgctgctgaaaatggaatgctgcggggtctgccacactgacctgcacgtgaaaaacggcgatttcggcgataaaaccggcgtcattctcggccatgagggcatcggcatcgtggaaaaagtcggccctggcgtgacgtcgctgaagccgggcgatcgcgccagcgtggcgtggttctttgaaggttgcggccactgcgaatactgtaacagcggcaacgaaaccctgtgccgctcggtgaaaaatgccggttataccgtcgatggcgggatggccgaagagtgtatcgtcaccgccgattacgcggtcaaagtgccggatggactggattccgccgccgccagcagcatcacctgcgccggcgtcaccacctataaagcggtgaaggtctcacacatcaagcccggccagtggattgccatttatggcctcggcggcctgggtaacctggcgctgcaatatgccaaaaacgtctttaatgccaaagtgatcgccgttgacgtcaacgacgggcagttggagcttgccgcctcgatgggcgccgacctgacggtaaattcccgcaacgaagacgccgccaaaatcattcaggagaaaaccggcggcgcccacgcggccgtggttaccgcggttgctaaagcggcatttaactctgccgtggatgcggttcgcgccggcggccgcgtcgtcgccgttggcctaccgccggaagcgatgagcctcgatattccgcgtctggtgctggacgggattgaagtagtaggttcgctggtaggtacccgtcaggatctgattgaagccttccagtttgccgccgaaggcaaagtggtgccgaaagtcactctgcgcccgctcggcgatatcaacgccatctttaaggagatggaacagggtcaaatccgcggccgtatggttatcgatttccgccgttaa

SEQ ID NO: 87998 - DNA, 1623 bp, Enterobacter aerogenes
atgcaaaatcgctttcgcctgcctacgcttgccgccctttttattgcaggcgcgttttcggtttcggcggcgcaaacgccgatcaaaggcggcaccttaatttatctggaacaacagccgcatactaatctctatccgccggccggcggtttttaccctaacggcgggatcctcaatcagataaccgacaagctaacctggcaaaacccggaaacgctagctatcgagccgtggatcgccgaaagctggagtagcaacgacgagaagaccgaatatacctttaagctgcggcctggcgtcaccttctctgacggtaccccactcgatgccaatgcggtcgcaaagaactttgatacctacggtttgggcaataaagcactgcgtctgccggtttccgaagtgatcaacaattacgatcgtagcgaagtcctcgatccgttgaccgtcaaattctacttcaaaaaaccctcaccgggattcctgcaaggtaccgcgacaattggctccgggctggtttccctcagcaccctggcgcggagctttgaggcgctgggcgatgcccgcaatatcatcggttccggcccctttacggtaaaagatgaaaaacccggacgcgaattaacgctggtggcgcggaaagattatcaatgggggccgaaaaatcttgctcagcaaggcccggcgaacctcgacggcattacctatatcgtaacgccggaagatagcgtacgtattggcgcgctactggcgggacaggccgggtttattcgccaggtgcaggcctatgatgaaaaacaggcaaccgaccagggctttaatatttacgccgcgccgacgcgcggtgttaacgatagcctgagcttccgtccggataatccgctggttgccgacctgcgggtacgccaggcgctactgcatgctaccaacgccaaacaggttgttgagacccttttctcgccaaactatccgcaggcaagttccgttatcgcccgcaccgcggcgggatacgtcgatttaagcgacaaactggccttcgatcagcagaaagccaaacagctgctggatgaggcgggctggaccccgggcgcggatggtatccggcaaaaagcaggacagcggctggcgctcacggtctatgaatccctgccgcagccgcagaacaaagaggtgctacagctggtcgcgcagcagtggcgtcaggttggcgtggccttaagcgtgaaagccggcgacgccggcagccgggtactggataatctcgacccgctgaaaacgccattaaccgtctctgaagtcggccgcgccgacccggatgtggtgaagagtatgttcttccccgccaaccgtgatgccctactgcaacagggcggttcgagcgacaaagttaaaaccttccgtgacgataagctcaacgccctgctaaccgcaatctctgccgaagtggatgcgcaaaagcgtctgcagttaactggcgatgcgcagcgttatctgctggacaacgcctacgtcattcccatctttgaagaaccgcaggtctttgccggcgcgccatgggtaaaaggcgtacgttttgaagccgtgggacgtccgtcgttttacggcgcatggctggataaacactaa

SEQ ID NO: 87999 - DNA, 945 bp, Enterobacter aerogenes
atgagccactatctttggcgacggttggcacaaggcgtgctggtactgtgggcggccttcaccctgaccttttttctgctgcaggtactgcccggcgacgcgattttgattaagtttcagaaccccgatctggggctgagcccgcaacagatcgccgaaatgcgtgtggtctacggtgctgacagcccgctgtggcagcaatatttccacaccttgttagccatgctgcagggggatttcggttattcactgcaggctggactgcctgttagttccctgattgccagcaatttacccgacacgctggcgctggcgttgccggcctttgcgctggcggttctgctggcctttgcgatcgctatcgcttcgcgtctgccggggctacgcggtatcagtaatctgctacagtcgctgccggtgctgtttatttcactgccgaccttttggctcggcatcgccttaatccagatcttttcattccaattgcactgggtcccggttatcaatcccggacctctgcaaggcctggtgctgccggttatcgcggtggcgataccgatttccgcgccgctggcgcaaattctgttacgcaccatggatcacatcgccgcacaacccttcgtcgccgttgctcgcgccaagggtatgagcgaaacacgggtgttatggcggcatgtcaccggcaatgctctgttgccgacattaaacattgccggcctgctgttgggagaactgatcgccggggccttaattaccgaaaccgtttttggccgcagcgggctcggccaacttacgcagcaggcggtgaataatcaggatattgccattcttcaggccgtggtgatgatttcagcgctgggcttcgtcgtcatcaatctgctggtcgatctgctgatgccgatgctcgacccgcgcttaaaacccctgcgcggaggtgcgctatga

SEQ ID NO: 88000 - DNA, 852 bp, Enterobacter aerogenes
atgagtctggtcgattacgcctcggcggtgcgacgccgtccggtcaactggcgccgtttttccttgcagccggggctgtggctggcatggttggtaatgacggttgcggtgctaatggctttcgcgccgcaatggttcaccgagtttaatccactcgacggcatcgctggcgcccaacgtctggcgccgcaggcgggacactggttaggtaccgaccaactcggtcgcgatgtgtggagccgcatcgtctacggcgcaggacattcgctttccgcggccctggccgccgtcgccatgggcctggttttcggcacggcgttgggcaccgttgccggcgcgctgggcgggcgggtcgaagcggtcgtcatgcggattgtcgatattctgctggcgattccttcgctcctgctttcgctaacggtaatcatactgcttggttttggcactctgaacgccgccatggcggtcggcgttgccgcgatcgccagtttcgcccgactgtcgcgcgccgaagtcgtgcgcattcgtcacagcgactatgtcgaagcagcctatggtagcgggggaacctttttggccgtgttctggcggcatattctgcctaacgcgctttcgccggtgctggctttcgccaccctccaattcggccaggctattctcgccctctcaaccctgagttttctcggctacggcactccgccgccggtgccggaatggggattacttatcgccgaggggcgcaactatctttccaccgcctggtggctcaccactttccccgggatcgcggtcattaccgtggtactggcagccaatcgtatcagccaacaactcaatagggagcgccgatga

SEQ ID NO: 88001 - DNA, 1602 bp, Enterobacter aerogenes
atgaacgtgcttagcgtagaaaacctcaccatcagctaccgctctggcgggttgtggcgcgaagtggttcaccgggtcagttttacgattaaacgcggcgagatgctggcgttcgtcggcgaatccggttcgggaaaaaccaccaccgcccaggcgattatcggtctgctggcggataacgcccgcctcgatgccgggacggttcgtctcaacggtgaagagattagccgctggtcaggcaaacggctggataacctgcgcggggccagaatcagcctggtgccgcaggatcccggtaactcgctgaacccggtgcaaaccattggcgcgcaggtcggcgaaatactccgcctgcatcaaaaaagcagtaaaaccgagcgtcgacagcaggttatcgccctgctggaaaaagtcggcttaagccatccggagcagcgtttcgaccagtatccgcaccagctctccggcggtatgaagcagcgggtgctgatcgccattgccatcgccctgaagccggatttgcttattgccgatgagccgaccagcgcgctcgacgtgacggtacaaaaaagaatcctcgatctgctcgatcatttgcgccgtgaatccggcaccgcggtgctatttgtcacccatgacctcgcgctggcggcgcagcgtgccgaccggctggtggtttttcgtcacggtgaaattcaggaacagggcaatacgggtgatgttattcgcaccccgcagcacggctatacccgccaattgctgtgcgatctgcagggacagaacctgcacttaaccaccacgattcgcccgtttgttacgccggcaattcgggttgaaggcgtgagcaaacgctttgcgttagagggcagccatctccaggcgctggataacgtaagctttattttaccgcgtggcagtacccatgcgctggtcggcgaatcgggttcaggaaaaaccaccctcgcccgtatcttgctgggttttgagcaggccgatagcggacaggtgaccatcgacggtattgccagcggacaattgagccgcgaggcccagcgccaactgcggcgcaaaattcagtttgtttatcaaaaccctttcgcctcactcgaccctcgccaaaccctgttcgacattatcgaagagccgctgaagaattttcagcgcctgtccaaagaagctcgccgtcaacgggtagagtccgtcgccgcccgcgtcgcgctggcgccggagctactctaccgaaccgctcgtgagctctccggcggccagcgacagcggatcgctatcgccagggcattgatcctcgaccccacgattctggtgctcgatgaggccacctcagcgctggatgtcacggtgcaggcgcaaattctcgccctgttgctgcaattacagcaacagcttgggttgagctatctgtttatcacccacgatctggcgacagtacgccgcatcgcccatagcgtgacggtgctgcgcgccgggcaagtcatcgaacagggcgaggttaagcagttgttcgccgcgccgcagcacgactatacccgcgagctgctcgccgccattcctcattatcacgcaccgagcacggaggttgcatga

SEQ ID NO: 88002 - DNA, 990 bp, Enterobacter aerogenes
atgacgcctaaacgcctggggttttttacccgcttactcgaccacgccacgccgcaagagcgctatcaactggcgacggagcagatccgccacgcggaacggctgggctttgatagcgcctgggtggcgcaacaccattttcatgaaaatgaaggcggtttaccgtcgccgctggtgtttcttgcctacgcggcggcccatacgcaacggatccgactcggcaccgccatcattacgctgccgatggagaacccgctacgtgtcgcagaagatgcggcagtactggatttactcgcagagggtcgcctggaagtgggttttggttccggcgggacgccaacctcttttctcccctttggcctggcctgcgaacaacgcggcgcggtcttcgccgatcatctgcatttgattgaaagcgcctggcgcggcgatacgttggctcatcctgacaatcacctttatccgcccgcgccgcagctggcaaaacggatttggatcgccaccttttcgattgaaggcgctattcgggccgcgaaatccggccacgggttgatgctatcgcgcacacagccgcgtccgccaggccaaagcgaactgccgctggatgcgattcagaacccgattatcgacgcctacctcgccgcgctaccagccggcgtggcgccgagaattttggcttcccgcaccgcgtttattgccgacagtcaggggtacgcactacaggccgcagtgccgggattaagtaaacaggcggcagcccatcgcgccgccggccatgagattattggtgacaccgtcacggattacgctcgccagttggatgcccacattggcgatgcgccacatgtgcttgcatcgctggctaaagacagcgtgctagcccgcgtaactgacatttcgtttcaggtccattcggtggagccatcacatcaggacacgctgcgttctatcgaactcatcgctaaacacattgccccgcaattcagataa

SEQ ID NO: 88003 - DNA, 1092 bp, Enterobacter aerogenes
atgagcttaagtcaggatattttggctgaactggcggagatcgccgccgattcagcgctgggcaaggcccgcgctttgcgcgaggctgcgacccgccacgcccagggaagttacgaggtgctatttagccaacaggatgaggattttccgctcgaagaacggttcgccgtcgccgcaaaagtggccagacttcatcaggcagacgcactggcggcgcattacgccggtttcggtattgccgacccgacaaccccacggcttgccgctgcgctggggtttgcccgcctgttgaccttcaccccggtggaagcgacgcccgcggcgctgcaaacgctgggcgacgcgggctggagcctgcgcggtattgtgacgctggcgcagcttgttgcgtttgtcagttttcaaagccgattgctgagcggattacgattgttaaatggcaaaccaatttccgcagccgggaccccggtggttgccggctactggcacactcatccccggacggctagcggtaaacctgcgccggtggcgtttactcgtgatgaattacactgggaaccgtggattgccaataagcctctcgctgaatttaacgccgccgagcaggcgctgctggcgcagttcggccacagtgattccccctactttcgcttactggcgcgcaatcagccggtgcttgaacagcgcacgctgaccgataaagggattttctatacgccgggcggcctgccgcgcgccgagcgtgaactggcggccacggtggcgagtaaaatcaacggctgcatctactgcgcgtcggtacacgcacgcaaggcggcgcagttgtccaaagatgagcgagcggtggagaccctgctggcggtaacgcctggggagaatctcagcgatggtcaagggccgcgctggcaggcggagattgacgccgccgccgcgctttccgtcaccccgcccgcgataaccccagcgcatctcagcgcgctggagcagcagggtctggatatcgtcgaacagctggacctactgcaatcgacggcattcttcgcctgggctaaccgcctgatgctaacccttggcgaaccgtggcgggattaa

SEQ ID NO: 88004 - DNA, 1182 bp, Enterobacter aerogenes
atgaagaaaacgattttttccttagcgctggggacctttggcctcggaatggcggagttcggcatcatgggggtattgccggaaatcgcccatgatgttggcattaccatccccgcggccggcaacatgatctcgtggtacgcctttggcgtggtgtttggcgcgcctgtcatggcgttgttttccagccgtttttcgctgaaatcagtgatgctgtttctggtggcgctgtgtgtggcaggcaacgcgttgtttaccttctcctcaagttatcccatgctggcgctcgggcgctttatttccggttttcctcacggcgcttattttggcgtcggagcgattatcttgtcgaaaatcgcctcgccgggcagggttaccgcggcggtcgccgggatgatagcgggtatgacggtggcaaacctgcttggcgtaccggcgggcacctggcttggccatcagttcaactggcgttataccttcacggccatcgcgctatttgatgtgctggtgcttttggcgatactgcgctgggtgccaacgctgtatgacaaatcaaccacccggctcagtgaacaattccatttccttaaatccccggcgccatggtttattttcgccgccacgatgttcggcaatgccggcgtttttgcctggtttagctatatcaagcccttcatgataaatgtctccggctttagcgagtcggcgatgatgttcattatgatgctggtgggattggggatggttttaggtaatctctttagcggcaggatctctgggcgttacagtccgctgcgtattgcggcgatgaccaacggcgtcattgttgcggtgttactgctcatctttgcctttggcatacagccgctggcttcgctgacgctggcgtttatctgctgcgccgggcttttcgcgctcgccgcgccgctgcaaatattactgttacaaaatgccagaggtggcgaaatgctcggggcggcgggcgggcagatagcgtttaacctcggcagcgcgattggcgcctactgcggcgggatgatgattacctttggcgcgggttggcgttcggtcgcgctgccggcggcagcgctgtcgttcctggcgatgagctcgttgctgctgtatgcgcgataccagcggcgggtaacgcgtcatcgcgttacccaggccgagcaggcctga

SEQ ID NO: 88005 - DNA, 717 bp, Enterobacter aerogenes
atgagccaaccgttgctggaatttcgcgaggtgaacgtctattacgggcaaatccaggcgctgaagtcggtatcgctaatggtcaatgaaggcgaaacggtggcgttaatcggcgctaacggcgccggaaaatccacgctgctgatgtcgattttcggccagccgcggattaccgatggcagtattatctatcgcggacatgatatcagccgccagtcgacgcactatatcgccaccaacggtattgctcaggcgccggaaggacggcgtatttttgccgatatgacggtggaagaaaacctgctgatgggcactattcccataggtaatcgttatcagaatgaagataaggcgcggatgtatcagctgtttccacggctggaagagcgtcgcgcgcagcgggcgatgacgctctccggcggcgagcagcaaatgctggtaatcgcccgcgcgctgatgagccggccaaagctattgctattagacgaaccgagcctgggtctggcgccgctggtggtgaagcagatcttcagcgttttgcgcgagttgaccgaccagggcatgacgctgctgctggtggagcaaaatgcgcaccacgcgctgaaactggctaaccgcgcgtatgtgctggtcaacggcgaaatacgtctgagcggtagcggcgcagagttgctggataacccggaagtcagaaatgcttatctggggatgggttaa

SEQ ID NO: 88006 - DNA, 873 bp, Enterobacter aerogenes
atgagcgatgcaatattgcaggtcgagcatctgatgatgcattttggcgggattaaagcgctgaatgatgtcaaccttgaggttgaacgcggatcgattaccgccctgattggcccgaacggcgcggggaagaccacggtgttcaattgcctgaccgggttttaccgcgccagcggcggcgccattcggcttaatgcccggcaacgaatgaccgatgtgattcaggttctcgggcagaaactgcatgccgatgattttttccatcccgcgcgcctgggacggcggatgtactacaaaatgttcggcggcgcgcatctggtcaaccgcgccgggctggcgcgtaccttccagaatatccgcctgtttcgagaaatgacggtgattgaaaatctgatggtggcccagcatatgcaggttaaccgccatctgatcgccgggatcctgaatacccgcggctatcgccaggcggagaaccgcgcagtagagcgggccttttactggctggaagtggtggagatggttgactgcgccaatcgactggcgggaacgctctcttatggccagcagcggcggctggagatcgcccgcgcgatgtgtaccgggccggaaatattgtgtcttgacgaacccgcggccgggctcaacccggcggaaacgcgtgccctgagccggattattcgttttctgcgtgaacatcatggcgtcagcgtactgttgatagaacacgatatgagcatggtgatggaaatctccgatcgcgtgatcgtgctcgaccacggcgatgttattgctcatggcaccccggccgagatccaggccaacctgagcgtgatcgccgcatacctgggtaccgatgaacaggagatcgcctga

SEQ ID NO: 88007 - DNA, 1287 bp, Enterobacter aerogenes
atgaccgatatttcccgtttagacggcatcgacgtcaaacgcagcgttatcgatagcgtattggccggtttatgcgcgctgatagtctttggcccgatcgtgggcatcgtgctgaaggggtacagttttacgctttccccacagcgcgtcatcgtgctggtggcggtggtgatggcggggaggctgttgctcagcctgcttttgcaaacccgcggggggaagcggtttatcggacgttttgaaggcaacgaccagggggtatttgtccgtccccccggctatcgtagtcggctgcgttttgtcctgccgctgctggcgatcgtggctatcgttttcccgttaatggccagcaagtatctgctcaccgtggcgatcctcgggcttatctacgtcctgctggggctgggattaaacatcgtggtgggtctcgcggggttacttgatttggggtacgtcgctttctacgccattggcgcctatggcctggcgctcggctatcaatatcttggcctggggttttgggcgatgctgccgctgggggcggtgatggcggcgctggcaggggcattattgggttttccggtattacgaatgcatggcgactacctggctattgtgaccctcggattcggcgagatcattcgtctggtgctcaacaattgggtaagtttcaccggcggccccaacggcgtttcggtgccgtcgccaacgctcttcggcctcgagtttgcccggcgagccaaagagggcggcaccccgattcatgaatttctgcatatcgcctacaaccccaaccttaaatttatttttatctatgccgtgttatttatcgtggtactgatggtgctgctgataaaacaccgcctgacccgaatgccgattggccgtgcctgggaggcgctgcgggaagatgaaatcgcctgccgggcgatggggctgaatcacgtgctagttaagctgtccgcgtttatgcttggcgcgtcgacagccggcatcgccggggtctttttcgcgacttatcaggggttcgtcaacccgacgtcgttcacttttttcgaatcggcgctgattctcgctatcgtggtattaggcggcatgggctcgacattaggtgttgtgctggcggctttcgtgctgacggtcacgccggagttactgcgcggctttgacgaataccgggttttgctctttggcgtgctgatggtcctgatgatgatctggcgaccgcgcgggctggtgcgcaccgggcgtaccggggtggaaatccgcaaaggagtcgcgccatga

SEQ ID NO: 88008 - DNA, 915 bp, Enterobacter aerogenes
atggcggcattctttctgcaacaactgatcaatggcttaacgcttggcgcggtatatgggcttatcgccattggctacaccatggtttatggcatcatcggtatgattaacttcgcccacggcgaggtatatatggtctcagcctacctgtgcgctatcgggctggcgctgctggcctacttcggtattcactctttcccgctgcttattttcggcacgctggtgtttacgattatcgtcaccggggtgtacggctgggccatcgaacgcattgcttatcggccgctacgtaactcaacgcgtctggcgccgctgatttcggctattggcatgtcgctgattttacaaaactacgtccaactgagtcagggcccaaatcaacaggggatcccgacgttgatgcacggcgtactgcggcttacggtaggagatggcgtggtgcaaatcacctggaccaaaatcttcatcctgctcgccgcctttatcggcatggtggtactgagctggataatcaaccacacgcagttaggtcgggtttgccgcgcgacccagcaggatcggcggatggcggccattctcggcattaacaccgatcgggtgatttcgctggtatttatgattggtgccgccatggcgggcctcgccggggtgctggtgaccatgaattacggcacgtttgatttttatatcggcttcattatcggcattaaggccttcaccgcggcggtactgggcgggataggttcgctgccgggggcgatgcttggcggcctgctgttgggcgtcgccgaggcgcagttcgccgggttagtgaactcggattataaggatgtcttctcgttcgcattgctggtggcgattctgattttccgtccgcaggggcttctgggccgtcctgtggtggccaaggtctaa

SEQ ID NO: 88009 - DNA, 1116 bp, Enterobacter aerogenes
atgtctttaaaacttaaaaagttgactctgcattttgcaatagcaggttgtttgagcgcggcattttatgcacaggcggatgtgaagattggcgtggccggcccatttaccgggccgaatgcgacctatggcgcccaatactggaaaggggcatcgcaggcggcggcggatattaatgccgccgggggaattaaaggcgaaaaaattgtgctggtgcagggcgatgatgcctgtgaacccaagcaggcagtggcggtggctaaccgcctggttgatgattccggcgtctcggcggtggtgggccatttctgctcttcctcgacgatgcccgcttccgaggtctatgacgaagccgggatcctgaccatcacgccgggctccaccaatccgcagatcaccgaacgcggaatgaaagatatgttccgcatgtgcgggcgcgatgaccagcaaggggtgattgctgccaactacatgctggatgtgctgaaggcgaagaagatcgccgtcattcacgataaagatacctacggtcagggcttagccgatgcgacgcgcgcggcgctcgcgaaacgcgggacgaaagaggtgttgtatgaaggcttatcccgcggggaaaaagattttaatgccctggtaaccaaaatcggcgccctgaaaccggatgtggtttattttggcggctgccatccggaagccggcccgctggtgcgccagatgcgcgagcagggcgtccaggctaagttcttctccggcgactgcgtggtgaccgaagagttggttaccgccgcgggcgggccgcagtttactaatggtgtgttaatgaccttcggtaaggatccgcgcaccattcctgaaggtaaagcggtgatcgacaaattccgcgccagcggttttgaaccggagggctataccctttacgcctatgcttccattcaggctatcgccgccgcctataacgccgccggtaccgataatgccaaagccagcgaatggctgaaaaaccacagcgtcgataccgtgatggggaaaaaggactgggatggcaaaggcgacctgaaagtatcggattacgtggtttatcaatgggatgataaaggcaaatatcatcagctgtaa

SEQ ID NO: 88010 - DNA, 279 bp, Enterobacter aerogenes
atgactttaaaaaaattaattattattgccttcagcgcgctttctattaacgcctgcgccttcgcggcggggagtctcgccgaccagttacactatacgccgccggaaccggcagaccttgccgctaatccacctacagaatcgcctgaatcgaaaacggaacaaccaaaattaacgatgacccccgacgttaacgcctacacctattacaacgaaaaggtgaaccccgttaccaatgatattgaccgtattgaacaaggcggcgtcgtcgaattctga

SEQ ID NO: 88011 - DNA, 186 bp, Enterobacter aerogenes
atgatgaaggattatctgatcatcgcctggattactattgtcgcctgctggcccattacgttaccggtgttagccgtggtcgcgggaatacttttctattcccgccatcgcgtggcgggtgttgtggtatccgggctgtttatcctcgaagccgtggcggcatggcagtttgagcgctatatgtaa

SEQ ID NO: 88012 - DNA, 309 bp, Enterobacter aerogenes
atgtcgaataaacttctgcaagtgcactttgcttttagcggaccgtttggcgatgaaatgtcgacgcaattagccgaactcgcgcaatctattaacctggagcccggttttatctggaagatctggacggagaatcgcgccacgcaggaagccggcggcatatatctgttcgaagatgaacagagcgcgcaggcttatgcgaaaaaacacgccgcacgcctgcggcaatttggcgtgcaggagatgttctacaagattttcgacgtcaatttaccactcagccagattaaccacgggccgctcaattaa

SEQ ID NO: 88013 - DNA, 819 bp, Enterobacter aerogenes
atgggaaacaagaagaaagccgttgcgcccatcatacccgccaaaacggagccgttaagcgagaaagaatatcagcaggcattgcgtaaactgcacgtcgagttggtcaagctacagcggtgggtcgtgcataaagggcttaagatatgcatcgtcttcgagggtcgcgatggcgccggcaaaggcggcaccatcaaagcgataaccgaacgcgtcagcccgcgggttttccgcgtcgtcgccctgcccgcgccaaccgagcgcgaacgcagccagctctattttcagcgctatatcaagcatcttcccgccgccggcgaaatagtgattttcgatcgcagctggtacaaccgggccggcgttgagcgggtgatgggattttgtaccgaggaggaggtgcaaaaattcctcgacggcgcgccaatggtggagagagggatggttgattccggcattattttactgaaatactggctggaggtgacgccgcaggagcaagaacggcgcctgcgcgaccgtatcgatgatgggcgcaaaatctggaagctatcgccgatggatataaaatccttcaaccgctgggatgactacaccacagcgcgcgatgcgatgtttgccgccaccgataccgcctgggcaccgtggtttgtcgcccgttcggaagataaaaaacgcgtacgtctgaatattattacccatttgctttcgcagatcccctacgagtctctgccaacggaacacattaccttaccgaaacgtaaaattggcaaagtgaaaccgacccattttcctttccggtttattcctgagagattttga

SEQ ID NO: 88014 - DNA, 186 bp, Enterobacter aerogenes
atgaaaagtaatacgctacgtaaaagatgtactgacgtgccaacccggaaggagtcagcgcaggcaggaaaggatttacgagaagccgataagcagcgacagcataaggaattcattgccgcaatgaatgaatttattgcaaaaaaaggtactctcacagatgatgaatttttcagggtactatga

SEQ ID NO: 88015 - DNA, 657 bp, Enterobacter aerogenes
atgaataaatcgaaaatgatagtgcgcaccaaatttatcgaccgcgcctgtcactggacggtggttatctgtttcttcctggtggcgctgtcggggatttcgtttttcttcccgacgctacaatggttgacggaaaccttcggcacaccgcagatggggcgtatcctgcacccgtttttcggggtgctgatttttgtcgcgctgatgtttatgtttgtgcgttttgtccaccacaatatccctgataaacaggatatcccctggctgaaaggcatcgtggaggttctgaaaggcaatgaacataaggtcgcgcgcgtcggtaaatataacgccgggcagaagatgatgttctggaccattatgagcatgatttttgtgctgctggtgaccggggtgattatctggcgcccatattttgcggaatatttcccgataccggttattcgttacagcctgctgatacacgccacttcggcgattatcctgatccacgcgatcctcatccatatgtatatggcattctgggtcaaagggtcgattaaaggcatgatcgaaggcaaggtgagccgccgttgggcgaagaaacatcacccgcgctggtatcgcgatgtcgaacgcctggaagcgcaaaaagagagccgtgagggaatgaagtaa

SEQ ID NO: 88016 - DNA, 885 bp, Enterobacter aerogenes
atggcgatggaaacacaagacattattaaacgctccgcgaccaacccgataactcccgcgccacgcgcgcgggactataaggcggaagtcgccaagcttatcgatgtctcctcctgcgtgggttgtaaagcctgccaggtggcctgttccgagtggaatgacattcgcgatgaagtggggcactgcgtcggcgtgtacgacaacccggcggatctcagcgctaaatcctggacggtaatgcgctttagcgagaccgaacagaacggcaagctggaatggcttatccgcaaagatggctgtatgcactgcgaagagccaggctgcctgaaagcctgcccgtccgctggggcgattattcagtatgccaacggcatcgtcgatttccagcaggaaaactgcattggttgcggctactgcattgccgggtgtccgtttaatattccgcgcctcaataaagaggataaccgggtctataaatgcacgctgtgtgtggatagggtcagcgtcggtcaggaaccggcctgcgtgaaaacctgtcctaccggcgcaatccacttcggcacgaaaaaagagatgctggaagtggcgcaggagcgggtggataagcttaaaaagcgcggttatgccaacgccgggatctacaacccgcagggcgtaggcggcacccacgtgatgtacgtactgcatcatgccgaccagccggagctgtatcacaagctgccgaaagcgccgcagatcgataccagtatcaatctgtggaagggggcgctgaaaccgctgtcggcggcgggctttattgccacctttgccgggctgatttaccactacatcggtattgggccgaacaaggaagttgatgacgatgaggaggagcatgatgaataa

SEQ ID NO: 88017 - DNA, 2412 bp, Enterobacter aerogenes
atgaccaaccactgggttgatatcaaaaacgctaacgtcgtgatggtgatgggcggcaacgccgcggaagcgcatccggtgggattccgctgggcgatggaagcgaaaaacaataacgataccacgcttatcgtcgtcgacccacgctttacgcgtaccgcgtcggtggccgatatctatgcgccgattcgttccggtaccgacattacgttcctgtcgggcgtgctgctgtacctgatcgaaaataataagatcaatgccgagtacgttaagcattacaccaacgccagcctgctggtgcgggatgattttaccttcgaagatggcctgttcagcggctacgatgcggaaaagcgccagtatgataaatcgtcctggaactaccagttcgatgaaaatggctacgcgaaacgcgatgaaacgctcagccatccgcgctgcgtgtggaatctgctcaagcagcacgtttcccgctacacgccggaagtggtcgagaatatctgcggtacgccgaaagatgacttcctcagagtgtgcgaagtgctggcttcaaccagcgtcgcggatcgcaccaccaccttcctgtatgcgctgggctggacgcagcacaccgtcggcgcgcagaacatccgcaccatggcgatgatccagctgctgctcggcaacatgggcatggcaggggggggcgtcaacgctctgcgcggacactccaatattcagggtctgacagatttgggcctgttgtcgaccagtctgccgggttatttgacgctgccgtccgataaacagagcgatctgcaaagttatcttagcgccaacacgccaaaagcgacgctggccgaccaggtgaactactggagcaactacccgaaattcttcgtcagcctgatgaaatcgttctacggcgatgcggcgcagaaagagaatgactggggcttcaactggttgccgaaatgggatcaggcctacgacgttatcaagtacttcaatatgatggataacggcaaagttaccggctatatctgccagggcttcaatccggtagcgtccttcccggacaaaaacaaagtggtgcgtagcctcagtaagctgaaatatatggtggttatcgacccgctggtgaccgaaacctcgaccttctggcagaaccacggcgagtctaatgatgtcgacccgtcggctattcagaccgaagtcttccgtctgccgtcgacctgctttgccgaagaggatggctcgatcgccaactccgggcgctggctgcagtggcactggaaaggccaggacgcgccgggcgaagcgcgcaacgatggcgaaattcttgccgggatctatcaccgtctacgtgagctgtaccgtcgcgaaggcggtaagggcgcggaaccgctgctgaacatgagctggagctataagcagccagatcatccggaatcggaagaagtagcaaaagagaacaacggctatgcgctggcggatctctacgatggtaatggggtgctgctggcgaaaaaaggagagttgctgaatagcttcgcgctgctgcgcgatgacggcagcaccgcgtcgtcctgctggatatacaccggctgctggaccgagcagggtaaccagatggcgaatcgcgataacgccgatccttcggggcttggtaatacactgggatgggcctgggcctggccgctcaatcgccgcgtgctgtataaccgcgcttcagccgacattaatggcaagccgtgggatgcgaagcggatgctgatccagtggaacggcagtaagtgggtcggtaatgatattccggacttcaataccgcgccgccggggagcagcaccgggccgtttatcatgcagcaagaggggcttgggcgcctgtttgcgctcgataaactggcggaagggccgttcccggaacactacgagccgatggaaacgccgcttggcaccaacccgctgcaccccaatgtggtctccagcccggtggtgcgtttatacgaaggtgacgccattcgcttaggtaagaaggataagttcccgtatgtcggtactacctatcgtctgaccgaacacttccatacctggaccaagcacgcgctgctcaatgcgattgcgcagccggaacagtttgtcgaaatcagcgaagggctggcgaaaagcaaaggtatcgctaatggtgactgggtgaaagtcagcagcaagcgtggctttattcgcgcggttgccgtagtgacccgtcgactgcgcacgctgaacgtcaacggccagcaggtagaaaccgtcggtatcccgctgcactggggctttgaaggtgtggcccgtaaaggctacatcgccaacaccctgacgcctaacgtcggcgattccaactcgcaaacgccggagtataaggcgtttttggtcaacatcgagaaagcgtaa

SEQ ID NO: 88018 - DNA, 588 bp, Enterobacter aerogenes
atggacgtcagccgcagaaagttttttaaaatctgcgcaggcggtatggccggaacaacagctgctgcactgggctttgccccgaaaatggcgctggctcaggcacgcaatttcaaattgctgcgcgcaaaagagatccgcaacacctgcacttactgctccgtgggctgcgggctattaatgtatagcctgggcgacggcgcgaaaaacgccaaagaagcgatttatcatatcgaaggggatccggatcatccggtaagtcgcggcgccctgtgcccgaaaggcgccggtctgctggactacgtccacagcgaaaaccgcctgcggtatccgcaataccgtgctccgggctcggataaatggcagcgcatctcctgggatgaagcttttaaccgcatcgccaaattgatgaaggccgaccgcgacgccaactttattgaaaagaacgagcagggcgtgacggttaaccgctggctttccaccgggatgctgtgcgcctcggcggcgagtaatgagaccggcatgctgacgcaaaaatttgtgcgctcacttggcatgctggcggtagacaaccaggcgcgcgtctga

SEQ ID NO: 88019 - DNA, 822 bp, Enterobacter aerogenes
atggtcggtttgatccgcggcgtcagcgaagggcttggccctgtcggcggcgcggcgatgatttatagcctcagcggcctgctgctcattttcaccgtcggctttcccaacctgcgccaaatcccgcgtcgctatctgttggccggcagcgtgctgtttgtcagctacgagatctgcctcgccctgtcgctgggtttcgccgccacccgccagcaggctatcgaagtggggatggtcaattacctctggcccagcctgaccattttgttcgccattctttttaacggtcagaaaagtagctggctggtgatccccggcttattgctggcgctgttcggcgtgagctgggtgctcggcggcgaacacgggctcaacctcgatgaaattatcaataacgtcatctccagtccgctgagctactttctggcatttatcggcgcgtttatctgggcggcctactgcacggtgaccgcgaaatatgccaaaggcaaaaatgggattacgctcttcgtcttattaacggcactgaccctgtggctgaaatttttcgccagcgctcagccgccgatgctgttcagttggccggtggtcattaagctgataacggtctccgtggcgctggggctggcgtacgcggcgtggaacgttggcatcctgcacggcaacgtcagcctgctggcggcggcgtcgtacttcacaccggtgctctcttccgcgctggcggcggtgctgctcagcgccgccttatcgtggtccttctggcagggggccgggatggtgtgtctcggctccctgctctgctggtatgccacccgccgttag

SEQ ID NO: 88020 - DNA, 774 bp, Enterobacter aerogenes
atgcgttttaccgataaagtcgtcgctattaccggcgcggcgcaggggattggcaggcagaccgcggagcaggcggcaactgaaggcggcgccctgttgctgattgaccgctcgccttacgtacacgaactggctgccgttttagcccaggccggaagtcaggtactggcgctggaggctgaccttgagcagtggcagagtactgaacaggcgtttgccgccggggtcgcgcatttcggccgcctcgacgtgctcatcaacaacgtcggcggcaccatctgggcgcgacctttcgccgagtatcagccagaacaaattgagaaagagatccgccgctcgctgttccctaccttgtggggctgccgcgcggcgctcccctggatgctgaaacaggggaaaggcagcatcgtcaatatctcgtcggtggcgacggcaggggtgaaccgggtgccttattcggcggcgaagggaggcgtgaatgcgctgactcgctcgattgccatggagtacagcggcagcggtattcggattaacgccgtcgcgccgggcggtacggaggcgccgccgcgtctgacgccgcgcaacgatgagctgccgagcgaacaggaaaaggcgtggtatcagcaggttgtcgatcagacggtggcgagcagcctgatgcatcgttacggcacgctggcggaacaggcgaatgcgatcctgtttctcgccagcgatgaggccagctatatcaccggcgtaacgataccggtggcgggcggcgatctcggctaa

SEQ ID NO: 88021 - DNA, 1017 bp, Enterobacter aerogenes
atgacttttaatattgctcttaatttcgaggacggcattacccgctttattcaatgccatgccggggagaaggtgctggatgcggcctatcgccagaaggtaaacctgccgatggactgttcggacggcgtttgcggcacctgcaaatgccattgcgccagcggtgaatacgatctgggtgaagattatctcgacgaggcgttaagcgacgacgaggcgcaggctcgccaggtgctgacctgccagatggtcccgaccagcgattgtgtgatcgatgtgccggtggccgccgcgcagtgtaaaaccgcgctgaccaacaccggggcgcaggtgcggcaggtgaatttactgtccgataccgccatcgaactggtggtcgcgctggatgagccgctggcttttctgccggggcaatatatcaatattcaggtgccgggcacgactcatgtgcgcgcctactcattcagctcgctgccgggttctctcgaagggcgttttctgattcgtaacgtgcctggcggcatgatgagccagtggttaacccagcaggcgcggcccggcgatcgcctgaccctcagcggccccatgggcagcttctatttgcgcagcggcgaacgcccgctgctcatgctggcgggcggtaccgggctggcgccgctgctgtctatgttacacaccctgcagacacagggtagtcagcgtccggtaacgctactgtacggggtgacccgtgacggtgatctggtgaaaaccgacgcgctggacacctttgctcaacagcttacggggtatcgctggctgccggtggtggcggatgaaagcagttcctgcccacagcgcggctttgtcaccgaacatctggatgacgcgatgctgaataacggcgacgttgacatctatctttgcggaccgccgccgatggtaaatgcggtcgccacggcgctgcgcgaaaggggaatttccccggcagggttctggtatgagaaatttatcgccagccagagcgcggcggcataa

SEQ ID NO: 88022 - DNA, 486 bp, Enterobacter aerogenes
atgttgaatctcgaacaagttcgccagtttctctattacgaagcccgtctgttagatgaccgtcagtgggatgagtggctgagctgttacagcccgcaggtggtctactggatgccggcatggggcgacgatgaccaactgacgcgcgacccgcaaaaagagatttcccttatctactaccccaaccgggaaggactggaagatcgcgtctatcgcattaaaaccgagcgttccggcgccagtacgccggagccgcgcaccacgcacattatcagcaatgtcgagctgatgggcgaaagggatgaggggcttgcggtgcgctacaactgggttacgtggagccatcgctatcaacacacggatgcctattttggctctacctgctgcacgctaattgagcaggacggcaggccgcagatcgttcgtaaaacggtacgcctgaataacgactatatccgtcaggttatcgacgtttaccacatttaa

SEQ ID NO: 88023 - DNA, 1383 bp, Enterobacter aerogenes
atgcaaaaaacgctatcagcgcttaaagacaaaattaacaacgcgttaattgtcgaccgtgaaaatcatatttaccgttgccaccgctctatatttaccgaccagcagttgtttgattttgaaatgaaacatatcttcgaaggaaattgggtttttcttgcccatgaaagccagattgccgagccgggagattattataccctgacgctgggacggcagccggttattattacccgtgataaaaagaatgaattgcatgcattaattaatagctgcgcccaccgcggcgccatgttatgccgacgcaaaaccgggaataaaaattcgtttacctgtccgttccacggctggaccttcagcaataacggcaaattattaaaagccaaagatgagagcaccggcgcctatcctgacaccttcaaacatgaagggtctcacgatctgcaaaaactgccgcgttttcagtcttaccgcggtttcttattcggtagcctcaatgccgacgtgcagccgctggaggcgtatctcggcgaaaccagcaaaatcatcgatctgatcgtcgatcaggcgccggaagggctggaagtgctgaagggctcgtcgagctacgtttacgaaggcaactggaagctgggcgcagagaacggcgccgatggttatcacgtcagcgtggtgcactggaactatgcctcaaccatgtcacgccgcaactatgaagcggaagggacgcatgcggttgacgccaacggttggtcaaagagcgtcggcggcggctacggttttgacaatggccacatgttgctgtggacccgggcgctgaacccggaagtgcgcccggtctatgcccaccgcgagcgtctgcaggcggaattcggcgaactacgcgccgaccagatggtcaatgaaacccgcaacctgtgcctgtaccccaacgtctatctgatggatcagttttctacccagatccgcgtgatccgcccgattgcggtcgataaaaccgaagtcaccatttggtgctttgcgcctaaaggcgaagccgaccaggcgcgggcgctacgcatccgccagtacgaagatttctttaacgtcagcgggatggggacgccggacgatctggaagagttcagcgcctgtcagcgcggctatcttggcgaaaatctggcatggagcgacctcagccgcggcgcgctacgttgggtcgacggcccggatgaacacgccaggcatgcgggctttacgccgcggctaagcggggtgaaatcggaagatgaagcgctgtatatcgcccatcatcaccattggcaaacggtcatgctggcggcgctggaacaggaacaacagcgttacgaccagtctattacccagcgcgtggaggtggcctga

SEQ ID NO: 88024 - DNA, 927 bp, Enterobacter aerogenes
atgagtaatgctttcgtacaacaagaagccgtgcagaaattattacgtgaaggcgcgggtttaaatgtccctggcggtaatgaacgctttaaagccattgtccaccgtttactggaaaatatctgcacgctgatcgatgactataacgtcacagaagaagagttctggcatgcggtaaactatttgcatgagttgggtgggcgccaggaagcggcgctgctggcggcgggtcttggtcttgagcacttcctcgacctgcgtcaggacgctatcgacgcggcggcgcatcgcgaaaccggtaccccgcgcaccatcgaagggccgctgtatgtagccaatgccccgctggccgacagccatgcccgcatggatgatggcaccgatgccggcgaagtgatgtggctgcacggtcaggttaaagataatcagggccagccgattgctaacgccatcgttgatatctggcacgccaataccctgggtaattactcgttcttcgatcagagccagagcgactacaacctgcgtcgtcgtattcgcaccggcgccgatggccgctatagcgtgcgcagcatcatgccatccggctacggctgcccgccggatggtccaacccagaagttgctggatcaactaggccgccacggcaaccgtccggcgcacattcacttcttcgtctccgcgccgggccataaacatctgaccagccagatcaacctcagcggcgacaaatacctgtgggatgattttgcctttgccacccgcgatggtctgattgccgacccggtgaaagtgagcgaccgcgagacgattgcacagcgtgaactggacggcgagcacaccgaagtgcgctttgatttcaccctctgtaaagcgctgagccccgacgaagagcatcgcggcgcccgtctgcgcgccaaagaataa

SEQ ID NO: 88025 - DNA, 291 bp, Enterobacter aerogenes
atgctatttaaagttgatatgaccgttaatattccgatcggttttcctgccgccgaagcggatgaaattaaacaacgcgaaaaagcctattcgcaacaattacaacgtgaaggcaagtggcgacatatctggcgtgtcgccggtctttacgccaatgtcagcatttttgatgtaaaagatgccgaagagctgcatcaaattttaatgggattgccgctgtatccatttatggatattcgcgtagaagcgctgtgccgtcatccctcgtcgattcgtgaagacgatagctaa

SEQ ID NO: 88026 - DNA, 1119 bp, Enterobacter aerogenes
atgactgcgaccgtagaacgcattgagagctggttagtggatgtaccgactatccggccacataaattatcgatgaccaccatgggctgccagacactggtcatcgtgcgcattacccgttccgatggcgtatgcggtatcggtgaagcgacgactatcggcggactgagctacggcgtcgagagtccggaggccatcgcatcggccttgacccactatttgacgccgctgctgaaagggcagccggcggataatctgaatgcgctgacggcgcgtatgaacagcgccattaaaggcaatactttcgcaaagtctgccattgaaaccgcgctgctggacgcccaggggaaagccttaggcttaccggtatcggcgctactcggcggcgcgctgcaaacgtcgttgccggtgctgtggacgttagccagcggcgacaccgcaaaagatattgccgaaggggaaaagctgttagccgagcgccgccatcaggcattcaagttgaaaattggcgcgcgggaattagccaccgatctccgccatactcgcgccattgtcgaagctttaggcgatcgcgccagcattcgcgttgacgttaaccaggcctgggatgcagccaccggcgcgaaaggctgccgagagctagcggcgatgggtgtcgatctcatcgaacagccggtgagcgcgcaggacaatgcagcgctggtgcgcctgagccagcaaatcgagaccgcgattctggcggatgaagcggttgcgaccgcatacgatggttatcaactggcgcagcagggctttaccggcgcttacgcgctgaagatcgccaaagcgggcgggccgaatagcgtgctggcgctggcccgcgtcgcgcaggcggcgggggttggcctgtatggcggcacgatgctggaaggaaccgtgggtaccgttgcttctctgcatgcctggtcgacattgccgctgcagtggggaaccgagatgttcggcccgctgctactcaaagacgatattgtcagcgttccgctgacctttgccgacggtcaggtggtgttgccgcaaacgccagggctcggggtggagctggatgaagacaagctgcgcttctattcccgtaaagcataa

SEQ ID NO: 88027 - DNA, 798 bp, Enterobacter aerogenes
atgagcgacaatacccacactacgctgagcgccaggcaggccgagcacgaccccaattttatgctgtctctcgcccgcgggctggaagtgctcaatgcttttactccgcagcgccagcggctgaccatttcgcagttaagtcaaaaaacgcaaatttcccgcgcggcggtgcgccgctgcctgtataccctggcggcgctggggatggtgcacagcccggacggccgcagctatgaactactaccgcgcgtactagccgtgggccacgcctatctggcgggaaccccgctggcgaaagtggcgcaaacggcgctggataatcttggtaagacgttaggagaaagctgctccgccgccacgcttgatggcgacaacgtgctgtacattgcccgcgcggcggtcaataacttactgagcgtcgatctgggacgcggcagtcgcctcccggcatggacgacttcaatgggacgggtattgctgagcgcgttgccagaagaacaacttgaagtgacactgtcacgcgcacatcttatgcgctacaccccgcataccctgtgcgaccccacagcactgcgcgcggaaatagctaaagttcgcatgcagggctatgcgctggcggacaggcaaattgaagttggattatgctcgcttgcggtaccgctgttgtcgcgcagcggccaggtggtggcagcgctcaacgttggcgtccccgcctcttcgatgagcgccgcggcgctgaaggagaaagccctggcgccgctgcgtcgcgcggcgatggagctttctcttcagctatga

SEQ ID NO: 88028 - DNA, 1491 bp, Enterobacter aerogenes
atgtctcggcaatggttaacgctgatggcgattttgctggtttatatcccggtggcgattgacgcaacggtgctgcatgtggccgccccgacgctcagcgtcgcgcttggcaccagcggcaatgagctactgtggatcattgatatctattcgttggtgatggccggtatggtgctgccgatgggcgcattaggcgataaaatcggctttaagcgcctgttgctgctcggtagcgctatttttggcatcgcttcgctgtgcgccgcgctgtcgccgtcggcgataacgctgattatttcccgcgcgctgctggcggttggtgcggcgatgattgtgccggcgacgcttgccgggatccgcggcactttcgccgaagccagccagcgtaacatggcgctgggattatgggccgcggtgggctccggcggcgcggcatttggcccgctggtgggcggcatgctgctggaacatttctactggggatcggtgttcctgatcaacgtgccaatcgtgctactggtcatcgccatcaacgctaaggttgtgcctcgtcagcccgcccgccgcgagcagccgctgaatctgccgcaggcgctgatcctgattgcggccattctgatgctggtatttagcgctaagtcagcgttaaaggggcagctggcgctgtggctgattgtgctggtggctatcggcggcgcggccatgttgacttggtttgtccgcaagcagctgtcgatgccgacgccgatggtggatatgcgtctcttcacccaccacattattttgagcggggtgatgatggcgatgaccgcgctcattacgctggtcggttttgaattgctgatggcgcaggagctgcagtttgtgcatcagaaaacaccgttcgaggccgggctgtttatgctaccggtgatggtcgccagcggctttagcgggccgattgccggaatgctggtatctaaactggggctgcggcaggtggcgaccggcggtatgttgctgagcgcgttgagtttcctggggctgtcgatgaccgacttcagcacccaacagtggcaggcgtgggggttaatgacgctgctgggctttagcgccgccagcgcgctgctggcgtcaacgtcggcgatcatggcggcggcaccgaaagagaaggcgtcggcggcaggcgccattgaaaccatggcctatgaattgggcgcggggcttggtattgcgctgttcggcctgatccttacccgtagctacagttcggcgattgagctgcctgccgggattggcggtgaagcagcggtacaggcctcatcgtccatcggcgaggcgatgaaggtggcgcaatcgctccccgcgataccggcagattcactgattgcggcggcgaaaaccgcattcatcagcgctcacagcatttcgctggcgacggctggcgttctgctgttgttgctggcgctggggatctggcgcgggctggccaatacgccggcgccacggtaa

SEQ ID NO: 88029 - DNA, 582 bp, Enterobacter aerogenes
atgcactatttaaatcgggaagcgcgtcgggaagttatcatgcaggccgccatgcgagtggcgctaaatggcggcttcagcgccatgaccgtgcgccagatagccagcgacgccggcgtcgcagcaggtcagttacatcatcattttgcctcgaccggcgagctaaaagcgcaggcctttatccgcttgatccgcgaaatgctcgatattcagctgctgaccgatgacgcctcctggagcgaacgcctgttttcattacttggcagcgaagatggccgtctcgaaccctatatccgcctgtggcgggaagcgcagattttgtccggtagcgatgaggaaattaaggccgcatatctgcttaccatgagcatgtggcatgatgaaacggtcacggcgattaaccgcggcgccgaagccggtgaatttcagccgcaggatacggctgacaatattgcctggcgtctgattgctctggtttgcgggctggatggcatttacgcgctggggatgcaagcgattgacgacgcggcatttattcgttacttaaaacattatatcgcgctggaactccctcaggtttaa

SEQ ID NO: 88030 - DNA, 1389 bp, Enterobacter aerogenes
atgtcgatagaaggtgataaaaagaatcattatcttttaaaagattggcgaccagaaaatgaagccttctgggaaaataaaggaaaagcgattgcgcgcaggaacttatggatttccgtattttgtctgttactcgccttctgcgtctggatgttatttagcgcagttgcggtcaatctcaataaagtgggttttaatttcactactgaccagctctttttattaacggcgctaccttcgctttccggcgcaatattacgcgtaccctactcctttatggtacctattatgggtgggcgctactggacggttattagcacggttattctagtgattccctgtttatggctgggtttggcagtacaaaatccaactaccccgtactgggtatttatcgcaatttcgttactctgcggttttgccggcgccaacttcgcctccagtatgggcaacatcagcttcttcttccccaaggccaaacaaggcagcgcattagggattaacggcgggctcggcaatctcggggtcagcgtgatgcaactggtctctcctatttttatctttctgccgatttttacctttctgggcgttcgcggcgttgagcaacctggcggcgccatgctgtggcttggcaactcaccgctgctgtgggtgccgttactggttatcgccaccgttttcgcgtggttcggcatgaacgatattgccagttccaaagcttcaattcgcgatcagctaccggtgttgaaacgcccgcatatgtggctgctaagtctgttgtatctggccaccttcggctcgtttattggcttctccgccggcttcgcgatgctggcgaaaacccagtttccggatgtcgatatcctgaaactggccttcttcggcccgtttatcggcgcgctggcgcgctccttcggcggtatcatttccgaccgcctgggcggcgtacgggtgacgctggtcaacttcattctgatggcggtctttaccgggctgcttttcctcaccctgccgggctccggttccggcagcttcttcgccttctacgtggtgtttatgggcctgttcttaaccgccgggcttggcagcggttccaccttccagatgatcgccgtgatcttccgtcagctcaccattgatagcgtgaaaaagcgcggcggcagcgacgaacaggcccagcatgaagcggtgaccgataccgccgccgcgctcgggttcatcgccgcaattggcgccatcggcggcttctttattccaaaagccttcggtacctcgctggccatgaccggctcgccggtgggcgcgatgaaagtcttttttgtcttctatgtggtttgcgtgctggtgacctggctggtctatggccgccgtaaaccagcacaaccataa

SEQ ID NO: 88031 - DNA, 3741 bp, Enterobacter aerogenes
atgagtaaattactggatcgctttcgctactttaagcagaaacgcgagacctttgccaacggccacggtcaggtctacgacaataaccgtgactgggaagatagctaccggcaacgctggcaattcgacaaaattgtccgctccacgcacggtgtgaactgtaccggctcctgtagctggaaaatttatgtcaaaaacggtctggtcacctgggaaacccagcagaccgattatccgcgcacccgaccggacctgccaaatcacgaaccgcgtggctgtccgcgcggcgccagctactcatggtatctctacagcgccaaccgcctgaagtacccgctggcgcgcaaacggctgattgagctgtggcgcgaagcccttgcacaacatcccgacccggtacaggcctgggatagcatcatgcaggacccgctgaaaacccgcagctacaaacaaatccgcggtaaaggcggttttgttcgctccagttggaaagagttaaatcaactgatcgccgcagccaacgtctggaccatcaaaaactacggtccagatcgcgtcgcgggcttttcgccgatcccggcgatgtcgatggtttcctacgccgcgggtacccgctatttatcgttgatcggcggcacatgcctgagcttttatgactggtactgcgatttaccccccgcctcaccgatgacctggggcgaacagaccgacgtgccggaatccgccgactggtataactccagctacattattgcctggggttcaaacgtcccgcagacccgaaccccggacgcccacttcttcaccgaagtgcgctacaagggcaccaaaaccatcgccattactccggattattcggaagtcgccaagctctgcgaccagtggctggcgccgaagcaaggtaccgacagcgcgctggcgatggcgatgggccacgtgatcctcaaaaccttccacctcgataacccaagcgattactttctcaactactgccgtacctataccgatatgccgatgctggtaatgctcgaccgtcgtgacgacggcagctatgcgcctggccgtatgctgcgcgccgccgacctgcttgacgggctgggagaaagtaataacccggaatggaaaaccgtcgcctataacgccgaaggcgagctggtcgcgccgaacggatccatcggctttcgttggggcgaaaaaggcaaatggaatctcgaacaacaggctaacggccgggacgtcgaattaaaattgtcgctgctggatatgcacgatagcgtggtgtcggtcggtttcccctacttcggtggcaacgaaaacccgcatttccgcagcgtgaagcaggagccggtaacgcttcatcagctgccagctaaacagctaccgttggccaatggtgagagcgctttggtggtgagcgtgtatgacctggtgctggctaactacggtctggatcgcggtcttggcgatgccaatgccgcgcgcgacttcgcggatgtcaaagcctataccccggcatgggccgagcagatcaccggcgtgccgcgtcaacatatcgaacaaatcgcccgcgagttcgccgatacggcgcataaaacccatggccgttcgatgattatcctcggcgccggtgtgaaccactggtaccacatggatatgaactaccgcgggatgatcaacatgctggtgttctgcggctgcgtcggccagagcggcggtggctggtcgcactatgtcggccaggagaaactgcgcccgcagaccggctggctaccgctggcgttcgcgctggactggactcgtccgccgcggcagatgaacagtacctcttatttctacaaccacgccagccagtggcgctacgaaaaactgaccgctcaggagctgctgtcgccgctggccgacgccagcaaattcagcggccatatgatcgactttaacgttcgcgccgaacgcatgggctggctgccgtccgcgccgcagcttaacgttaatccgctgagcatcaggcagcaggccgaggccgccgggctgtccccggccgatttcaccgtccagtcgttaaaagcaggcgatattcgctttgccgccgagcagccggatagcggcaacaaccacccgcgcaacctgtttatctggcgttcgaacctgctgggttcgtccggtaagggccatgagtacatgctcaagtacctgctcggtaccgataacggtattcagggcgaggagtttggctccaccgctgacgtgaagccggaggaagtcgagtggcagaccgcggcgattgagggcaaactcgatctactggtgaccctcgattttcgcatgtccagtacctgcctgttctccgatatcgtcctgccgaccgccacctggtatgaaaaagacgatatgaacacctccgacatgcacccgtttatccaccccctttccgccgccgtcgacccggcctgggaggcgaaaagtgactgggaaatctacaaggacatcgccaaaagtttctctgaagtgtgcgtcggccaccttgataaagagaccgatgtggtactggtaccgctgcagcatgactctccggcggagctgtcacagccgttcgatgtcctcgactggcgcaagggcgaatgcgatctcattccaggcaaaaccgcgccgtcaattgcgctggttgaacgtgactacccggccacctgggaacgcttcacctcgctggggccgttactcgataagctcggcaacggcggtaaaggcatttcgtggaatacgcaaagcgaggtcgacttcctcggcaaacttaactacgtcaagccagacggtccggccaaaggccgtccgcgtatcgacagcgctatcgacgccagtgaagtcatcttaagcctggcgccggaaaccaacggccaggtggcggtgaaagcctggcaagcgctgggagaatttaccggccgcgaccacactcatctggcgctgaataaagaggatgagaaaatccgcttccgcgatattcaggcgcagccgcgcaagatcatctccagcccaacgtggtctggtctggaaagcgaacatgtctcctataatgccggttataccaacgttcacgaactgatcccgtggcgtaccctctccgggcggcaacagctgtatcaggatcatccctggatgcgcgccttcggcgagagtctggtggcctatcgcccaccgatcgatacgcgcagcgtcagccagatgaaggaagtgccgccaaacggcttcccggaaaaagcgctgaacttcctgaccccgcatcagaaatggggtatccactcgacctatagcgaaaacctgctgatgctgacgttgtcgcgcggcgggcccatcgtctggctaagcgaaaccgacgcaaaagaactggggattgaagataacgactggatcgaagccttcaacgccaacggcgccctcaccgcgcgtgcggtggtgagccagcgcgtgccgccgggcatgaccatgatgtatcacgctcaggaacgcattatgaacattccaggttcggaggtgaccggtcgccggggcggcatccacaactccgtgacccgcgtctgtcctaaacccacgcatatgattggcggctatgcccaactggcttacggctttaactactacggcaccgtcggctccaaccgcgacgagttcattatgatccgcaaaatgaaaaatattgactggctggatggcgaaggtcgtgaccaggtacaggaggcgaagaaatga

SEQ ID NO: 88032 - DNA, 381 bp, Enterobacter aerogenes
atgaaaatacgttcacaagtcggaatggtgctgaatctggataaatgcatcggatgccatacctgctccgtcacctgtaaaaacgtctggagcagccgcgaagggatggaatatgcgtggttcaacaacgtggaaaccaagccaggtattggttaccccaaaaactgggaagatcaggacgagtggcaaggcggctggatccgcggtatcagcggcaagcttactccgcgtctgggcaaccgcgtcagcgtgttgtcgaagattttcgccaacccggtgctgccgcagattgacgattattacgaaccctttacctacgattatcagcacctgcacaacgcgccggagggcaaatacttgcctaccgcccgcgttcgctga

SEQ ID NO: 88033 - DNA, 1146 bp, Enterobacter aerogenes
atggataagatcacctgggggccaaactgggaggaactgctcggcggcgagtttgaaaaacgcgccaaagaccgtaacttcgaagcgatgcaaaaagagatgtacggccagtttgaaaacaccttcatgatgtatctgccgcgtctttgcgaacattgcctcaatccgagctgcgtagcgacctgcccaagcggcgccatctataagcgtgaagaagacggtatcgtgctgatcgaccaggataaatgccgcggctggcggatgtgcatcagcggttgtccgtacaaaaaaatctactttaattggaagagcggcaaatcggaaaaatgcatcttctgctatccgcgtattgagtccgggcaaccgacagtctgttcagaaacctgcgttggccgcatccgctaccttggcgtgctgctgtacgacgcggaccgtatcgaagaagcggccagcactgaacatgaaaccgacctctacgagcgccagtgtgatgtgttcctcaaccccaacgatccggcggtcatcgaagaggcgttgaaacagggtattccacataacgtgatcgacgccgcgcagaaatcaccggtgtataaactggcgatggactggaagctggcgctgccgctgcacccggaataccgcaccttaccgatggtctggtacgtgccgccgctgtcgccgattcagtcggtcgccgacgctggcggcctgccgagtaacggtaacgtcctgccggcggtagaaagcctgcgtataccggtacagtatctggcgaacctgctgagcgccggtgataccggcccggtcttgcgcgcgttaaaacgcatgatggcgatgcgccattacaaacgttcgcaaaccgtcgaaggcgtgaccgatacccgtgcgattgaagaagtgggcctcagcgtcgaacaggtggaagagatgtatcgctacctggcgatcgccaattatgaagaccgcttcgtgatccccaccagccaccgcgaactggcggaggacgccttccctgaacgcaacggctgcggttttaccttcggcgatggttgccatggttctgatactaaattcaacctgttcaacagtcgtcgcatcgacgctattgacgtcggagatgttcgtcgacatggggagggagagtaa

SEQ ID NO: 88034 - DNA, 696 bp, Enterobacter aerogenes
atgcggatcctcaaagtcattgctctgttgctggagtatcccgacgacgcgctgtgggataaccgcgaggaggcgctggcgctggtcagcgccgatgcgcctgccctgacgccgtttgttaggcgattactggcggcgccgctgctcgaccgccaggccgaatggtgtgaggtatttgaacgcggtcgcgccacctcgctgttgctgtttgaacacgttcacgccgaatcacgcgatcgcggccaggcgatggtcgatctgatgaaccagtatgaacaggcgggcctgcagatcgattgtcgcgaactgccggaccacctgcctttatatcttgaatacctcagcattctcccattagccgatgcccgtgaaggactgcagaacgtcgcgcctattctggcgttgctcggtggacgcttaaagcagcgcgaatgcgattactatcaactctttgacacccttcttgcgctggcggatagcccactcaatagtgacagtgtcaccaggcaggtagcgagtgagaagcgtgacgacacccgccaggcgctggatgcggtgtgggaagaggaacaggtgaagtttattgaagataatgcaaccgcttgcgatagctcgccgatgcaagcttatcaacgacgctttagccaggatgtggcgccgcagtacgtcgacatccgcgccggaggcccgaaatga

SEQ ID NO: 88035 - DNA, 681 bp, Enterobacter aerogenes
atgatacagtacttaaacgtcttcttttacgatatctacccttatctctgcggcaccgtgttcctggtgggcagttggctgcgctatgactacgggcagtatacctggcgcgcgtcatccagccagatgctcgataaacggggcatggtgctgtggtcgaacttattccatatcggcatcctcggcattttcttcggccacttcttcgggatgctgacgccgcactgggtctattcatggtttctgccgatgtcgcagaaacaggtgatggcgatggtgctgggcggtgtctgcggcgtactgaccctggtcggcggtattggcctgctggcgcgccgcctgaccaacccgcgcattcgcgccacctccaccactgcggatatcctgatcctgtgcattctgctgattcagtgcgcgctggggctgacgaccatcccgttctccgcccagcatccggacggcagcgaaatgctgaaactggtggattgggcgcaggcggtagtcaccttccacggcggcgcatcggcgcatctggacggcgtcgcgtgggtgtatcgcgtccatctggtgctgggaatgactatcttccttatcttcccgttcacccggctggttcacgtctggagcgcgccgatagagtatttcacccgccgctaccaggtggtgcgctcccggcgctga

SEQ ID NO: 88036 - DNA, 846 bp, Enterobacter aerogenes
atgaccccatttttaagcgcgtattttactcgtctggcctggacgggaacccccgatgtttccattgacaccctgcgagagttgcatagccatcataatagcgcgatcccgtttgaaaacctggacgttctgctaccgcgtgaaatccaccttgacgatcgggcgctggaagaaaagttaatcaccgcccgccgcggcggctactgctttgaacagaacgggctgttgcagcgggcgctaagcgagatcggtttctcggttcgtagcctgttgggccgcgtggtgctggcgaatccgccgcagatgccgccgcgcacccatcgcttgctgctggtggaggtcgaaggcgaacgctggattgctgatgtcggctttggggggcaaaccctgaccgcgccgattaagctgctggccgatattccgcagcatacgccgcatggtgtttaccgcctggtgcatgaaggcgatgagtggacgctgcagtttaatcatcatgaacactggcagtcgatgtaccatttcgatctggggcgacaatatgcctctgattatgtgatgggtaacttctggtcggcgcactggccgcagtcccatttccgccatcatctgttgatgtgtcgtcatctgccggacggcggaaaaatgacgctcaccaatttccattttacccactgggaaaataaccatgtagtggagaaggtggatcttgcggacgtgtcggcgctttatgaaacgctgcaaacccgcttcggacttggtgtagatgacccgaagcacggcttcagcgaagccgcgctggcagcagtgatggcggcgttcgatacccatccggaagccgggaagtaa

SEQ ID NO: 88037 - DNA, 582 bp, Enterobacter aerogenes
atgagccgttttcgccacgtggaacttcagtacgccagccgcctgctcaaccacggcccgaccattatgatcaccagttatgatgcgcagtcaggacggcgtaacgtgatgtccgccgcctggtcgatgccggttgaatttgccccgccgcgagtggctattgtggtggataaaagcacctggacgcgggagatcattgagcgtaacggcgcctttggcattgtggtgccgggcgtggccgccgccagttgggtctatgcggtcggcagcgtgagcgggcgtgatgaagataagttcaatgcttacggtatcccggtggtgaatgggcccgaactggggctaccgttaattgaagagaaatgcctggcgtggatggaatgccgtctgctacccgccaccgcggcacaagagcaatacgatacgctgtttggcgaagtggttgccgccgcggccgatgaacgagccttcgtcagcgggcgctggcagtttgatgatgacaaactcaatactattcaccatctcggtaccggcaattttgtcgccagcggccgtcacgtgcaggcgaatacgccacataattaa

SEQ ID NO: 88038 - DNA, 219 bp, Enterobacter aerogenes
atgaaggcaaaagatggggctccgctcagcgaaagagaaatgatgattattgattatgtcgccaaaggcactccggtgaacgccattgccagagcgttgggactgcgggtaaaaaccatttatgcgcatttagataaaattaaagctaacttcaaccttaaaggtggaagtcactttcatcgcttcatgataagcccgccgtcttatcacttactctaa

SEQ ID NO: 88039 - DNA, 435 bp, Enterobacter aerogenes
atgataataggtagtgcgttacttggttaccaattagaggatgattttttttacttcttgaagtaccgggaaatagctactgtaagtggtaatagaaaaaacatccgtctacgaaaaacgatggcctgtttaattgagtatttatttgaacatggtcttgaaagaatggttagtgatgaagagttgatggtacatgtctgggagaaaaatgatttaaggccctcatcacaacgtttatggcaagtgatgcaaaatttacgtcggatcctgaaggatatcggcatcgaacaagatattatattacgcgttaagactcagggttattatatcaatagtcattacgttacgagtgtttattcggtaagaactcataaaccattctgccagaataatgatgcgaccgttcagctttgtgagctgtccgagctaaattaa

SEQ ID NO: 88040 - DNA, 228 bp, Enterobacter aerogenes
atgccacatgtcgatattaaatgttttccccgtgaactgagcgaagagcaaaaaaatgcgctggctgcggaaatcactgaagttctgatccgccatcttagtacaaaagacagttcagttagcgttgcgctcaatcaggtgcagcagagcgactggcagcaggtatgggataatgaaatcgcgccgcagatggattctttgattaagaaaccgggataccgaatgtaa

SEQ ID NO: 88041 - DNA, 618 bp, Enterobacter aerogenes
atgatgaaattgtatggcgtgccggggtggggctcggcgataagcgagatgatgctaacgttggccaatatcccttatcactttatcaatgtcgatggctttgaccagccaggcgcgcagcgagagaaactgttggcgatcaacccgctgtgtcaggtgcccactttgctgctggctgatggcagcgtaatgacggagtcggcggcgatagcgctgatgatcctcgacgagcgcccggatctggcgccgccagccggtacgccacagcgccggcagtttcaacgtttgctgatctggctggtggctaacgtttatcctaccttcacctatgccgactatcccgaacgttggacagcctcagcgcctgacgaactgcgtgagagttgtcagcaataccgcaaatcactgtatctatggctggaacaacagctggctgccgcgccttacgccttgggcggggatatcacgctgttggattgctatattgccgcgatgtacagttgggggccgcgccgagagtggttcgcggcgcatacgccaaagtttgccgccgtggcgcaggcggtttatcgccgtacggagctgcagcaggtactgcatgacaacaatcttctttaa

SEQ ID NO: 88042 - DNA, 699 bp, Enterobacter aerogenes
gtggctgaaaaccaactcttactggagcaacgctggcagcaccatcgtgaacccgcgttgcacgccgcttccggcggcgctatcgacaccatcagcttcatcaccttgtttggcctgtttaccgcccacgtcacgggaaacctggtggtggccggtgcagcactggccaccaacagcgaaggtattttatccaaactgctcgccattcctgtttttatgctggcagtggcgctcgttacgctggttatcaaacgtcgaaaaattatcacgccacgcttccttggcggcttgttcgtcgtcgagatcctgctgttactgcttttcggcctgttggggctgctgtggcagccctttgtcggcgcggatagcgcgaccgcgttaatcaccggcatggcaggcgtaatggcgatgggggtgaggaatgcaaccacccgtttattattacccaccaccagcccgagtacgatgatgaccggcaacgtcacgcagttaaccatcgatgtggtgaactggtgccaggcgcctaaccgcgagaatagagcgaaaatcaaaaaatcgggggcttcggtgctcggttttctgctgggcgcagggctcggagcgctgggctacatcctggcgggtttttactcggtacttattccggtggtactggtggccatcgtcgcctggcgcgaattcagcgccgcgcggaattag

SEQ ID NO: 88043 - DNA, 894 bp, Enterobacter aerogenes
atgaggaaattagctgccgctctcatgctgctcctgagcatcggcgaggcgcgcgccgaacttgatttgcgcgccaatgaacggccattgccggtgacgcgagatgataacgcgattagcaaaatcccgccgaactatcgttttgtggagcccggcgtgctgacggtggcgatttcggcgttaaattcgccgccgctggcgctgctggccagcgacaaccgtacgcgcatcggcagcgacccggacattgcccgtttactggcgggtagccttggactgaaactgaagctggtgcctacggcctgggaggactggcctttggggatcgcgtcagggcgttacgatgtggcattgattaacattgcggtgaccgagaagcgcaaagagaagttcgatttcgccacctaccgcgttgactcgctggccttttcggtcaaatcaaccagtgagatcacgcggatttcaaatgcgcaggatctctcggggcgtaaagtcattgtcggttctggcaccaaccaggagcggatcctgctggggtggaatgcggaaaacgaagccgccggccgtcagccggcgttaccggtttatcttactgacgatgcctccggcaatttgtatattcagtcgggaagggcggatatcttttttggcccgcagtcggtggcctcttataaggctgcattaaacgggaaaactaaagtcgtcgggctgggacccaaaaaagcctgggtggcgactactactataaaaggcaatgggctggtatacgcgctgcaggcggcgctaaacggcgcgatcgctcgcggcgagtatcagcaggtgctcgcgcgctggggggaacagggggaggaagtcaggcaatcggaggtcaatccgccggggataacctattga

SEQ ID NO: 88044 - DNA, 777 bp, Enterobacter aerogenes
atgctcaactctcgtaatggtcatatttcgataaccggggtcagtaaatactttggtcgtcataaagcgctggatgatgtctccctggagattgcgccgggaacggtgacggtgatcctggggccgtccggttcgggaaaatcgacgctgctgcgcaccattaaccatcttgaacgggtcgatgaagggtttatccagattgatggcgactatatcggctatcgccgtcaaggcgacaagctgtatgagctgaaagaaaaagagatcctccgccagcgggttaacgtgggctatgtatttcagaacttcaatttgttcccgcatctgacggtgctggagaatctgattgaagcgccgattgcccataaacaggccagtcgcaaagaggcgattgctcgtgcgtatgaattgttggacattgtcggtttgcgcaacaaagccgatgcctggtcacggcatctttccggcggtcagcagcagcgcatcgccatcgcccgcgcgctggcgctcaatccgcgcgtgatcttgtttgatgaacctacctcggcgctggatccggaactggttggcgaagtgcttgatgtgatcaaaaaacttgcccgctgcgggacgacgcttgtggtggtaacgcatgaaatcggctttgcccgcgaggttgccgaccaggtggtgtttatggtcgatggcaaaatcgttgaacagggcagcagcgatgaagtgttaaataatccgcaacaccagcgcacccggcaatttttatcacgggtgctggcatga

SEQ ID NO: 88045 - DNA, 921 bp, Enterobacter aerogenes
atgcaatcatctgaaacgattaaagttgttccggctcgctatccgctgcgcgtcgccggggcggtattggccctactggtgctggcggtcgtcgtgcagtcggtcgcgttcaacccgcgctgggagtggggggtgttcgcacactggttcttcgacccggtgatccttgaggggttggggcaaacgctgctgctcacgctacttggtacctttttaagcgtcatcttcggcggcctgttggcgctggcccgcttgtcgtcgtcgtggctgctcagcagcctggcatgggggtatatctggctgtttcgttcgctgccgctaatcgtggtgttgatcattctgtacaacttttcatatctctacgacagcttatcgttggggatccccttcaccggcataacctgggcgagctaccagactatcaacgtactggggcagttttccacggcagtggtcggtctgacgctggtgcagagcgcctatactgccgaaattatccgcggaggctttttgggcgtggatcacgggcaatatgaggccgccgccgcgctgggactccccgcctggcgacgtacgctgcggatcattttgccgcaagcgctgcgcaccattctgcccgcggggttcaatgaaatcattagcctggcaaaagggacggcgatggtttacgtgctggcgatgccggaattgttctacaccattcagatgatctataaccgcacccaggaagtgatcccgttactgatggtgggcgccgcgtggtacctggtgattaccagcgtgctttctgcaattcagtaccttgtcgaacgcgcgctggcgcgcagcgaacggcgctcggcggtgaacagcgtacgtaatactcgcgttaaccaaccggctcgtcagccgcaggaggccgtccatgctcaactctcgtaa

SEQ ID NO: 88046 - DNA, 510 bp, Enterobacter aerogenes
atgagcgaagcattccgtgatatctctccggacgcgccggagctacagccgattattagcggcctgtttgccgagtacgccgcccgttacggcgactatttttctcgtgatgcggaagtggagttaaccgaatggtatctgccgccgcaggggctgtttattgtgctggagcgtgacggcgaaatcatcgccaccggcgcttacaagccgaaagatccgcacaccgcggaaattaagcggatctggacgcatcgtcggctgcgtcaacaggggctggcagccagggttgtacaggaactcgagcgccgggcggtactggcaggctatagccatatttatctcaccaccggttttcgccagccggaagcggtaaagctctatttaagccaggggtatgaggcgcagtttgatctcactcgcgacccggaagagtacagccgcccgccttatgatgggcggttgcggttcactaaagcgctggcggttagcgccctcagccacagcgcttaa

SEQ ID NO: 88047 - DNA, 933 bp, Enterobacter aerogenes
atgcagaaatcaactctattgctggccttcgcgttggcaattagcgccccgtcgtgggcgcaggacgtcaatatcaatggcaccggagttagcctggaagccaataaaaccccgattcatacggcaaaaaatccgcaggcaattgcgctgttgccgaaagatctgcatctggcggtgccggggaaatttaccgtcgcggttgcggcgctaaactcgccgccgctgacggtgttttctgatgataacaaaacgttgctcggtagcgaggcggatattgcgcgtctggtggctgacagcctcggcctcgaagtcaacgttgttccgacctcgtgggaagactggccgcttggcgtcgcctcaggcaaatatgatgccgcgatcagcaatattaccgtcaccaaagagcgcaaagagaagttcgatttcgccacttatcgtaaagattcgctgggtttttacgttaaaagcaccagcccactgaacaagatcgacaaagcggaagatattgccgggctgaagattatcgtcggctccggcaccaatcaggaggcaatcttactggcatggaatgcggaaaacgttaagcgcgggcttaaaccatttataccggtctacaccaaagatgacgccgcgcagacgctggctctgcaaactggccgcgccgatgcttactttggccctaacgtcataggcgcctggaaagcggcccttactggcaaaaccaagctggtgggcagcgtggacggcgggtggccgaaggcggcgcatatcgcggtgacgctgaagaaaggcagcgggctggtcaatgccgtccaggcggcgctgaatggcgctatcgccagcggcgattatgccaaagtgctcaatcgttggggcgaaggcgtggagagcattccacaatcggaaattaaccccgccgggctgggcgattaa

SEQ ID NO: 88048 - DNA, 1314 bp, Enterobacter aerogenes
atgtctgaaaaacggcaattacgtctggggacgattttacatggcgcctcaggaaatatgtccgcctggcgtcatccggcggcgctggcggatgccagtattaattttgaatttgtgaaagaaacggcgcaaaaagccgagcaggggaaactcgattttatttttgtcgccgacgggttatatattaacgaaaaatccatcccgcactttttaaatcgttttgagccgttaacggtattatcaacgctggcggcggtgaccgatcgtctggggctggtcggcacgctctccacctcctatagcgaaccgttcacgaccgcgcgacagttcgccagcctcgaccatttaagccacgggcgcgccggctggaacgtggtgacgtcgccgctggaaggctcggcgaaaaacttctcccgcgcccagcatcccgatcatgcgctgcgctatcgcatcgccgacgaatatcttcaggtggttaaaggattatgggattcctgggaagacggcgcttttgtgcgtaataaagagagcggccagttttttgataaaaataaactgcatacgcttaatcatcatggcgatttctttaaagtcgctggtcctttgaatattgcccgcacgccgcagggacggcccattatttttcaggccggcgcctccgatgacggcaaaaaattagccgctcgccacgccgatgccatttttacccaccaggaatcgttagccgaggcgcaggcgttttatcaggatgtcaaaagccaactggctgcctatcagcgcagtgcggatcaactgcatattttccagggcgtcagcgtaatcgtcggtgacgacgcggaggatgcggagcgtcaataccagaccacggcggcgctggtctcgatcgacgacgcgttgaattacctgggtcgttacttcgagcatcatgattttgcgcaatatccactggatgaacccttcccggatattggcgaccttgggcaaaacagcttccgcagcaccaccgatgagattaaacgcaatgcccgtgaacggggattaaccctgcgccaggtggcgctggaggccgccagcccacgcccgcgcttctccggcacggccagcgatgtcgccgacggcttacagctgtggttcgagcaacgcgccgccgatggcttcattattcagggcggcacgccggaaaccttcccgcgtttcgttgatgaagtggtgccattgctgcaggcgcgcggattgttccgccgcgactatccaggcaccacgctgcgggaaagcctggggctggatctgcccattaaccaattcgaaaaataa

SEQ ID NO: 88049 - DNA, 1122 bp, Enterobacter aerogenes
atgaatttcgagcaacagttgattagctggcggcgcgaactgcatcagaatccggaactctcattacaggaagtggcaaccaccgcgcgtatccgcgactggttgcaaagcggcggcctgccgttactgccttacgagttaaccaccggcgcggtgacggaagtgggcagcggcgataaaatcatcgccctgcgcgccgatattgacgcgctaccgatagaagaggccaccggactgccgtaccgctcgcaaaatcccggcgtcatgcatgcctgcggtcacgatatacataccagcgtgatgcttggcgcggcgttgctgttaaaggaacgagaagcgcaactgccggggcgggtgcggatcctgttccagccagcggaagagagtttcggcggcgcaaaaacgttgatccgcgccggggcgcttgacggcgtatcggcaatcttcggcatgcacaatgagcccaatttacccgttggcgagtttgccacccgcggcggcccgttttatgccaacgtcgatcgcttcgtattcaaagtaaccggcaagggggcgcatgccgcccggccgcatgaaggcaaagatgccatcctgctagcgagccaactggtgacgctgctacagagcgtcgccagccgcgaagtgaataccctggattcggtggtgctcagcgtgacgcggatccaggggggaaatacctggaacgtcttgccggaaagcgtagagctcgagggaacgctgcgcacccacagtagcgaggtgcagcagcgggttaaggcgagagtcagcgaaatcgccgccggcttcgccagcgccttcggcgcgcaaatcgatgtcttctggtacgccgggccaacggcgctggtcaacgatgaacaatgggcggcgttcgccagcgcggcggccgaccgcttcggctaccgcacgcatcacgccgatttgcatctgggcggcgaagactttgccgtctatctgcagcatattccgggtgctttcgtcagcatagggagcgccagtgaattcggcctgcatcatccggcctttaatccggatgaaaacgtcattgccccagccgcgcgctatttcgcggatctggcggaacaggcattacaccatatttga

SEQ ID NO: 88050 - DNA, 1002 bp, Enterobacter aerogenes
atgtcttatcgaatcagtatcctggataaaagcccccttgctcccggtgaaacggccgctcaggcgctggcgcgtacgttaacgcttgcgcaacaggcagaacgctggggatatcatcgtttctggattgccgagcatcacaacgcggaacagctggcgagcccgtcgccggagctgctgattgcctggatcctcgggcaaacccggcagatccgcgtcggttccggcggcgtgatgctgcagcactatagcccctacaaagtcgccgagaattttaatctgctggcaagccttgcccctgggcgtgtcgatctcggcgttggcaaagcgccaggcggtttgccgcttgccactcgcgcattacagcagggcattcatcagcacgaaaagggcagttttgccgagcagcttacccagcttgataactggctaacgttgaccgaaagccagggcgaggagagcctgcgcgcgacccccattccaccgcgccgtgcggacggtttcctgctcggcgccagcgtcgacagcgcccgtctggcggccagtctggactggaactttgtttttgccgcgcatctcaatggcgataaaaacttgttgcaggaggtgctgacgaactggcgcgaattgagccgccgcgaggtgatcgtggccgtacaggttattgttgcgcaagacgccgccagcgcggccgatctggcgaagcaggtagaggtctggggcgtcgagctggcaaacggtcagcgggtgacggtgggcagtgaatctcaagcggcggcttttgcccgtcaggccggtagcccgccgacgcgcattgagcgccgcgagtcctctctgttgtttggtaccgcagaagaggttaaagcacaactcgatgctcttcaggcgcagtggggcattgatgagtttattattgatacccctattgccgaagggcgtgcgcggctggcgtcgttgggattgctggcgcaggcgcatcttggcgcggaggtaacgccatga

SEQ ID NO: 88051 - DNA, 561 bp, Enterobacter aerogenes
atgaaaatcaatgtggtaggcactagcggcgtagggaagtcgacacttgcgcaacgcctggcggcagcgctttctttgccctacatcgaactggataggctctactggcggccagagtgggagggggcgccggatgaagagtttttcgccagcatcgcgcaggcaacggcctctgctggctgggttcttgatggcaactataatcgcagtcgcgcagtcaaatggcgtgatattgatctggtggtatgggtagattatagctttgttcgcacactatatcaggccattcgccgtgcgctgagtcgcgcctggcaccagcaggagctatggccgggtaccggtaatcgtgaaacctttcgtcgcaccttctgcaatcgtgattcgataattttgtggaccatgaaaacgtggcgctctaatcgtcagcgctatttagcggatatgcattctgcgcagtatggtcatatccgtttcgtccgtttacgtaatcagcgacaaacagagcgctttattgctgaaattgtccatcagcaggcaatggctggcagggtgcatatctaa

SEQ ID NO: 88052 - DNA, 888 bp, Enterobacter aerogenes
atgttaaaggataacttcaacgatctcctgtcgtttatggtagtcgcccgcgaacgcagtttcacccgcgccgctgcccaacttggggtatcgcaatctgcgctgagccatgcgatgcgcaacctcgaagcccggcttgatgttcgtctgctgacccgtaccacccgcagcgtcgcccccaccgaagcgggtgaaaaattgttccagaatttacgtccgcatctcacggaaattgaacgcgagctcgtctccttgagggatagccgcgcccttccggcgggtaatattcgccttaacgccggtgaacacgccgtcagcgcggtgttgtggccggcattaaagccatttatgttgcgttatccggatatcaatatcgaaattaccgtcgataacggcctggccgatatcgtcgatggccgttttgacgccggcgttcgtctcggcgatcaggtagcaaaggatatgattgcggtacgcatcgccccggacatgcgcatggtcgtcgtgggctcgcccgactatctacaacgctacggcaccccgcagacgccttatcaactggatcagcaccgctgtattaatatgcggctaccaacccgcggcgggatttacgcctgggaattcaccgacgatggtaaaggctttcaggtttatgtagagggtcaactgacgctgaatagcttaccgcaacgcattgatgccgctgaatctggtctcggcctggcctatgtgccggatgattgcgtcgaggaggcgctggttgccggtcgtttagtacgggtactcgatgcctggacacccaccttccctggttatcatctgtattatcccagccgtcgtcagcataccgctgcgtttgcgctactcgtcgacgcgttgcgtcattga

SEQ ID NO: 88053 - DNA, 1458 bp, Enterobacter aerogenes
atgaataacaaacacactgacgcggcggaacatcatgccgcgaaacgccactggctcaactcgcacgaatcgggttaccacaaagcaatgggcaaccgtcaggtacagatgatcgccattggcggcgccatcgggaccggtctgtttctcggcgccggggcgcgtttacaaatggcaggcccggcgctggcgctggtttatctggtttgcggtatcttctccttcttcatccttcgcgccctcggcgaactggttctccatcgcccctccagcggtagtttcgtctcttacgctcgcgaatttctcggtgaaaaagccgcctacgttgccggctggatgtatttcgtcaactgggcaatgaccggtatcgttgatatcaccgccgtcgccttgtatatgcactattggggcgctttcggcgatgttccgcagtgggtcttcgcccttggcgcgctggcgatcgtcggcaccatgaatatgatcggcgtgaaatggttcgctgagatggagttctggttcgcgttggtgaaagtactggctatcgtcgcgttcctggttgtcggcacgattttcctcggtaccggcaaaccgctggatggcaatgccaccggcttccatctgattaccgacaacggcggtttcttcccgcacggtctgttaccggctctggtactggttcagggcgtcgtcttcgccttcgcttccatcgagttggtgggtaccgcggcaggcgaatgtaaagacccggaaaccatggtaccgaaagcgattaacagcgtgatctggcgtatcggcttgttctacgtcggttccgtggtgctgttggtgctgctgctgccgtggaacgcctatcaggcagggcaaagcccgtttgtcaccttcttctcgaagctcggcgtaccgtacatcggcagcgtgatgaacatcgtcgtgttaactgccgccctctccagcctgaactcaggcctgtactgcaccgggcgaattctgcgttcgatgtcgatgggtggctcagcgccgaagtttatgtcaaagatgagccgtcatcacgtcccttacgccgggatcctcgcgacgctggcggtctacgtggtgggggtcttcctcaactatctggtaccgtcgcaggtatttgagatcgtacttaacgtcgcatcattggggattatcgcctcatggggctttatcgtgatctgccagatgcgtctgcgtaaggctatcaaggaaggaaaagcggcggatgtaagctttaaaatgccgggcgcgccatttacttcatggctaacgctgttgttcttgctgagcgttctggtgttgatggcttttgactacccgaacggcacctataccatcggttccattccgctgctggcggtgctgctgatcgctggctggttcggcgtacgtaaacgcgtggctgatgttcacagcacggcgccgggcgttgaaaaacgctaa

SEQ ID NO: 88054 - DNA, 222 bp, Enterobacter aerogenes
atgaaaaagccatatatggtgatctgtgcggcggcaatgctggcgcttctggctggctgcagctctaattacgtcatgacgacaaaaagcgggcaaactatcgtgacccgcggtaaaccgcagttagataaagaaaccggcatgaccagctatatcgatgagtctggcaacaaacgcgaaatcaacagcagcgacgttgctcaactggtggaagataattaa

SEQ ID NO: 88055 - DNA, 1062 bp, Enterobacter aerogenes
atgtcattacgtcagttatccgcgccgcgtctgcgtcgttctctgttattaacgtcgttactgttggcaggcagcttcagcgcccacgccgccgaggagctcctgcgtaaagcggtcggtaaaggcgcgtacgaaatggcgtatagccagcaggaaaatgcgctgtgggttgccacctcgcaaagccgctcgctggataaaggcggtatcgtctatcgtctggatccgactacgctcgacatcacccaggttattcataacgacctgaaaccgttcggcgccaccatcaataacaccacccagacgttgtggtttggcaacaccgttgatagcagcgtgaccgcaatagatgccaaaaccagcgcggtgaaagggcgactggtgctcgatgaccgtaaacgtagtgataccgtgcgcccgctgcagccgcgtgagctggtagtgaatgagaaaaccaataccgtatatatctccggtctgggtaaagagagcgtcatttgggtggtggatggcgacaagctgacgctgaaagataccattaccaataccggcgcgatggccaccggactggcaatcgatgctgacgctaaacgtctttacaccaccaatgccgatggcgaactactgactatcgataccgatagcaataagatcctctcgcgcaagaagctgcaggatgatggtaaggagcatttctacctgaacctgagcctggatacagccggtcaccgtgctttcattaccgacagcaagcagccggaagtgctggtggtggatattcgtgacggtaaagtgctgcaaaaaatcgccgcgccggaatccctggcggtactgtttaacccagcacgcaacgaagtctacgtcacccatcgcaaagcgggtgaagtcagcgtgattgatgctaagacttataaggtcgttaaaacctttaaaacgccgaccttcccgaatagcctggcgctgtccgccgatggaaaaacgctgtttgttagcgtgaaacaggagtcaactcgtcagaaagaggccaccgcgccggacgacgttatccgcattgctctgtaa

SEQ ID NO: 88056 - DNA, 2112 bp, Enterobacter aerogenes
atgaagattattgccatgcgcacggtcgcgctccccgctttattactccctctcgtcgccaacgtgcacgccagcacgaacgacgaacaaaccatggtcgtcacggcgacgcctaccgcggtttccgagctggatacccctgccgccgtcagcgtagtgaatggcgatgatatgcgtcaggccgccccgcgaattaacctctcagaatcgctcggcgcggtacccggtttacaggtgcagaaccggcaaaactacgctcaggatttgcagttgtcgattcgcggtttcggttcccgttccacctacggcgtccgcggcctgcggctatacgttgacggtatccctgctaccatgcccgatggccaggggcagacatcgaatatcgatatcggcagcatcgatagcctggaagtgttacgcggacctttttccgcgctctatggcaactcttccggcggcgtcattaacgtcaatacccaaaccggcagccagccgccgaccatcgaggccagcagctactacggcagcttcggtacctggcattacggactgaaggccaccggcgccgtcggcgacggcacccaggcaggtgatgtcgattacacggtgtcgaccaaccgttttactacccacggttcacgcgaccatagcggggcgcgtaaaaatctcgccaacgccaaattaggcgtgcgtataaacgacgtcagtaaattaacgctgctgttcaatagcgtagatatcaaagcaaacgacccgggcggattgacatatgatgaatggcgtaataatcctcagcagtcgccgcgcggcgatcaatacaacacacgaaaaacggtgaaacaaacccaggccggtttacgctatgagcgccagcttagccagcaggacgatctcagcgtgatgatgtatgccggcgagcgcgaaactacccagtatcagtcaatcccgatggcgccgcagctgaagccctcacactccgggggcgtcatcgatttaactcgccattaccaggggctcgacacccgctggacccaccgcggtgaattactggtgccagtgacctttaccaccggtcttgattacgaaaatatgagcgaacggcgtaaaggttatgaaaactacgttctggtgaacggcgcgccgcaatatggcgaacagggcaacctgcgccgtaatgaacgtaatctgatgtggaacctggatccctacctgcagactcagtggcagctgacggacaagctcacattcgatgcaggcatccgctacagttccgtttggtttgactctaacgactattacgtcactccgggtaacagcgatgatagcggcgatgccagctaccacaaatggctaccagctggttcattgaagtatgccgtcacggatgcctggaatatctatctttccgccggacgcggttttgaaacgccgacgatcaatgaactctcgtatcgttccggcaatcagagcggattaaacttcgatcttaaaccctccacaaatgaaaccgtggaaatcggcagcaaaacgcggataggcaacggactgttcaccgccgcgctgttccagaccgataccgacaatgagattgtggtcgactccagcagcggcggccgcaccagctataaaaacgccggtaaaacccgtcgtcagggagtggaactcggtctcgaccagcagtttggcgacagctggaaattaaaagcagcatggacctggctcgacgccacctatcgcacgaacgtttgcggctccgcagactgcaacggcaatcgcattccgggtattgcccgcaatatgggctatgcctctttcggctaccaaccggaacagggctggtacgcgggtagcgatatccgttatatgggcgacattatggccaacgacgccaacacagccaaagcgccatcgtggaccgtggtaggcctgaccaccggctataagtggagctacgggaaaatggatatggatctgttcggccgcgtcgataacctgttcgatcgcacctacgttggctcggtcattgtcaatgaatccaatggtcgttattacgaaccggcgccgggccgtaacttcggcatcggtatgaatctcgcctggcgtttcgaatga

SEQ ID NO: 88057 - DNA, 294 bp, Enterobacter aerogenes
atgaaagaagtagttgataaatgcagtaccaaaggctgcgccattgatgttggcaccattattgataacgaagactgcgtttaccgggtcgagaaacttttccctacccgtgaagaagcggagtctgcggtagcggccattcgcgaacgcgccgttgccgccgccagcgaaacgccgagcgtggattacacgattgagccggtgggtaatgaggccaaactggacgcggcggtgaatttctcctgccaggcggaaaaaattattttcgaattgtccttaagaagcgcgttctaa

SEQ ID NO: 88058 - DNA, 1038 bp, Enterobacter aerogenes
atgaccgctaatccacaacgccatcaccgctgggtattggcttcacgcccacacggtgaacctacctccgaaaatttcagactggaagagggtgacctcccgacgccgggggcgaatcagatcctgctgcggactatttatttgtcgctcgacccttatatgcgtggacggatgagcgatgcgccttcttattcgccgccggtggacattggcgcggtgatggtcggggggacggtaagccgcgtggtgagcactaatcaccctgattttaaacccggtgagtgggtgcttggctatagcggctggcaggattatgcgctttccgatggtagcgatctggttaagctcggcgacaatcctgagcacccttcgtgggcgctgggggtgttaggcatgccgggatttaccgcttatatggggctgctggatatcggccagccgaaagcgggagaaacgctggtggtggcggcagcaaccgggccggtgggggccaccgtcgggcagatcggcaaacttaagggttgccgtaccgtcggcattgccggcggcgtcgagaagtgtcgttatgcggtagagacgttaggcttcgatgtttgtcttgatcaccgcgctgcggatttcagccagcagctggcgcaggcctgcccacagggcatcgatgtctactatgaaaacgtcggcggtaaagtctttgatgcggtcctgccgttgttgaataccgctgcgcgggttcccgtgtgcggactggttagcggctataacgccaccgcgctgccggatggcccggatcggctgccgctgctgatggcgacgatccttaaaaaacgtattcgtatgcagggctttatcattggccaggattacggccatcgcatcgcggagttccagcagcaaatggggcgctgggtgcaagaaggtaaaatcaaataccgcgagcagcagattgatggcctggcgcaggcgccgcaggcgctgattggcctgctgaagggagaaaacttcggcaaagtggtgattaacgtcgcagcggaggagtaa

SEQ ID NO: 88059 - DNA, 576 bp, Enterobacter aerogenes
atgaatactatagaagacaatctcaaccagcgcattagcgcacgcattcgtatcgaacgcgagtcccgcggctggtcgctaagcgatctggctgaacgcgcaggggcctcgcgggcaatggtgcataaaattgaacgtggcgaaagtagccccaccgcggcgatgctgggccgtctctccggcgcgtttggcatcagtatgtcgacgttaattgcgcgtgcagagatgcaggagggcaagcttttgcgctttgccaaccagccagtgtggcgcgatccacaaagccactatttgcgccgtcacgtctcgccgcgaagcgatctgccgatcgatctggtgcaaatagagctgccggccggcagcgatgtaccgatgcctgcttcttcgtatgcgctggcgcgacagctcatctggctacagcagggtgagttagtttttgttgaagggaacactcgccatcagatgcaggcgggggattgtctggaactggggccgcccaacgattgccgatttatcaatgagaccagcgagacttgcgtctatctggtggtgcgcctgaaccaatccggctcataa

SEQ ID NO: 88060 - DNA, 519 bp, Enterobacter aerogenes
atgtccatccgccatgccagtaaagacgattgcgcggcgatcgccgaaatctataatcacgccgtactgcataccgctgccatctggaatgacaaaaccgtcgatatcgataaccgtattgcctggtttgaggcccggcagattgccggctatccagtgctggtgagtgaagaaaacggcgtcattaccgggtactcctcgttcggcgactggcgcgcttttgacggtttccgccataccgttgaacattcggtatatgtccatcccgatcatcagggcaaggggattggccgtaagttgttagtcgcgcttatcgctgaggcgcggcgtctgcgcaaacatgtgatggtggccggaattgaatcccgcaaccatgcttcgttacatctgcatgaaaccctgggttttatcaccactgggcagatgccgcaggtgggaactaaattcggtcgctggctggatctgacctttatgcagctacagctcgacgatcgccaggatccggacggcgaggtatga

SEQ ID NO: 88061 - DNA, 450 bp, Enterobacter aerogenes
atgaatcagtcgctcacccttgcctgcctgatagcggcgggcgtcggtctggttttgcaaaacaccctgatggtccgcattacccaatccgcctcgacgattcttatcgccatgttgctcaattcgctggtgggaattgttatttttgtcaccattttactattgcgccacggcgcggcaggctttcaggaactggcgctgaacatcaagtggtggaccctcattcccggcctgctgggttcctttttcgtcttcgccagcattagcggttatcaaaacgtgggcgcggcgacaaccattgcggtactggtggccagtcagctggttggcggattggttattgatttgattcgcgcccacggcgtaccaattcgggcgttaatcgggccagtatgcggggcggtgatgttggtggtgggcgcctggctggtggccaggcgccagttctga

SEQ ID NO: 88062 - DNA, 234 bp, Enterobacter aerogenes
atggcacatctggacgatgtcattgccagggtcgatgacaccattgccgggggcgtgattgcctctatgaacgagctactgatcgcgttaagcgacgatgccgaactgggccgcgatgagcgttatacccagcagcagcgcctgcggacagcgatagcccatcacgggcggcaacatcatgaagatcaggaagcacgccgcgagcagttaaccaaaggcggcgagatcctttaa

SEQ ID NO: 88063 - DNA, 1599 bp, Enterobacter aerogenes
atgtctacagggaaatcactacttgcactggcactaagcgcactgctgccagccggcgccgcgttggctgcggccaacgacacgctggtctactgttcggaagcctcgccggaatcctttaacccgcaaatcgccagctccggtccttcattcgttgccagctcacaggtgctctataaccgcctgataacctttgatccgcttaaaaacacaccgattccgtcgctggcgaccgaatggaaagtgtccccggatggtaaaacctggacctttacgctgcgtaagggcgtgcagttcaacagcaataagtactttaagccgacccgcgatttcaatgcggatgatgtgctgttctcggtgctgcgccagcaggatccgcagcatccttatcacaacgtgtcgcagggcaattatgaatatttccacgacgttggtcttgataagctgattaaagaagtgaagaagatcgatgattaccacgttcagtttgtgctgagcgagcccaatgcggcgtttctcgccgattgggggatggacttcgcttcgattctttctgctgaatatgccgatgcgatgttgaaaaaagggacgccggaatacgtcgatagctggcctattggtaccggcccctatgcgctgcagcagtacaaagtggattcacaaatccgctatatcgccaatccgcattattgggaaggtgaggtgccgactaaacatctgatcttctccatcacgccgaacgttgagactcgtctggctaagctgcagaccaacgaatgccagatcattcccgcgccatcgccggtacagttcccggtgattaaagggaataaagatctggcgttacacgcggtggaggcgttgaacgtggggtatctggcgtttaatacgcaaaagaaaccgtttgataacgtgctggtacgtcaggcgctgaactacgccaccgacaagcaggcgattgtgaaagcggtcttcctggattccggcaacgtggcgaaatcgccgatcccggccaatatgctcggttacaaaaaggatctgccggattacgactacaatccgcagaaagcgaaagcgttacttaagcaggccgggttggagaagggcgcagaagtgaccctgtggtcgatgccggtacagcgcccgtataacccgaactcgaagcgtgtcgctgaaatgattcagaacgactggagcaaagtcggcattaaagcgaaaatcgtcagctatgagtggggcgaatacctttccggtatgcgcaagggcgagcatgatagcgcgctgtttggctggatgtccgataacggcgatccggacaacttcgctggtacgctgctcagctgtgataatatcaaaaccggctccaacgtagcgcgctggtgcgataagtcctatgacgcgctggtgaaaaaagcgcttctggtgagcgatccgcaggcccgcgacaaactctaccaacaggctcaggaaattttctatcagcaggcgccgtggatcacgctggcgacgggtaaaactttctacgccacccgcagcaacgtcagcggctatagcgtgagtctgatgggaagcgatttttccaaagctaagctgaattga

SEQ ID NO: 88064 - DNA, 1434 bp, Enterobacter aerogenes
atgactataacctgcagcttatatagcggcggccgctggcacgatgccgaaagccgcgccacttttatccgtcgccatccacaaaataacgagacagcctctaccgccgcagcggccagcctcaatgacgcccgttgctgtgcagataaggccgccgccgcattcccttcatggcgggacagcgccccatccgagcgtcgccggctgttgctggaagccgccgcgcaaatgcagcttagagaggcgaaatttattgctaccatggcggcggagaccggcgcgacggcgcactgggccggatttaacgtgcatctggcggcagatatcttacgcgaagctgcagcgctaaccacccaaatagaaggacaagtgattccctctgatgtgccgggtaatctggcgatgggcttgcgtcagggcgcaggcatcgtattggctatggcgccgtggaacgcaccgctgattctggccaccagagccatcgccacgccgctggcgtgcggcaatacggtgattctcaagggctcggaactctcgcccgcgacgcatagcttagtcatcgatgccctcgccgcggcgggctttcccgacggcgtggtgaattatctcacctgctcgccagccgacgcgcctgcgctggtggaaacgctgatcgctcaccccgccgtacgacgcgtgaattttaccgggtcgacccccgttgggcgcattattgcccgcacctgtggagaataccttaaaccggcaattcttgagctgggtggcaaagcgcctctactggtactggatgatgccgatcttcagcaggcggcggcgggcgcgatttttggcgctttcgctaacgccggacagatttgtatgtccaccgaacgcataattgtcgatgagagcatcgcggatgagttcgtcgcattaatcagccaacgcgccgccgcgctgccttctacgcttctcggcccggtggtcgatatgaaaacggtacaacgctgcaacgcgttgattgatgatgcactgaacaagggagctcgtttgctctgcggtggaaaggcggaatcaacgcaaatgcgcgccaccctgctggatggcgtgacgcgtgagatgcgaatatggcatgaagaatcttttggcccggtcaaatcggtgattcgtgtcaacggcgaggaggaggctctggccgtcgctaacgagagcgaatacggcctggcggcagcggtttatagccgcgataccgctcgcgcctggaatgtggcgcagaacctgcaaaccggtatttgccatattaacggccctaccgtacatgatgaagcacagatgcctttcggcggctgtaaatcgtccggctatggccgcttcggcggacgcgcagggatcgctgaattcaccgaacttcgctggataaccatgcaaactcgcccgcgcgaattaccgttctga

SEQ ID NO: 88065 - DNA, 750 bp, Enterobacter aerogenes
atgaacagcttctattcgcatttagccggtgcaacggtccgttggtttgatttccaaggccagggggaccctattgtgttcattcatgggttaggttgcgcctcttcatacgattacccgccagtggtttctaaccctatattgaatgggcgccgggccttactaattgatcttccaggctatggttacagcgataaaccgcttcagtttggctaccgaattgctgaccaggctgcggtcgttgtggagtggctgaacaaattacaggtcagccgctgcattctctacggccatagtatggggggcagtgtggctattgaggcagcgcagcggctgggcaaacgcgttgaggccttaattgtcgccgagcccaatctctatgccggtgggggattctatagctgtaaaatcgccgggcagacggaagatgattttatcgccaacggctatcagtcgatgctggcggaagaaacgtccccatggaaaggttgcctacaaaacagcgcaccgtgggcgttatggcggggagctaccagcctggtagtaggcgcttctccctcgtggtttgagagttttattcacctgcaatgccgcaagacgcttatctacggtagtttatcgctaccctcacaggaagcggaagatgtcgaaactgcgggtatcgcattcgctgttataccacaggcggggcattcgatggcatgggaaaacccggccgcgctggcgcgcgtgattgccgggttgctctga

SEQ ID NO: 88066 - DNA, 174 bp, Enterobacter aerogenes
atgactttataccagaaaatgctggttttttatgccgtaatgggctgtatctgcgcgttgataagctggtttttaactaaggaaagccgttgtattcgcctgctggctgcgttgctgattggtgccacctggccattcagcttccctatggcgctgctggtttctctattctga

SEQ ID NO: 88067 - DNA, 123 bp, Enterobacter aerogenes
atgtcaggaatagcagcgctattaatagcattagttttattggtggtagctatctacagccttctctcttatattcgtgagcgccgccattcgggtttgccttctaaaaaagacaaacgctaa

SEQ ID NO: 88068 - DNA, 1425 bp, Enterobacter aerogenes
atgcaacataaccttttgataaacggtaaattagtggcgggtgagggcgaagtactgccggtattcaatcctgccaacggtgaagcgattattgagattgcggaggcgaccgaggcgcaggtcgatgccgccgtcaatgctgcagatcgtgcgtttgtcagctggagccagacaacgccgaaaactcgcgccgaatgtttactgaaaatggctgacgttattaccgaacatgcagaaacgctggcgaaactggagtctttaaactgcggtaaaccgctgcattgtgttatcaatgacgaaatgccggcgattgccgatgtgtttcgcttcttcgccggcgccgcgcgttgtctgccgggaatggcggcaggagagtatctggaggggcatacttcgatgatccgccgcgatcctgtcggcgtagtggcctcgattgcaccgtggaactatccgttgatgatggcggcttggaagctggcgcccgcgctggcggctggtaactgcgtggtcattaaaccttcggaaatcactccgcttacggcattgaagttggcggagctcgcaaaagatattttcccggccggggtcattaacgtgctttttggccgtggtccaaccgttggcgatccgctcaccggccacagtaaagtacgcatggtttccctgaccggctcgatcgccaccggcgcccatatcattggtcatacggcttcttcgattaaacgtacccatatggagctgggtggtaaagcgccggttatcgtttttgatgatgccgatattgatgccgtcgttgaaggcattcgcaccttcggtttttataacgccggccaggactgtactgccgcctgtcgtatctatgcgcagcaaggcgtctacgatcggctggttgaaaaattaggcgctgccgtggccagcctgaaaatggggcaaccggacgatccgtctacggagctggggccggtgagttctcttgcgcatctggagcgggtgacagcagcggtcaacgccgcacgcgctttaccgcatattaaagtggtcaccggcggcagtcgcgctgcgggtaatggttactatttccagcccacgctgttggctggcgcccggcagcaagatgctatcgtacaacgtgaagtttttggcccggtagtcagcgtcacgtcgtttagcgacgaggaacaagtgttaacctgggctaatgattcgcagtatggtctggcctcctcggtatggacgcaggatgttggtcgcgctcatcgtctgagtgcgcgattacagtacggttgcacctgggtaaacacccatttcatgctggttagcgaaatgccgcacggtgggcagaagttgtctggatacggcaaagatatgtcgatgtacggcctggaggattacacggtggttaggcatgtgatggtgaaacattaa

SEQ ID NO: 88069 - DNA, 807 bp, Enterobacter aerogenes
atgcactctgaacgcgcaccgttgtttctcaaaatcgccacctgggggggagtgatatttctccattttccactgctgattatcgccctgtatgcctttaacacagaggatgccgcttttagcttcccgccgaaggggctgactttacgctggttcagcgaggcggcagctcgtgccgatattattgaatcggtgacgttgtcacttaaaatcgccgccttgtccacggggattgcgctggtgctaggtacgcttgccgccggggcgctgtggcggagcacgttttttggtaagaatgccgtgtcgctgctgttgctgttgccgattgcgcttcccggcattattaccggtctggcgctattgacggcattcaaagccgttaatcttgagccaggggtgctaactatcgtagtgggtcatgcgaccttctgcgtggtggtggtgtttaacaacgtcattgcccgatttcgccggacatcatggagtctggtggaagcatcaatggatcttggcgcaacaggctggcaaaccttccgttacgtggtgctgcccaatctgggttcggcgctgctggcgggtggcatgctggccttcgctctttcctttgatgaaattatcgtcactacttttactgccggacacgaacggacgcttccgctgtggttgttaaatcagctggggcgtccgcgcgatgtgccggtcaccaacgtggtcgcgctgttggtgatgctagtgacgactgtacccatcctgggggcctggtggctaacccgtgacggcgagtataacgccgaaagcggaaaataa

SEQ ID NO: 88070 - DNA, 930 bp, Enterobacter aerogenes
atgacgatggcgcttgtgcaaccgacgaccgggcgagtgtcaggactgttctggcgaaaaccctcattgggcctgtttttactgctgctggggccgttgatgtggtttggcatcgtctatctgggatcgctcctgacgctgttatggcaaagcttctatacctttgatgactttacgatgtcggtgaccacggatttgacgctcactaacctgaaggcgctgttcaatcccgccaactacgacatcattatccgtaccctggtgatggccatctgcgtgactatggccagtgcaatcctggcattgccgatggcctggtatatggcgcgttatacccgcggcaagatgaaagctttcttttatatcgcggtaatgttgccgatgtgggcaagttatatcgtcaaggcctacgcctggacgctattgctggcgaaagatggcgtggcgcaatggttcctcggcaaccttggtctggagagcgtgttaaatatggtattgaccatcccggcggtcggcggcaataccttgtcgacctccgggcttgggcgattcatggtatttgtctatatctggctgccgttcatgatcctgccggtgcaggcggcgctggaacgtctgccgccatcgctgttgcaggcctcagccgatttaggcgcccgaccgcaacaaaccttccgctacgtggtactgcctttagccataccgggtatcgcggcaggttctatctttaccttttccctcacgcttggggattttattgtcccgcaactggtggggccgcccggtttctttatcggcaacatggtctattcgcagcagggcgcgattggcaatatgccgatggcggcggcgttcacgttggtgccgattgttcttattgcactctatctggcgtttgttaagcgcctgggagcgtttgatgcactctga

SEQ ID NO: 88071 - DNA, 1014 bp, Enterobacter aerogenes
atgacgtacgcggtagagtttaatgacgtttcgcgtctgtacggtgacgtgcgcgcggtggatggcgtgagcatcgccattcgcgatggtgaatttttctctatgctggggccgtccggctccggcaaaaccacctgcctgcgcttaatcgcaggcttcgaacagctatccggcggttcgattcgtatttttggccagcctgccagcgaattaccgccatggcagcgcgacgtgaacacggtttttcaggattacgcgttattccctcatatgtcgattatcgacaacgtcgcctacgggctgatggtgaaaggcatgggcaaaaaagaacgccatcttcgcgcccagcaagcattagaaaaagtggcgcttggatttgttcatgcgcgtaaaccttcacagctttccggcggccagcggcagcgggtcgccattgcccgcgcgttggttaatcaaccgcgggtgctgctcttagatgaaccgttgggagcgttggatttaaaactacgtgaacagatgcaggtggagttaaaaaaacttcagcaatcgctgggtatcactttcatttttgttacccacgatcagggtgaagcgctatcgatgtccgatcgcgtggcggtgtttaataatggtcgcattgaacaggtcgactcgccgcacgatctctatttacgtcctaaaaccgcctttgtcgccggattcgtcggcaccgcaaacgtttttacctctgaaatttctcagaggctatgtggcttgtccggcgcctggtcgttgcgcccggaacatatccgcctgaatagcggcggtgatatccaggtacaggggaccgtccaggcggtacagtttcagggcgcgtctacgcgtattgaactgaaactcgctgcgggcgataagctgttagtcagccaggccaacgtcgatggcggggcggcggttggcacaccgcagttggggcagcaggtaatggcctgttggtcgcgttcggcgatggtttccctggaaaacggaggctga

SEQ ID NO: 88072 - DNA, 1146 bp, Enterobacter aerogenes
atgagcaaaaaatttgcccgtggcagcctgtgcgtgctgagtatggtttttgttactgcgcaagccgcagaaccgccgacatcgctggataaaggtgaaggtcggctcgatattattgcctggccgggttatatcgagcgcggccagacggataagaattatgactgggtaagtcaattcgaaaaagagagcggctgccaggttaatgtgaaaactgccgccacctccgatgaaatggtcagtttgatggcgaagggcggctacgatctggtcaccgcatccggcgacgcctcgttgcgcctgattatgggcaagcgtgtacaggcgattaataccgcgctgatccccaactggaaaacgcttgacccgcgagttgctaaaggcgcgtggtttaacgtcggcgataaagtgtacggcacgccctatcagtgggggccgaacctgctgatgtacaacaccaaaaccttcccgacgccgccggatagctggaaagtggttttcgtcaaacaggatttaccggacggaaaaagtaaccaggggcgggttcaggcctatgatggaccgatttatatcgccgatgcggcgctctttgtcaaagcaacgcagccgcagttaggaattaacgatccctatgaactcactgaaacgcaatatcaggcggtgttaaaggttctgcaggatcagcatccgctggttcaccgctactggcacgatgcgaccgttcagatgagcgacttcaaaaacgaaggggtggttgcttccggatcctggccatatcaggccaatggccttaaaggtgaagggcagcccgttgctaccgtcttcccgaaagaaggcgtgaccggctggtctgataccacgatgctgcatagtgaggcgaagcatccggtatgcgcttataagtggatgaactggtcgctgacgccgaaagtacagggcgatgtcgccgcctggtttggatcgctgccagtcgtgccgcagggctgtaaggcgagcacgctactgggagacaaaggctgcgaaactaacggctacaaccaattcgacaagattgcgttctggaaaacgccaattgcccaaggcggcaaatatgtcccttatagccgttggactcaggactatatcgcgattatgggtggccgctaa

SEQ ID NO: 88073 - DNA, 1413 bp, Enterobacter aerogenes
atgaaaaagtatcagcagcttgcgcaacaattaaccgaccagatcgccctcggcgtttggcaacccggcgatcggctgccctccttacgcgaacaggttgtcagcagcggaatgagctttatgaccgtcagccatgcctaccagttactggaaagccagggacgtattatcgctcgtccgcaatcgggttattacgttgcgccgcagccggtgaagcagcgtcaacctgatcccccggcgcaggtgacgcgcaatgaatccgttgatatcaacacctatattttcgacgtcctgcaggccagccgtcaggcgtcgatgctgccttttgcctccgcctttcccgacccgcggctgtttcctctacagcagctaaatcgttctctggcgcaggtgagtaagaccgccaccgccatgagtgtgattgagaacctgccgccgggtaacgatgagcttcgtcatgctattgcccggcgttatgcgttgcagggaatgaacgtatcgccggatgagatcgtcattaccgccggtgcgctggaggcgttgaacctcagcctgcaggcggtgactgagcccggcgactgggtcgtcgtagaaaatccgtgcttttacggcgcgctgcaggcgctcgaacggttacgacttaaggcgctatcggtggccagcgatgtgaaagaggggatcgatctggccgcgctcgaacaggcattgcaaagttacccggtaaaagcctgctggctgatgaccaatagccagaacccgctcggatttacgctgtcggcggacaaaaaagcgcggctggtagcgctattgacgcgctacaacgtcatgttaattgaagatgacgtttacagtgagttgtactttggacgggaaaaaccgctacccgcaaagtactgggatcgtgatgagatgacgctgcactgcagctcattttccaaatgcctggttccaggttttcgtatcggctgggtcgccgctggccgacatgcccgccgtattcagcaactgcaactgatgagtacgctatccaccagttcgccgatgcaactggcgctggtggattatctctctaccaaacgctacgacgcgcatttacgccggttgcggcgtcagcttgccgagcgaaaacagctggcctggcaagcgctactgcgttttttacccgccgaggtcaaaattcaccatagcgacagcggttatttcctgtggcttgagttgcccgccggcgtcgatgctggcgaactcagtgctctggcgttacgggataacatcagtattgcgccgggtaaaatgttttctaccaccgctaactggacctcattcttccgttttaataccgcatggggctggggagaaaaagaggagcagggagtcaaacggctcggcgaacttatacgtcaacttttgccttag

SEQ ID NO: 88074 - DNA, 1398 bp, Enterobacter aerogenes
atgttcggtcttgatgcatttcatctggcgcggatccaattcgcctttaccgtctcatttcatatcatctttcccgcgatcaccatcggtcttgccagctacctggcggtgcttgagggattatggttaaaaacaaaaaatccagtctggcgctcgctataccatttctggtcgaaaatctttgccgtcaactttggtatgggggtggtctcggggctggttatggcctaccagttcggcaccaactggagtggtttctctcagttcgcaggcagcattactggcccgctgctaacttatgaagttcttaccgctttcttccttgaggccggtttccttggcgtgatgttatttggctggaaccgcgtcggccccggcctgcattttttcgccacctgcatggtggcgctgggcactatcatttccacattctggatccttgcctcaaacagctggatgcaaacgccacaagggttcgaaatcgttaatggtcaggtcgtacccgttgactggttcgccgttatctttaacccctctttcccttatcgcttattccatatgtccgtcgcggcgtttcttagcagcgcattgttcgtaggcgcatcagccgcatggcatttgcttcgtggcaaccacacccccgccatccgtgcgatgttctctatggcgctatggatgacgctgcttgtcgcccccattcaggcaatgatcggcgatatgcatgggctaaataccctgaaacatcaaccggcgaaaattgccgccatcgaaggccactgggaaaatccgccgggcgaaccgacgccgctgctgctctttggctggccggatatgcaacaagaacgtacccgctatgggctggagatccctgccctcggcagcctaatcctgactcacagcctcgataaacaggtaccggcgctgaaggagttcgctccggaagatcgccccaactcaaccgttgtgttctggtcatttcgtctgatggccggactgggaatgttaatgattctgctcggcgtcattgccctatggctgcgctatcggcagcgtctgtatacctcaaaacctttcctgcgcttcgcgttatggatgggaccttccggcctgattgcgatacttgctggatgggtgaccaccgaagtcgggcgccagccatgggtcgtttacggtatacagcgcacctccgaggccgtatcagctcacggtgatctgcatatgaccattagcctgctggcatttattgccgtctacagctcggtattcggcgttggctatagctatatgctgcgcctgatccgcaaaggtccgcaagagcagacgcctgtgccatcaggtacgccggcgcgtccgctttctgccgcgacggatggttttcagcacaaggagtcccgctaa

SEQ ID NO: 88075 - DNA, 1011 bp, Enterobacter aerogenes
atgggtattgatttatcggttatttggtttgttatcatcgtgtttgccaccctgatgtatatcgtcatggacggtttcgacttagggatcggcattctgtttgccgccgtacgcggcggcgatgagcgcgacgtgatggtcaacagcgtcgccccggtatgggatggcaatgaaacctggctggtgcttggcggcgctggtctcttcggcgcctttccgctggcctatgcggtgattatcgacgcgctatcggtaccgttaaccctgatgctgattggccttatttttcgcggtgtggccttcgagtttcgcttcaaagcgaccccttcgcaccgtcctttctgggataaagcttttctgggcggatcgctactggcgacattcacccagggcatggtcgtcggcgcggtcattcatggttttccggtcagcggtcgcagctttaacggtggaatgtgggattggctgacgccatttaccctattctgcggtttcggcctcaccgttgcctacgcgttactgggcgccagttggctggtaatgaagagcgagaatccgctgcagaatatcatgcgcagaacttcacgccttctgctgctggccttactggtgataatagccgtgattagcctgtggacgccgctctcccagccagcgatcgccgagcgctggtttagtctgccgaatctgttttacctgctgccggtgccgctattggttatcgccatcagcgcctggttatggcgcacccttgggcaacgagatgctcacgccctgccattcgtgttgacgctggggctcgtcttccttgggtttagcggacttgggatcagcatttggccgaatattattccgccagggatttcgttatggcaggccgcggcgccgccgcaaagtcagggctttatgctggttggcgcgttactgattattcccgtcattcttgggtataccttctggagctactacgttttccgcggcaaagttcaaactggcgagggatatcactga

SEQ ID NO: 88076 - DNA, 126 bp, Enterobacter aerogenes
atggagcattcatggataaaacgtctgctatggctggcagccatatggggcgctagcgtgctggcgctgggcgccgtcagtatgattttccgcctgctgatgaacgccgccgggcttcgtgcctga

SEQ ID NO: 88077 - DNA, 237 bp, Enterobacter aerogenes
atgtggcggagaggaatagcggcagtggtattgatgtgtgggttattttccgggcatctgctcgcccagcgtcaggggcatgattatttcccggtgcaaagcctcgaacagcggttactgcacgaggctgattgcgatgaactacgcagccgggctgaggacacctccagctcgctgcgcgaacattatcaccggcagtacgcgcgcaaagcaaaggcgcataactgcccgccgtga

SEQ ID NO: 88078 - DNA, 1962 bp, Enterobacter aerogenes
atgcgcctgcaaaaccatcatcttgaacttcttagtcctgcccgcgatgccgggatcgcccgtgaagcgattttacacggcgccgacgcggtctatatcggcgggccgggcttcggcgcgcgccataatgccagcaatagcctgagcgatatcgccaacctggtgccgtttgcgcatcgctttggcgctaaggtgtttgtgacgctgaataccattcttcatgatgatgaactggaaccggcgcaacgtctgattaccgatctgtacgagaccggcgttgatgcattgatcgtgcaggatatggggataatggagctggatctgccgccgattgagctgcatgcgagcacccagtgcgatatccgcagcgttgagaaagcgaagtttctctctgatgcgggcttcagccagattgttctggcccgcgaactcaacctcgatcaaattaaagcgatctacgataataccgacgcgactatcgagttctttattcacggcgccttatgcgtagcctattccggtcagtgctatatttctcacgcgcaaaccggacgtagcgccaaccgcggcgactgctctcaggcttgccgcctgccttacaccctgaaagacgatcaggggcgcgttgtggcctatgaaaaacatctgttgtcgatgaaagataacgatcagaccgccaacctggcggcattgatcgacgccggcgtgcgctcctttaaaattgaagggcgctataaagatatgagttatgtgaaaaatatcaccgctcactatcgtcagatgctggatcgtattattgaagaccgcggcgatctcgcgcgttcttccgccgggcgcacagaacacttcttcgtgccgtcgaccgataaaacgttccatcgcggcagcaccgactattttgttaacgcgcgtaagggcgatatcggcgcgtttgattcgccgaaatttatcggcctgccggtaggcgaagtattaaaagtcggaaaagattatctcgatgttgaagtgactgacgcattgacgaatggtgacggcctcaatgtgatgatcaaacgtgaagttgtcggcttccgcgccaatacggtgcagaaaacgggggaaaatcgttatcgcgtctggccaaacgaaatgccggcagatctgcataaagtgcgtccgcacgaggcgcttaatcgtaacctcgaccataactggcagcaggcgcttctgaaaacttccagcgagcgccgcattgcggttgatatcgcgctgagcggctggcaggaacagctggtgctgaccatgacctgcgaagacggcgtcagcgtcacgcatacactggatggcgaattcgccgaagcgacccaggcggaaaaagcgctggccaatttacgtgatggcgtggcgaagctcggccagaccatttattacccgcgtgatgtgcagattaatctgccggcgctgtttgtgccgaacagtatgcttaaccaactgcgccgtgaaaccgcagagatgctcgatcaggcgcgcctcgatgcctggcagcgcggaacgcgtaaaccggtctccgtaccaccgccggtgtatccggaaacgcatctgtcgttcctggcgaacgtttataaccacaaagcgcgcgctttctaccagcgctatggcgttcagctgatcgatgcggcgtatgaagctcatgaagagaaaggcgacgtgccggtgatgatcaccaagcattgcctgcgattcgccttcaacctgtgtccgaagcaggccaaaggttcgataaagagctggaaggcgacgccgatgcagctgattcacggtgacgaagtgttaaccctgaaatttgattgccgtccgtgcgaaatgcacgtggtgggtaaaatcaaaaatcatattctcaaaatgccccatccgggcagcatcgtcgcctccgtcagtcctgacgagctgatgaaaacgctgcccaagcgtaagggcgcgtaa

SEQ ID NO: 88079 - DNA, 546 bp, Enterobacter aerogenes
atgaatattgcgcaacatctggcaacgacgctgaaaagcctgcgtcagcagcgcggctggagtttgtcgcggctggcggaagaaaccggggtatcgaaagcgatgctcgggcaaattgaacgtaatgaatccagtccaacggtcgcgacgttgtggaagatagccaccggccttaatgtggcgttttcgacgttcatcgttgccgatgagacggctgcgcccgccgccttcgacccgcagcagcaggcgatggtagtgacgccgatttttccctgggatcctgagctacgttttgaccatttttcaattaccctcgccccaggcgcgctgagcgaatcgacgccgcatgagaccggcgtcattgaacatgtcgtggtcattagcggttcgctggatttatgtctgcaggggcaatggcagacgttgcaggcgggagaagggcggcgctttgccggcgacctgacgcacgcttaccgcaatagcggcgcgcagacggcgcactttcattcactgattcattatccaaaagaaaaagccgcggactaa

SEQ ID NO: 88080 - DNA, 1167 bp, Enterobacter aerogenes
atgcgctcctttacccttcccatccccacgctgctcgcgggatttgtcgccgtgctggtaggctatgccagttctgccgccattatctggcaagcggccgccgccgctggcgccgatgccgcgcaaatagccggctggatgaccgcccttggcctggcgatgggcgtcagcacgctggtattaacgctatggcgtaaagtccccatcctcaccgcatggtcaactccaggcgcggctttactggtcagtggattacagggagcgacgctagcgcaggcggtgggaatatttgttttcgccaacgcgctgatcctgctatgcggcgtgacgggactgtttgcccgcctcatgaagatcattccgcattcgctggcggcggcaatgctggcggggatcctgttgcgttttggtctgcaggcatttggcagtttgcaggataatctcccgctatgcggcgggatgttcgccgcctggctgttatgcaaagcgctctacccacgttttgcggtcgttgcggcgttagtggcaggcgggatcattgccctgctaaccggcgcgctgtcgccagtggcaaacgatatggtttttgttgctccgcagtggattacgccgcagttcaccccttcgctactgctcagcgtcggtgtaccgtttttccttgtcaccatggcgtcacagaatgcgcccggcctggcgaccattcaggcatcaggctatcgggttccggtctcgccgctaatcgtatttaccggcgcgctggcgttgttattctcaccatttggcgtctattccgtgtgcatcgccgccattaccgccgcgatctgccaaagtccggatgcgcatccggatgcggataagcgctggctcgccgcagcggcggccggtgtgttttatctattggcggggctatttggcggttcgataaccgcgcttatggcggcgctaccgccggtgtggatccagatgctggcggggctggcattgttaggaaccattagcggcagcctctatcaagcgctggggcaagaaaacgagcgcgatgccgcagtggtaacctttttagtcaccgccagcggcgtctctctggcaggcgtcggctcggccttttgggggctggtcctcggcggtatcagctatatgctgttaaccacgctgcgccgcacgtag

SEQ ID NO: 88081 - DNA, 879 bp, Enterobacter aerogenes
gtgaaggctatggcatacgggacgttcgaaacattacaacaacaaaatgcggtgctgcgggggaccgtggaactcaattccgggatccagcttgccgcgtggtacaacgaccttgaccggatcacggtgcgcagcgaccaccacacgttgagcctgtatgtcgccgatggttacgaaagctaccaaaaaacaccgtacggctggaagaatggcggcgggccggaccgtttttgtctgatgccaaagggcgatgaaagcacctgggatattcgcggcgatctctctttcgttcatctctattgcaccgatgagcacctgcgtcgcgtcggcgagcaaatttgggatcgcagcccggcgtctttcaccttgcaggaaaaaacctttgccagcgatgacaaaattaccgcggtgtatcgtcagtttctgcttgataacgactggcgccagcaggctaatcaactgctattaagctccgccagtacgttgctgttaacacatctgattcaaaactattcgaacgtgcagtggcgcctgccgacggttaccggtggcctggcgccgtatcttttgcgtaatctgttggcgtggattgaggagcatctcgagcagccgcttacgcttgccgatcttgccgcccaggcgtcacttagcgagtaccattttgcgcggatgttccgccagtcaatgaatatggcgccgcaccagtatgtgatgcagcggcggatgatcaaggcgcaaaatctgatttgccatactcaacagccgttgaccgagattgcgctggcctgcggatttagctccgccagccactttagccaccgggttaagagcgccacgggtcttacgccaagccagctacgtgcggcgcagcgtggttaa

SEQ ID NO: 88082 - DNA, 897 bp, Enterobacter aerogenes
ttgaacgcattactctacgggctggtggtggttatctggggtaccacatggattgcaatctttttacaacagggccccgtcgccgcgccggtatcgattttctggcgttttgccgtcgccagcgtcaccatgctgacaattttgctgatgacccgccgcctgcgcccgctggcgatgcgcgatcatctcttttgcatgctgcaaggctgctgcgtcttttgctttaacttctggtgtttttataccgccgcggcgcatatcaataccggccttgagtcggtgatcttttcgatggcggtattatttaacgcgatcaacagttttattttcttccgccagcagcccccgggccgcttttggctggcagcggcgctggggcttgcaggaattgtcaccctcttctgggacgatctcctcgccaatggtctgaacgcgtcgctgctgtggggaatcggcctgagcgccctgggaacgtacggtttttcattgggcaacatgctgagtattcgtcaccaacgccacgggcttgagacattgaccaccaatagctgggccatgttttacggcaccctggtcatgggcgcgatcgcgctgctgcgcggcgataactttacgccgcagtggacctggagttatatgggcgccctgctgtatctggcgttgttcggttcggtgatcgcgttcggcgcttatttcactctggtaggccgtatcggggccagcaaagcggcctatagcacgctgcttttcccactggtggcgttaactatctccaccttctacgaaggttacgtctggcatagcaatgcggtgattggtctggcgttaatactggtaggaaatctggtgatgttcgcccgccccgaacagctgtttatgcgccgccggctggcttaa

SEQ ID NO: 88083 - DNA, 669 bp, Enterobacter aerogenes
atgcgtacaaaaatgttatttaaagtagccgctctggccgggctactggcattaactggttgtgcatccaaactggcgcaaccggagcagtattccgggtttttaaaagattattctaagttaaaagagaccacttcggcttccggcaaaccagaactgcgctggatctccccggactacaatccgagcaactatgacaacgtcgtctaccgtccaatcacctactacccggtgccgaaaccaacgacccaggtaggggagaaagcgctgcaggacatcctcaattacaccaacaagcagatgaaacaggccatcagcgaacgtaagccgttggcgaccacggctggcccgcgcagcctgattttccgcggcgcaatcaccggtgttgataccagtaaagaagggctgcagttctatgaagtgatcccggtggcgatgattgtcgcgggtacccaggcggcaaccggccatcgcacgatggacacgaatctctacttcgaaggcgaactgatcgacgcgaagaccaataagccggttattaaggtagtgcgtaagggcgaaggtaaaacgctgtctaatgagagcacgccgctgaccgctgatacgttgaagcaggtgattgatgatatggcgatcgatgcggtgaaattcgatccgtcgcagaagtaa

SEQ ID NO: 88084 - DNA, 1593 bp, Enterobacter aerogenes
atgcaacgcacatctacttcaatagctctgacgatagcggcattagcggtgagttccgccgtgaatgcgaaaacactggtttattgctctgaaggctcgccggaaaactttaatccgcagctttatacttccgggaccagcgtcgatgccagcgcggtaccgatatataaccggctggtggactttaaagttggcaccacggaattgcagcccagcctggcggaaagctgggaggtgagcgaagatggtaaagtttatacttttcacttacgcaaaggcgttaaattccaaagtaataaatattttaaaccgacccgtgattttaatgctgatgacgttattttttcgtttatgcggcaaaaagatccgaataacccctatcataatgtctctaatggcaactactccaattttgaaagcctggagtttggttcgttaattaccgcaattgataaaccggatgaatatacggtgcgttttaccctcgcgcaccccgaggcgccttttgtcgctgacctcggctggtattttgcttcaatcctctctgcggaatatgccgatgcgatgctaaaagccggaactccggagcgcgtcgatatggatcccatcggcaccgggcctttcaagctggcgcaataccaaaaagattcgcggatcttgtttaccgcatttcctgattactggcagggaaaagcgaaaatcgatcgtttagtatttagtattacgcccgatgcctcggtgcgttacgctaagcttgagaaaaatgagtgtcaggtcatgccattccccaatcccgccgatttaccgcggatgaaaaagaacccgcagatcaatctgatgaacaaagccgggcttaataccggtttcctcgccttcaacacgcagaaagcgccgctggataatgtgaaggtgcgccaggcgttggcgatggcgatcaacaaaccggcaattatcgatgcggtgttccacggtaccggtacggtagcgaaaaacctgctgccgcccggggtctggagtgccgatgccgatctgcaggactacagctgggacctggaaaaagccaaagcgctgctgcgtgaatccggtgtgaagagtcccatcaccatcgacctgtgggcgatgccggttcaacgcccctataatccaaatgcgaaacggatggcggaaatgatccaggctgattgggctaaaatcggcgtgcagaccaaaatcaccacctatgaatggggcgaataccttaagcgggtgaaagacggcgagcatcaggcggcgttgatgggctggactaccgcgaccggcgacccggataacttctttggcccattatttacctgccagtcggccaacggcggttctaattcggccaaatggtgctatgcgccgtttgataaaattatcgccgaagctaaaaccatcaccgaccggccgcaacgagaagctttgtataaacaggcgcagcagatgatgcacgatcaaatgccggccgtgatgattgcacactcaactatttttgaaccggtgagtaaatcggtgaccgggtatgaaatcgacccgtttgggaagcatattttttatcaggtggacgtaaaataa

SEQ ID NO: 88085 - DNA, 1230 bp, Enterobacter aerogenes
atggcctcgcccttaaccagacaattaacccagcgcttctttcgctatctggctatcaccagccaaagcgatccacgagcaaccacgttacccacaacgcccggacaacatcagatggcgcaggcgttagccgacgagctacgtcagtttggccttgacgatatcgttgtcgacgagcatgcgaccgtcacggcggtaaaaaaaggcaccgtccccggtgcgccgcggatcggctttatcacgcatattgataccgttgatgtcggactatcgccggatattcatccacaaattctgcgatttactggcgaagatctctgccttaacccggaacagcaaatctggctgcgggttgacgagcatccggaaatcctggcctatcgtgatgaagagattattttcagcgacggcaccagcgtactgggcgccgataacaaagcagcggtgaccgttgttatgacgctgctggaaaacctgaccgccgaacataagcatggtgatatcgtcgtggcgttcgtcccggacgaagaagttggccttcgcggggcaaaagcgctggatttatcgcgttttgccgtcgattttgcctggaccatcgactgctgcgaactcggcgagatcgtttatgaaaactttaacgccgcctctgcggagatacggtttaccggcgtaaccgcacacccgatgtccgccaaaggcgtattggtcaatccgctgttaatggctaccgacttcatgagctatttcgaccgccagcagacgccggagcacaccgccgggcgcgaaggctacgtatggtttaacggtattcatggcgatcagaacagcacaaggttgcaggctaatattcgcgatttcgatctggacagctttaaccgccgtaaacaacagattggcgaagcggcagagaaaatcgccgcccagtaccctactgccagggttgaattcactatcagcgatacttacagcaatatcagtaacgccattggcgaagaccgccgggctattgacctgatgttcaccgcgatggaaagcctcggtataacgccaaaacccacgccaatgcgcggcggtaccgacggcgcagcgctctcggcaaagggtctgctgacgccgaacttcttcaccggcgcgcacaatttccattcgaaattcgaatttttgccgctgcgcgcctttgaggcctcctatcttaccgccctgcaactctgcctgctggcggcggattaa

SEQ ID NO: 88086 - DNA, 597 bp, Enterobacter aerogenes
atgacgactcgtgacgaaaactactttactgaaaaatatggcctgacgcgcacccactcagaagtggtgtatgccgcctcgctgatgcagccgggacagacgctcgaccttggttgcggcaatggacgaaacagtctgtatctggcggcaaaaggttacaacgtcaccgcgtgggataaaaatcccatgagtatcgataatctggagaacattcgtcaggccgaagggctggagaacctgcagactgcgataaaagatctgaatacgctgagctttgatggcgagtatgattttattctttctaccgtggtgatgatgttcctggaagccaaaaccatccctggtctgatcgccaacatgcagcgctgcactaagcctggcggctataacctgattgttgccgcaatggataccgaagattacccttgtaccgtgggcttcccgttcgccttcaaacctgaagaactgcgtgactattatgctggctggcagttcctcaagtacaacgaagacgtcggcgaactgcaccgcaccgacgccagcggaaaccgcatcaagctacgcttcgccacgatgctggcgcgtaaaccggcttaa

SEQ ID NO: 88087 - DNA, 999 bp, Enterobacter aerogenes
atgaataaacacgtaacgggcggccaggtgctgaatctaccggctggctattttggtatggtgctggggataataggcatgggcttcgcctggcgttatgccagtaccatctggccggtgagcagtattattggcgatgcgctggtggtgctggcgacaactatctgggcgctattaatgatagcgtttattgcgcgggctattcgtttcccgtggagcgtgcggcaggagatccgtcatccggtggccagcagttttgtcagcctgatcccggcgacaacgctattggtgtcgatcgcttttgcaggctggtatcgcccgttgtcgctggcgttatttgctgcgggggttacgctgcagctttgctatgcggcctggcagagcgccgggttgtggcggggtaaacatccgggagaggcgacgacgcccggtttatatctgccgaccgtcgccaacaattttatcagcgccatggcctgcggcgcgctgggatttaatgatgccggactggcgtttctcggcgctggcgtcttttcctggctcagcctggagccggttatcctgcagcggctgcgcagcaacggcgagctaccggcggcgttgcggacgtcgctgggcatccagctggcgccggcgctggtggcctgtagcgcgtggctcagcgtcaatggcgacgacggtgatacgtttgccaaaatgctatttggttatgggctgttgcagttgctatttatgctgcgcctgatgccgtggtatctgcagcagccgtttaatgcgtcattctggagcttctcgttcgggatttccgcactggcgaccaccggcctgcatctgggtcacggccagccgcacggatttttccatactctggcgatccccttatttatttttagtaacctgattatcggcctgctactgctgcgtacccttcttctgctggtgcggggtaaactgttaattcgcgtagaccgtgccactttattgccaaacaaggattaa

SEQ ID NO: 88088 - DNA, 981 bp, Enterobacter aerogenes
atgaagaaatatcgtctgagcgaccacgtccgcctgtatcactttgaagaagacggaattaaacatagcgtaactctgcggcaaatcgtggcgctgattgatttctcggacgttaaggccggtagcgaaggcggctggcttgatgatgaagccgcgttaagccagggcggcgactgctggatatatgatgccaatagcgtcgtcttcgctggcgcgcgcgttgacgacaacgcccgtctgaccggcacctgcgtgataagccacggggcgacaattagcgacaacgcctggcttgataatgttgaggtaagtcacggcgccaggataagtgacaacgtcactataaaacaatcgcaaatccgtggcgtctgccgaatcgccgaccaggcgcgtattctcccccactgtctggtgattgccgctcagggactcacttctgatatcgacaaagtgctgcaaatatatcagcgcgccacggtcagcgcctcacggattgttcaccaggcgcaaatctacggcgatgccgtggttgagcatgcttttgttgaacaccgtgccgaagtgttcgataacgcacgtattgaaggtaatgaaaataacgatgtatggatctgtgacaacgcccgggtctacgatcgcgcgcggctggtcgccgggcgcggcgaggatcagatcccaaccctgcgctacagttcccaggtgggcgaaaacgccgtggtcgagggcaactgcctgttaaagcatcgtgtcatggtcggcgggcacgctcatcttctcggcgggcccattctgctggatgacgaggtccttatcgaaggacatacgacgattcgaggcgatgtgattatcgaacatcaggtagaaatctgcggtaacgcctgtatcgaagcgctggagggtgacagaattcatcttcgcgggcgaaaaatcgtgagcggcgacgagcatatcacccgtacgccgctgctgggttcgctatag

SEQ ID NO: 88089 - DNA, 561 bp, Enterobacter aerogenes
atgactgccgaaaacagccccatcatcgaaactatcccggtcaacgaacagctggagctgcgtgcggttgacgaacgttacgtcagcgaactccatcaattggtgctcaaaaaccgtgactggctgcagcatgctttaagctggcctgcggaggtgttgagtgaagatgaaacccggcgccacgtgcagggaaacgtgatgctgcaccagcgcggttatgcaaaaatgttcctgctgtttttacaggggcagatgatcggcgtcctgtcatttaaccagattgaaccgttgaacaagacggcctatatcggttactggatcgatcaaagccatcaggggcagggactgttgtcgcaggcgttacaggcgtttatccatcattatgcgcaaacgggcgccgttcgccgtttcgttattaaatgccgggtcgccaaccagcgcagtaatcaggtggcgctgcgtaatggtttccaactggaaggttgtctgaagcaggccgagtttttaaatggcgcatatgacgatcagaatatctacgcgcggattattgacccgcaataa

SEQ ID NO: 88090 - DNA, 1656 bp, Enterobacter aerogenes
atgaaccgcagacgttttcttaaatcatccatggctgttgccgccgtatgcggaacgtcaggagtcgcctcgttattcactaaagcggctttcgccgcggattctgccatcgccgatggccagacgcgccgctttgacttctccgtcctgcaggctatggctcatgacttagcccgccagccgtggggcggcgcgccgcgtgacctgccgccgacattggcgaatctgacccctcaggcctataacagcattcagtatgatgcggcgcattcgctgtggaataacgttgaagagcgcaagctggatatccagtttttccatgttggtatgggtttccgccgtcgggtgcgtatgttctcgctggacgcccagtctcagcaggcgcgggagatacacttccgtccggagctgttccagtacaacgacgccggcgttgataccaaacagctggaagggcagaccgatctcggtttcgccggttttcgcgtgtttaaggcgccggaactggcgcgccgcgatatcgtcgctttcctgggcgccagctacttccgcgcggtcgacagcacttaccagtacggcctgtcggcgcgcggtctggccgttgacacctttaccgataccccggaagagttcccggatttcacgtcattctggtttgaaaccgtcaaacctggcgcgacggtgttcactgtctacgcgctgctcgatagcccgagcgtcaccggcgcctataagttcaccgtgaattgccagcaaacgcaggtgatcatggatgtcgaaaatcatctctatgcgcgcaaggacattaagcagttgggcattgcgccaatgaccagcatgttcagctgcggtaacaacgaacgccggatgtgcgataccatccatccgcaaatccacgattctgaccgcctgtcgatgtggcgcggcaacggcgagtggatttgccgtccgctgaataatccgcaaaagcttcagttcaacgcgttccaggataaaaacccgaaggggtttggcctgctgcagctggatcgcgatttcagtcattatcaggatgtgatgggctggtataacaagcgcccgagcctgtgggtggagccacgtaatcagtggggaaaaggggccgttagcctgatggaaatcccgaccaccggcgaaacgttggacaatatcgtctgcttctggcagccggaaaaaccggtaaaagcgggtgatcaactggactttagctaccgcttgtactggagcgcgcagccgccggtacgctctccgctggcgcgagtgctggcgacacgcaccggaatgggcggcttcccggaaggatgggcgccaggtgaacactacccggacaaatgggcgcgccgctttgctatcgattttgttggcggcgacctgaaagccgcggcgccgaaaggcattgagccggtgattacgctctccagcggcgaggctaagcaggtagagatcctctacgtcgagccgtttgacggctatcgtattctctttgactggtatccgacttcagattccaccgatccggtggagatgcgcatgttcctgcgctgccgtggcgacgctatcagcgaaacctggctgtatcagtacttcccgcctgcggcggatcggcgtaactatgttgatgaccggattatgaaataa

SEQ ID NO: 88091 - DNA, 1089 bp, Enterobacter aerogenes
atgaaagtaaaagccgccgtgacgttgggttatcaacaaccatttagcattaaagatattcaggttagcgcacctaaaaaagacgaagtgatggtaaaaattgtcgctacaggcgtctgtcataccgacgcggtgatccgcgataacgccgggatcctgccgatgcccgccatcctgggccacgaaggcgcaggtatcgtggttaacgtcggtgatgccgttcgtggggtcgaaattggcgatcatgtggtactgagctacgccgcctgccatcactgtgaaaactgcctcaccaaccatccttccgcgtgcgaaagtttcaatgacttaaactttggtggacgcttagacgatggcaccaccccttatcgtctggatgatcaagaattatccgtcttcttcggccaatcttcgtttagtcagtatgtggtcaccaaagcgacgaatgctattgttgtcgaccgtgatgtcgaactttcgcttcttggtccgctgggttgcggaattcaaaccgggagcggcacggtgttaaatcgactaaaaccggtggccggggaatcgttagtggtattcggctgcggcgcggttggtttaagcgccattatggctgcaaagctcaccggctgtagccaaatcatcgccgtcgatattcacgcgaaccgccttgagctggcacgtgaactcggcgcaacccacgtgatcaatggcaaacaggaagatagcgttgcggttattcgccaactgaccggtaaaggggcgcactacgccatcgaaacgaccggcgtcgccgccatcgttctgcaggcgatccacgcgattaagccgttaggcacggtggcggtcgtcggctttaccggcgatatcacctttaatgtgcaaaacgatctgatggcggaaggtaaatcattgataggggtaattgaaggcgacgccgtaccgcagctgtttatcccacagctggtacagttttataaacaagggaaattccccattgataagcttatcgagttctatccactcgaagagattaatcaggctttcgcagattcagcttccggtaaagtcatcaaaccggtggtgctgatgtaa

SEQ ID NO: 88092 - DNA, 774 bp, Enterobacter aerogenes
atgaaaataaaagccctaactctagctttgggaatgctgtgtaccgtatcaagctttgccgccagcgagttgcgctacggcgtggaagcggaatatccgccgttcgaaagccgcaacccggcaggagagctgcagggttttgatattgatctcggcaacgcgatttgtcaggccgcgcagttgaaatgcagctgggtcgaaacctcctttgatgcgctcattccgggactggtggcgaagaaatttgatgcgattaactcggcgatgaacattaccgagcaacgtcgcaagagtattgatttcacccagccgatctaccgtattccttcacagctggtgggcaaggccgacagcggtatgcaggcgacgccggaagggctgaagggcaaaaccatcggcgtgctacagggctcgattcaggagacctttgccaaagaacactgggaaaaacacggcgtcacggtagtttcctacaaagaccagaacatggcgtgggccgatcttcttaacggccgtatcgacgcctcgctggtgatgtctgccgccggtcaggccggattcctcagtaagccgcagggtaagggattcggctttatcggtaagccggtggctgatgatacgattctgggcagcggtattggctacggcttgcgcaagggcgatgaggcgaccaaaaaacagctcgacgcggcaattgataaagtgcgcgctgacggcactatcacccgtctggcggcaaagtacttccccggtatcgatgtcactgtgaaataa

SEQ ID NO: 88093 - DNA, 1170 bp, Enterobacter aerogenes
atggctcttagtgcttcggtcaccacccgctcgaaattgccggatgtcggcaccacgatttttaccgttatcggtcagctctccgcgcagcataacgcgattaatctttctcagggcgcgcctaactttgcctgcgacccacagctggtggccggcgtgacgcaggcgatgaccgccggacataaccaatacgcgccgatgactggcctgcgggccttaaaggagcgtattgctgataaaatcgccacgttgtacggcacgcaatatgatgtcgatagtgaagtgttggtcaccgccagcgccagccaggggatctattccgccattggcgggctggtacatgctggcgacgaggtgatttactttgagccatcgtttgatagctatgcgccgatcgtgcgtctgcaaggcgcgaccccggtggcgattaagctcaccgtgccggatttcgctattaactgggacgaggtacgcgccgcgattaccccgcggacgcggatgatcatcattaatacgccacataacccaagcggccaggtattatccgccgatgaccttaatcaactggcgatgctgatccgcaataccgacattgtggttttgtccgacgaagtctacgagcacgtagtcttcgatggcgaaaagcatcacggcatggcgacccatccgcagctggcggaacgcagcgtgattatctcttccttcggcaagacctaccatgtgaccggctggcgcgttggctactgcgtggcgccagcagcgctaatggatgagatctgcaaggtacatcagttcctcatgttttctgccgatacgccgatgcagtacgcttttgcagagcatatgcagaacccggcttcatggctgtcgctggccgctttttatcagcaaaagcgtgatttgctccagcaactgctgcaagactcgccgttccgcttattgccgagcgccggctctttcttcatgctggcggattatcgccatttcagcgatgagcatgacagcgagatggttaagcggctgattaccgaatacggcgtcgccacgattccgttatcggcattttataccgatggtactgataacaaactgattcggctctcttttgccaaagatgaagccacattgcgggctggcgcgcaggcgctgtgccgcgttaagccgcgttaa

SEQ ID NO: 88094 - DNA, 1347 bp, Enterobacter aerogenes
atgtttattacgccagcgtatatcgcgttatttttaatcgcatcatggggactttttaaactcgaacaaaaaagccactcgttatcaaaaagcgtttttatcgccatctttctcggcgcccttctcggattatcactccatttcattgccaacgaaccgcgaaaaacggtcattgattggtacagtatcgtcggcaacggctatgttaatttgctgaaacttgtcgcggttccgctgattttcatttcaattctgtcagcgattaataaactcgaaaatagcgccggtattggccgaatgtccttaaccattgttgcctgcatgctatgtctggtgatggtggcaggctgggtcggactgtttaccgttgatttactcggccttaacgccagcgcttttagccatatgcaatcgacgctgaccgccgaagacgtcagcaaaaccgcagccgtttcgttaccccaactggtcacttcactgatcccgacaaatatttttctcgacctgactggcgcgcgcagcgtatcggttatcggcatcgttatatttaccctgctggccggagtcgcgttattgaaggtgaaaaaagaggcgccggaggaaggtcaaaaactaagtagcgggattaacgcgattcaaatttgggtgatgaagatggtgcgtatcgtgatagcgctgacgccatatggcgtcctcgcattgatggcaaaagtcttttcgacctatcagctagcgcaattcaccagcctgcttggctttattgccgcctgttatctggcggtcgctatcatgtttatcgtgcatgcgattctgctgctcgttagcggtcatcatcctctgcgctactttaaaacggtgtggccggtgctcaccttcgcttttgtttcccgcagcagcgcggcttcgattccattagccattaccgcacaggaaaaattcggcgtgccgaataccatcgccaatattgccgcctcttttggttccagtatggggcaaaacggctgcgccgggatctatccggctatcatggtggccatgattgcgccaacgctgggtatcgacccactgtccttctcgtttttagccagcttacttccggctatcgcgctgggctcaattggcgtcgcaggcgtcggcggcggtgggacatttgcggcgttgattgtcctgtctacgctcaacttcccggtggcgctggtcggcatttttatcgccatcgagccaattgtcgatatggcgcgtaccgcgctgaatgtgaatggatcgatgatgtcgggcgtactggcatcgcggctattgaaacatcaaaatgcaaagtcgcaccatgtcgcctcaataagtgaataa

SEQ ID NO: 88095 - DNA, 624 bp, Enterobacter aerogenes
atgtctaaaccttacgttcgtctggataaaaatgatgcggcagtattactggttgaccatcagaccggcctgctctcactggttcgtgatatcgagccggataaattcaagaacaacgtccttgccctcagcgatctggctaaatactttaaactaccgactattctgaccaccagttttgagaatggccctaacggcccgctggtgccggaactaaaagaacagttccccgacgccccttatatcgctcgtcccggcaatattaacgcctgggataacgaagatttcgttaacgcggtaaaagccaccggtaagaaacagctgattattgccggtgtcgtcactgaagtgtgcgtggccttcccggcgctgtcggcgattgaagagggattcgacgtctttgtggtgaccgacgcgtccggtacctttaacccgatcacccgtgatgcggcgtgggatcgtatgtcgcaagcgggcgtgcagttaatgtcgtggtttggcgtggcctgtgagctgcaccgcgactggcgcaatgatattgaaggattgggcaccctgttctccaaccacattccggattaccgtaacctgatgaccagctttaacctgctgagcaagaaataa

SEQ ID NO: 88096 - DNA, 897 bp, Enterobacter aerogenes
atgtcgcgtagcgccctgccttttcataccgtagaaacgtttctgataaccgcgaggcatctcaacctaacccatgccgcacaggagctatgcctgacgcagggggcggtcagccggcagatcgccgcgctggagagctggttcggcttcccgctatttgaacgccacgcccggggcctgcgactgtcaccacagggcagcgcgctttatccggagctacagtcggcattcggccgcctgataacggtggccgagcaggcgcgccagcagcaaactgtcgtgcgcctgaaagcgcctacctgcgcgatccgctggctggtgccgaaactactggagatagaacaacgttatccggaactgcaggtggcgttgaccaccaccaccgagcataacgtcaactttaagactgaaccctacgatgcggcgattatctttggcacccatcagagcgccggcgatctgctgtttgaagaagccctcacgccggtgaccagtcccgatacgccatgcgatccccagctatcaggcgtcacatttctccatccgacgcgcgataaaaccgactggctgctgtggcttgcgcacttcccgcatgaaactgcgctaaaaatgcataaaaaccaatatttcgacaccatggatctggcgatcaccgccgcgatgcaggggctcggcgtggccatggcggacgaaacactggttgccggggatctgcgaaccgggcgactatgtcgccccttctcgcttagcgtcaaaaccggcgccagctaccggctggttgttcgccgctcgcaaagcaaggccgacgggttggcgcgctttcgcgccgcgctggttaatccagcgtcacatgatgcttcatcacccgacgaaacagcgccagccgcgcgcgcataa

SEQ ID NO: 88097 - DNA, 1509 bp, Enterobacter aerogenes
atgcagaattcatctacgccgctggtgaaaacgcggcagggcacgttatccggcactaatgaacaggggatccatatctggcgcggtattccctacgcgcagccgccggtgggcgagctgcgttggcgttcgccgcagcctccagagcgctggcagggcgtgcgtcaggccgatacctttgccgccgccagctggcaggatatagagtattgtcgtgaacttggcggcggcgatcctggccgtttctcggaagactgtctctatctcaacgtgtgggcgcccgccgcccgctcgcagccgctcccggtgatggtctggcttcacggcggcggctacaccattggcgccggcagtctgccgccctacgacggtagcgcgttggccagccgcgaggtggttgtggtcaccgtgaactatcgtcttggacacctcggctttttcgcccatccagcgttggaaggcgaagagggcgagcggttgtataattttgcactgctcgatcagatagccgcgctgcgctgggtgcaggataatatccacgccttcggcggcgatgccgccaatgtcaccttgttcggcgaatccgcgggggcgcgcagcgtcctgtcgttaatggcgtcgccgaaagcgaagggattgttccataaagcgatcgtgcaaagcggttataccttaccggatttaccgcgggaaaaggcgctggccaagggaaagctgctggcggaacatttttctcttgccgatgccagtgcggaacagctgcgggcaatccccgctgatgccttttgggcgctgactgcgccgctgaatatcggcccggcgccgattgtcggcgatgcggtgctgccggagcccatgctcgatacgttctttaagggacgtcagcatgcgatgccggtgatgattggctccaatagcgatgaggccagcgtgatggcggtatttggcgtcgatattgccggtcagattcaaaaactgcgtcgcgaacgccgttttggccttgggctgattaaactactgtatcccggcgttaaaggcgatgaggcgttagggcgggaagtgtgtcgcgatatggcgttcacgactttggggtatgttgtcatgcaggcgcagcagcgtctcgggcaaccgtgctggcgctactggtttgattatgtggccgaagcggaacatgaaacttatctccatggcgcctggcatggcaacgaagtggtttacgtttttgacaacctgacccgcgccgagccggtatgtcagtatgccagtgaggcggatcaagccttcgccgcgcaggtcgccgactactgggctaattttgcccgccaggcgggcaatcagtgcagtgagttaaccggcccggtacgctggcctgcctgccagcgcggacgggaccgtttattgcgtatcggcctcaacaagcgcgcgggctttaaagtcgagaaccgctttatgcgcgcgcggctggcgctgtttcgtcgggtgatgaagcatcatgtgacgctggattaa

SEQ ID NO: 88098 - DNA, 1344 bp, Enterobacter aerogenes
atggcgaacaccatcacggctgatgagattcgggagaacttttcacaggctatgtcggcaatgtaccagcaggaagttccgcaatatggaaccctcctggagttggtggcggatgtgaatctggcggtcctggaacataacccgaaattacatgaacaattggctaatgccgacgagctggcacggctgaacgttgagcgccacggcgcgatccgcgtgggaacggcggaagaactggcgaccctgcgtcgcatgtttgccattatggggatgtatcccgttagctattacgatctgtcgcaggctggggtaccggttcactccaccgcatttcgcccggtcgatgacgcggcgctggcgcgtaacccgtttcgcgttttcacctcattgctgcgccttgaactgatcggcaacgaggcgctgcgccagcgagcggcggatattctcgcccgtcgcgatatatttacgcctcgctgccgtgaactcattgcgttacacgaagatcgaggagaattcacggctgcagaagcgcgtgaattcgtcaccgaagcgttggaaactttccgttggcaccgtcatgccaccgttgacgagcaaacctatcacgcgctgcataatgagcaccggttgattgccgatgtggtctgtttccccggttgccacattaaccatctgacgccgcgcactcttgatatcgatcgagttcaggcgctaatgccgcaatgtggtatcgaaccgaaagcgctcattgaggggccgccgcgccgcgaggtgccgattttactgcggcaaaccagttttaaagcgctggaagaaccggtgatgtttgctggtgaacataaaggcacacacagcgcgcgctttggcgaaattgagcaacgcggcgtcgcgttgacgccgaaaggacgagcgctgtatgaccgcttactaaatgaggccggggtcggtaaagacaaccttaaccaccagcgccatttgcaggaggtctttagcgaatttcctgacagcgaatttctgctgcgtcagcaggggctggcgtggtttcgctatcgcctgacgcctgcgggggaagcgcatcgccatgcttttggccccggcgacgatccgcaaccgctgatcgagcgtggttgggtagtcgcgcagccgattgtttatgaagattttttaccggtgagcgcggcggggatcttccaatcgaatctgggcaacgaaacgcaggcccgcagtcacggtaacgccagccgtgaagcttttgaagcggcgttaggctgcgaggtcttcgatgagttcgagttataccaacaggcggaggagcggagtaaacgccgttgcggtctgctctaa

SEQ ID NO: 88099 - DNA, 741 bp, Enterobacter aerogenes
atgaataataaatggtcaccgcgcgaggttgtacatcgcgattacaatagccatccgccggcgctggcgccgggatataaaactagtgtgctgcgctcgccgcgtaatgccctcatctccctgcaaaattcactttctgaaattaccggtccggtgttcagcagcgacgaccttggcccgctggataacgatctcatcctcaactacgccaaagacggcctgccgattggcgagcgaattattgttcacggttacgtgcgcgacggctttggccgaccaatgaaaaatacgctggtggaagtgtggcaggccaatgccggcggccgctaccgtcataagaaagaccagtatctggcgccgattgaccccaacttcggcggctgtggacgggtgctgaccgatgaaaacggttattactgttttcgcacaatcaaacccggcccctatccgtggcgtaatcaggttagcgactggcgcccggcgcatattcacttttcgctctccggcgatgcctgggcgcagcggctgattacccaaatgtactttgaaggcgatccgcttattaaacagtgtccgattgtcagaaccatcaataacgatgatgccgtgcgtaccctgattgccgagctggatacccacgccgccgtgccgctcgacagcctggcctatcgttttgatcttgtgctgcgcgggcatcgcgccacgctgttcgaaaatcgtactcagggggccgcccaatga

SEQ ID NO: 88100 - DNA, 621 bp, Enterobacter aerogenes
atgaaagactatttagctgaaaccgcctcgcagactgccgggccttatgtgcatattggtctggcgccggacgctgcagggtttcatattttcgaaaaaaacttcggccccaacttagtgagcgcggaaaccaaaggccaacgtattacgattgaaggccgggttttcgatggttccggaacgccggtacgcgacgtgctgctggaactctggcaagctaacgccgacgggcgttataaccatcccgacgaccgtcagcagagtaaggctctggacccgaacttccgcggctgggggcgcacgtgttcagactttgcatccggcgtctggcgctttcaaaccatcaaacccggcgcggtcgtcggccgtgatggacgcatgatggcgccgcacctcaatctgtgggtggtggcgcggggtatcaacatcggcctgaatacgcggatgtattttgctgatgagcaggcggcaaatgaacaggatccggtattgaatctgattgaatgggaagttcgccgccagacgcttatcgcgcaacgtgaagtgcgtggagatgaactcgtctaccgctttgatatttatttacagggcgataaagagaccgtgttcttcgatatttaa

SEQ ID NO: 88101 - DNA, 924 bp, Enterobacter aerogenes
atggaaaaaaatggtctcttcagtcagcgcattcgcttgcgccatttacatactttcgtcgccgtcgcacagcagggaaccctggggcgggcggcagaaaccctgaatcttagccaacctgcgctatcaaaaacgctcaacgagctggagcagttgaccggtacccgtctctttgagcgcgggcggcttggcgcgcagttgacgctggtgggcgaacagtttcttacccacgcggttaaggtactggatgccctcaataccgcaggccaggctctcaatcgtaaagaaggcatgaatagcgatgtggtgcggattggcgccctgccaaccgcggcgctcggtattttacctacggtgattggtcaatttcataaacagcaaaaagacatcaccttacaggtcgccaccatgaataacaccatgctgctggcggggctaaaatccggcgatgtcgatattggtatcgggcgcatgtctgatccggaactgatgagcggcctcaactatgaactgctgtttcttgaatcgctaaagctggtcgtccgccccggccacccgctgctgcaggagacggtaacgctcagccgggtgatggaatggccggtggtggtctcaccgaaagggacaatcccgcggcagaatgcggaaacgctactgcaaagccagggttgtaaaattccccccggctgtattgaaacgctgtcggcctcgctttcacgccagctcaccgtcgattacgactatgtctggttcgtcccttccggcgcggtgaaagacgacctgcgtcgcggtttgttaacctcattacctatcgccaccgaaggcgccggcgagccgatcggtattcttacccgggtggacgccagcctgtcgcagggggcgcaaactctactgagcgcgatacgcaaatccatgcctggctga

SEQ ID NO: 88102 - DNA, 2373 bp, Enterobacter aerogenes
atggctacgggcaacgtgccgcgcggattcccccggatcctgcagtggctactcgccggactgatgttaatcatcggtctggcaatcggcattttaggcgccaaactggcaagcgtcggcggcacctggtatttcgccattatgggactggtgatggttatcgcctccctgcttattttccgcaatcgtcgcggcggcatcgttctttatgccgtcgccttcgcggcgtccattgtttgggcgatcagcgacgccggctggacctactggccgctgttctcacgcctgtttgcgcttggcgttctggcttttctgtgcgccattgtttggcctttcctttccagcgcaccggcaaaaaaaggcgcggccttcaccctcgcgggcgtgctggccgtggtactgctggtcagttttggttggatgtttaaatcccagccgctggtcagcgccagcgaagcggttccggtaaaaccggtacagccaggtgaagaacaaaaaaactgggagcactggggtaataccactcacggcgaccgtttcgccgcgttggatcagatcaataaaaacaatatcaaccagctacaggttgcctggattgcccataccggcgatattccgcagagtaacggttccggtgcggaagaccagaatacgccgctacagattggcgatacgctgtatgtatgtacgccatatagcaaagtcctggcgctggatgtcgatagcggcaaagaaaaatggcgctatgactcaaaagcgacggcgccgaactggcaacgttgccgcggtttaggctactacgaagatagccaggcacaggctaatgccgtggccgggactcagcctgccgcctgtgcccgccgcctgttcctgccgactaccgatgcgcgcctgatcgcaatcgatgccgataccggtaaagcctgtgaagcatttggtgaacacggtaccgtcgatctcagcgtcggcatgggggaaatcaaacctggttattatcagcagacctctaccccgctggtggccggtaaccttgttgtcgttggtggtcgcatcgcggataactactccaccggtgaaccgccgggtgtagttcgcgcttttgacgtgcataccggtaaactggcctgggcctgggatccgggtaacccgcagctgaccggcgtaccgccggaaggacaaacctacacgcgcgggacgccgaacgtttggtccgcgatgtcctacgatgccaaactgaatctcatttatctgccaaccggtaacgccacgccagatttcttcggcggcgaacgtacggcgctggatgataaatacagctcatcaatcgttgcggtcgatgccgccaccggtaaagtgcgttggcatttccagaccacccatcacgatctgtgggatttcgacctgccttcgcaaccactgctgtacgatctgccggacggtaaaggcggtacgacgccggtactggtgcaaaccagcaagcagggcatgatcttcatgcttaaccgcgcgacgggtgaaccggtggcgaaagtggaagaacgccctgtcccggccggcaacgtcaaaggtgaacgctactcgccgacgcagccctactccgtcggcatgccgatgatcggcaacgaaacgttgaaagaatcggatatgtggggcgccaccccggttgacctgctgctgtgccgtattcagttcaaagagatgcgccatgagggtgtctttacaccgccgggtgaagaccgctccttgcagtatccgggctcgcttggcggaatgaactggggcagcgtgtcggtcgatccgaataacggcctgatgttcgtcaatgacatgcgccttggactggctaactacatggtaccgcgagcgaaagtggctaaagatgccagcggtatcgaaatgggtatcgtgccgatggaaggtacgccgtatggcgcgatgcgcgaacgtttcctgtcgccgctgggtatcccctgccagaagccgccgttcggcaccatgtcggcggttgatctgaaaagcggtaagctggtctggcaggttccggtaggtacggtagaagataccggtccgctgggtatccgcatgcatatgccgatccctatcggcatgccaacgctgggagcttcgctgtctacccagtctggcctgctgttcttcgccggcacccaggatttctatctgcgcgcctttgataccgccaacggcaaagagatttggaaatctcgcctgccggtgggcagccaatccggcccgatgacctacgtttcaccgaaaaccggtaagcagtacatcattatcaacgccggcggcgcgcgccagtctccggaccgcggcgattacatcatcgcctacgcgttacccgataaaaaataa

SEQ ID NO: 88103 - DNA, 270 bp, Enterobacter aerogenes
atgtctttaatgaaaggcgctgccgcgttgatttttctcctgttgctgcaaggttgtacgcatcaccagcctcagcaactgtatcgccatgattttgtaattaaacatcctttgactggcaaacctattccgtatctgccctaccaaatcactacgccagacggcaaaatattcaagggcagaaccgataaaaacggtttaaccgtagaggcgatttccactatgccgggggaattcaagctcaatgtgatccctgcgtcagcactataa

SEQ ID NO: 88104 - DNA, 279 bp, Enterobacter aerogenes
atgaaaggagccctccatcacctgccgatcggcgcactcttattagccgcaaccacctcagcccaggcgctgaaagcgccagaagtggatttacgcgatccaaagctgtgggaagagaaaaaggtcaatccgctaaacgatatctccgccccctgcgaagtggcaagcagcccggattgtccagtctgggaagatcaaaagtccgatattcaacgtgaaagagaacggcgagagcaacgtcgttggcaatccggctatgagcactggcgcaagtattaa

SEQ ID NO: 88105 - DNA, 1119 bp, Enterobacter aerogenes
atgaaatcacgtgcagcagttgcctttggccccggccagccgttaaaaatcgtggagattgacgtcgcgccgccaaagaaaggcgaagtcctggtcaaaatcacccacaccggtgtttgccacaccgatgcttttactctctctggcgacgacccggaaggcgtgttcccggcggttttgggccatgaaggcggcggtatcgtcgttgaagtcggcgagggcgtgaccagcctgaaacctggcgatcacgttattccgctgtataccgccgagtgcggcgaatgcaaattctgcaagtctggcaaaactaacctctgccaggcggttcgcgccacccaagggaaaggtttgatgccggatggcaccacgcgattttcctataacggcgagccgatttatcactatatgggcaccagcaccttcagcgaatacaccgtctgtgctgagatttcgctggcaaaagttaacccgcaggcaccgctggaaaaagtatgtctgttgggctgtggcgtgaccaccggtatcggcgcggtacataacacagctaaggtgaaagagggcgacagcgtcgctgtcttcgggttgggcggtattggcctggcggtgattcagggggcggtgcaggcgaaggccggacgcattctggcggtcgacactaatccggataaatttaccctcgccagggagatgggcgctaccgacttcatcaacccgaacgactacgataaaccgattcaggacgtgattgtcgagctaaccgacggcggcgttgatttcagtttcgaatgtattggtaacgtcaatgtcatgcgcgcggcgctggagtgctgccataaaggttggggtgagagcgttatcatcggcgttgctggcgccggccaggaaattaaaacccgtccgttccagttggtcaccggccgggtatggcgtggttccgccttcggcggcgtgaaagggcgtagccagctgccggggatggttgaagacgcgatggcgggtaagattcgcctcgatccgtttatcacccaccggttaccgctcgaccagatcaacgaagccttcgatctgatgcatgaaggtaaatcgattcgtacggttattcacttcggtgataactaa

SEQ ID NO: 88106 - DNA, 276 bp, Enterobacter aerogenes
gtgccacattcaccagaagacaagaagcgtgcgcttagccgcgtacgccgtattcgcgggcaggttgaagcgctggaacgtgcgctggagtccggcgaaccctgcatgactatcctgcaacagattgcctccattcgcggcgccgccaacggtttgatgggcgagctggtggagatgcatctgcaggatgaactggttagcggcgataccaccccggaccaacgcgccgcccgcatggcggaagtcggtcacctgctacgatcctatttaaagtaa

SEQ ID NO: 88107 - DNA, 474 bp, Enterobacter aerogenes
atgagagtgagacgcgcggtacctgatgaagcccctgcgttgtggaatatccgtaatcaggcgattcgccatggctgtcgtcaaagctatggcgctgaagtgattcacgcctggacgccggaacagatgcccgaagggtatcgtcacgccgttgccgataatccgttttatatcgtggaaaataggctgggccaacccgtcgctaccggctatctcgatattgagtccttaagcgtggaagcgatctttacgctgccggagtggggcgggcagggatgcgcggatttgatcatgagggcggttattgccgaagctcgccgacgtgggctcgaaacgattacgcttgaggcgacccccaatgcggcgggcttttatctacgccatggctttgtttcacaaggagaaaagagtcattattcgaaaatggccaacgccgagctacgctgtatagccatgagcctcactctcgattaa

SEQ ID NO: 88108 - DNA, 1383 bp, Enterobacter aerogenes
atgaccgataatataccggccacttcccctcctgtcgccgatgcggggggcgctgaacgcttgagcccgcgcgaacaggtggtgatcaataaattgttccgtcgcttaattccttttctgtttctgctttttatcttttcatttcttgaccgtatcaatatcggctttgccgggctcaccatgagccaggatttggggctgagtagcaccatgttcggcctcgcgacgacgttgttctacgcgatgtacgtcatctttggtattcccagtaacatcatgctggggatcgttggcgcgcgccgctggattgccagcattatggtggtgtggggaatcgcatcgacagcgacaatgtttgcgaccgggccaaacagcctgtatctgctgcgcatgctggtggggattgccgaagccggctttcttccagggcttctgctctacttaacctactggtttccggcgtactaccgggcgcgcgccaatgcgttgtttatgattgccatgccggtgacgatggcgttgggctcgctggtctccggctatattctcagtatggatggcatgctggcgcttaaaggctggcagtggttattcctgctggaaggattcccatcggtgttgttgggggcggtagtctggttctatcttgacgacagtccgcaaaaggccaaatggctcaccgatgaggacaaacgttgccttagcgagatgatggagaaggacaaactacggctagtgcaaccgaacggtagcgccagcctgagcgccctgcagcaggggaaaggcagcctctggcgcgacgtcttcaccccggtggtgttgatgtatacgctggcctatttctttctctgtaataccttaagcgcgctcagcgtctggacgcctctaattctcaaaagctttaaccagggcagcagcaatatcgccatcggcttgcttagcgccgtaccgcatatctgtaccattgtggcgatgatttggtggagtaaacgttctgaccgcttacaggaacgtaagctgcacacgttattgccctacctgtttgccgccgcgggctggatgctggcggcgcacggatcaaatagcatcatgcaactgttgggggtgattatggcctcggcgggggcctatgcggcgatggtgattttctggaccacgccggatcaatccatcagcctgcgctcgcgagcgatcggcattgcggtgattaacgcgacgggtaatatgggatcggccatgagtccgctgttattcggctggctgaaggatttaaccggcagctttaacgccggcttttacctcgtggccgggttcctggtattgggggcgctggtggtatcgcgcatcccgatgaaggccagccgtccacgagcgacgccataa

SEQ ID NO: 88109 - DNA, 528 bp, Enterobacter aerogenes
atgcgcgataaatattctggcctgcagataggaattcactggctggtctttttactggttgtcgtcgcctacgcggcgatggaactgcgcggtttcttcccgcgcagcgaccgtccggtgataaacatgatccatgtctcctgcggcatttccatttttgtcttgatgattgcacgactgctggtgcgcctgaagtctccggcgccgccgattgttcctaaaccctcgccgatgatgaccggtttcgcccatcttggccatctggtgatatatctgctgtttatcgcgctaccggcgattggcatggtaatgatgtattaccgcggtaacccgtggtttgctttcggcctgacgatgccctttgcggcgcaaagcaacttcgctttggtcgacagccttaaggggctgcacgtcttacttgccaatatcggctatttcgtgattggcctgcacgcgctggcggcgctgctgcatcactatttatggaaagataatacgctgctgcgcatgatgccgcgcaagcgctga

SEQ ID NO: 88110 - DNA, 903 bp, Enterobacter aerogenes
atgaaaaagagcattgcactgacgatggtggcgctggcctgcctggcggccaacgtccaggcagcagagaaacttgctggtaatgaaatacttgccgtacagaaaggcggggtgccggataaagtctatacccaacatcagccgaaattacgtatagcaacctataatatcggcaagaatgaagcgtctgataatgtggccgattttacggcacttaattcagcgattaaaaaaattaacgccgatattattgccgtcccggaagtcgataacaaaactcagcgcagccagaaaatcgatcagcttaagacgattgccgatgctaacaatatgcattatgcctttggtaaagcgttagatttcgacggtggcgaatacggactggggctgctgtcaaaatataaaatcctgcattctcaggtggtgaagctgccgtcaggcaatgcggaacagcgcgtggcgctactggcgcaggttgatgtaccgggttttgattccgcgccgattattatggtgacccatctcgactggcaaaaagatcccaccatgcgtaccgaacaggctcgctatcttctcgatttgagtattggcgatgcggcgtctgattttaaagatatcgcctcttcaattaagatcctggccggcgatttcaattcaacccgtgaagaacagccggtgaaagagatcggttatttctttaacgaagtgtcgaagcaggggacggatacgcgtagctggcctgccgttaacccggccattgatatcgaccacattttcaccttcaaaggacaaaagtgggatgtgaagaagctggagatcccgcataactcgccggaatttaactggtcagcggccagtgaccatctgccggtcattgctgaactgcaactcaccgagcagtaa

SEQ ID NO: 88111 - DNA, 2073 bp, Enterobacter aerogenes
ttggatctgaaatttcggcggcgagtcccggtcgttcatcagacagaaacgtcagaatgtggactggcctgtctggcgatgatatgcggacattatggtcgtaatatcgacctgatcgccctacgtcgccaaataaatctgtctgcccgtggagcctcgcttgccagtgttcagcaaaccgggattgagttagggatggaaagccgggcattgtcactggatctccatgaacttaatgctctcagaatgccctgtatcctgcactggaattttaatcatttcgtggtgctcgttagcgtacgtaagaatcggttcgtgcttcatgaccctgcgagggggcgaagaactgtcgggagcgatgaaatgtcacagtgcttcaccggcgtggcgctggaggtctggcccggcagtacatttgtgcaggaaacgataaagagccgaatcggaatacgggcattaatcagcagcgtgcagggtatccggggcgtactgagcaaaattttctgtctgtcgctgattattgaagctatcggcctggtgatgcctgtcggtacgcaattggtgatggatcatgctattcctgcgaatgaccggggactgctcatgcttatctgtggagtcctgatgttttttattttggggcgtactttggttagcgtgatccgcgcatggtcatcccttgcgatggagtcattgataaatgtgcaatggcagtcggggctattccgtcatctgcttcagttgccgttgacctattttgagcgacgaaagatgggcgatattcattcccgcttcagctcgttagatgcgcttcgcgccacgtttacaaccagtgtggtgggggcaatgatggacagcatcatggttgccggtctcttgttgatgcttatcctgtacggtggaaaattgacggtttttgtactgggctttacagcggtatatgtcttcattcgtatattgacctatagccggtaccgccagctgtcggaagaagcgttaatcgccggagcccgtgctggttcatattttatggaaacactctacggaatagctacggttaaaatgcagggaatggcagaacggcgtgggagccactggctgaacctgaagattgatgccatcaataccggtatcagactcagccgacttgatatgttcttcggcggcattaacacgtttgtggcgacgtgcgatcaggtgactattctgtggctgggcatcagtctggttatggagaaccaaatgaccatcggcatgtttgtggcatttggcgcattccgcgcgcagttttctgaccgggtaggatcgctggtcaacttcttattacagctgcgtatgatgagcctgcacaacgaaaggatttcggatatcgctttgaatgaaaaggaagaaagaaaaccggatttaggattaaaggcaaccatgtctccggctagtctggagattaaagcgctaagcttccgttacgacagccagtcagcacccgtctttagcggccttagtttcaggatccgagccggcgagagtgtggccattaccgggctctcaggttcggggaaaaccacgctgctcaaagtactgtgcggcttggctgaaccgatatcagggactgtcttaatgaatggtacggatatcaggcagctggggataaataactatcatcgcttgatcgcctgcgtaatgcaggatgaccggctgttttctggctcaattcgggagaatatctgcggattcactgaaaatattgatgatgcctggatgagagaatgtgcccggacaagccgtattcatgacgtgatattggctctgccaatggggtatgagacgttaatcggagaactgggggaggggctatctcggggtcagaaacagaggatttttattgcccgggcgctttatcgccgtccggatatattattcatggatgaagccaccagcgcactggacgcagagtgtgaaaaagacgtcagtctggcaatgaaaaagttgaatataacccgaataattattgctcaccgtgaaacgacactgcaaaccgcggacaggatcatcaccctcggcgaatccgattaa

SEQ ID NO: 88112 - DNA, 1278 bp, Enterobacter aerogenes
atgtttcgtaaggaagcgctcaaaagcagggataaaacatggtgtggcaaagcagtattactaccgggactctcctctcggctggttataattaccagcgcgctttttttcgtctgcttcgttgttttaattagtaccggcacttatacgcgacgtattagcgtgcaaggtgaagttaccacctggccgagaccggttaatgtctattccggtgtccagggatttgtcgcgacacagttcgtccgggaaggtgaccctgtaaaaaagggtgatcctgtttatcaaattgatgtcagtaaaagtacacgtagaggcgtggtcaatgagactcaacgacaggatatcgaaaaccaattgaagcgcatcgccgagattatcgctcgccttagagagagtaaggaaaccactttgcggatgcttgagcaacagaaaatacagtatagcgcctcttttgaacgctcggcaggcattgtcaggcgtgctgaggagggaataaaattaatgaaaaataatatggataattaccgacggtaccagcagcaggggttgattaataaggaccagttaaccagtctggtggccttgtactaccagcagcataatagtttgctcagcctgagcgcgcagcatgaacaaaatgctctacagttaaccaatctggaaagtcaaattcagacgcaggcggcggaatttgacaaccgggtttatcagatggaactgcagcgttatgagctacagaaagagcggattaatactgatgcgggaggcgatattatcattcgtgcctcatcagacggcaaaattgattcattaagcgtcaccccaggtcagatggtcagcgaaggcgatagtctgctgcagataattccagaaaaaatacaacgctattatttggttctttgggtacccaatgaagccgttccatatatttcagtcggtgatagggtgaatatccgctacgaagcctttccggctgaaaagtttggtcagttctcggcgaaagtcacactcatttcccggacgccagcctcctaccgtgaaatgcagacctatacgaccgccccgattaactctacggcaggtgcggctgcttactacaaagttgtgattagtccagaaaagcaggctgtcagctacgccggcaagcgtctgcctctggaaaatggcatgaaggcacagagcacgttatttctggaaaaacgtaaaatctatcagtggatgctctcgccattctacgatatgaagcgcagcgttacggggccaattcatgaaccgtaa

SEQ ID NO: 88113 - DNA, 351 bp, Enterobacter aerogenes
atgcgactggatagacatgtattctggctaaatgccattgtgatggttctattggttcctgtttatgaagagatggtcttccgcggctgccttttcagtgtgtttaaatactggttcgggaataacaattatgcggcggctgtcgctgtgtctgttgtattttcagcctgtcatttacagtacatagactggcgatcgttcctgatattatttctggtttcgctgatgctggttatcgggagaataaaaaccggcggaatactgatgccaattattcttcatgcgctgatgaacgcggtcgtaattggtattcagtatgtgtcattcctccagtattccggagaggcttag

SEQ ID NO: 88114 - DNA, 4725 bp, Enterobacter aerogenes
gtgaccggcacagcgagccagctgttgggcgtcaccttactcaatacggttgatgtttcgctgctggcagcaaactcgacaaaattctcggtcagtgagggaacgaccgaagatgtgacgattgctgtcaccggttcaacattgctgagtctgcagtctatactggcgctgctggggcaattggtgggaggcgcatcatctattaccgccgatctgtcgattgtgaataccgacaccggggaggtggtgcagattatcccagatgccgtgagcctgacaccgtctctggctttactgaacctggtttactccggtagcgcgaccttcagcgacttgccggcagggaattatgcggtggtgatttcttcaccgcaggcatccggcggcctggccgcagtggttgatgaactggcgtcggcaaatctgttgtcggtagcgcaagcaacgatcacagattctacggaatatacctcgactgctattgccggcaatgttctgaccgcagatgcaggcggcgatgtagcggataccggtgagggtattacggtaagcaaaattgcctccagcgtgcagactacaccgcttgatgtcacggcagcaggtatcgtaatcaatggtctctacgggcaacttacgatccatgccgacggcagctatacctacaaagcaacgggggatgcagacgctgttgggcaggcggatgtctttacctacacgattgtggatgcgaatggtcatactgcgacggccacgttgacaattaatatcgtggcaggaagtgatatcggagaatctgatgctgatgcagattcggacagtgactcggattctgacagcgactcggattctgacagcgattcggactccgacagtgactcggactctgacagcgattcggattccgacagcgactcggactctgacagtgactcggattctgacagcgactccgattctgacagcgactccgattctgacagtgattcggactctgacagcgattcggatagcgacagcgactcggactccgacagtgattcggactccgatagcgattctgactccgactccgactcggactccgacagtgactccgactctgacagcgactcggactccgacagcgactcggattctgacagtgactcggactctgacagcgattccgactctgacagtgattctgactctgacagtgattctgactctgacagtgattccgactctgacagcgactcggattcggacagcgattcggactccgatagcgattccgactctgacagcgactcggattctgacagcgactcggattccgacagcgactcggactctgacagtgactcggattctgacagcgattcggactccgatagcgattctgactctgactccgactctgacagtgactcggattctgacagcgactcggattctgacagcgattcggactccgacagtgactcggactctgacagcgattcggattccgacagcgactcggattctgacagtgactcggattctgacagcgattcggattctgacagtgattccgactccgacagcgactcggattccgacagcgattccgattccgacagcgactcggactcggacagcgactcggactcggacagcgactcggattctgacagcgactcggattcggacagcgattccgattcggacagcgattccgactctgacagtgattctgactcggatagcgattcggattctgacagtgactctgactcggatagcgattcggattctgacagcgactcggactccgacagcgactcggattctgttgaggcaatacctgataccaacagttctgaggttgtgcagcattacggcaaccttaatggtaccgaaggtaatctgtcgcagttggttggcgtctcgctgttaagcacgattaatgtgtcactgctgtctggcagtagtttccgcttcaacgtggataacaacaccacagaaaatatgactgttgatgtcagcggcgtgtcactgctttcaaccggcggactgctaacttcgatagtcaatctgttgggggctggaaatacgttgacggccgacctctcggtgattgatgtcgcaactggacgagtggtcgcaattgaccctggaagtgtgaatatcagcgcgacattacttggcgggctggtttatagcggtacggcatccttcgagaacttaccggcaggaaactatgcgttggcgatttcctcaccgaattctgatggggtattggttagcttgattaatacgctcgcgggagcgggtgtagccacctttgtcgaggcaacggtaaccgattcgttgggttatagcggaagcaccgtcaccggcaacgtgctggagggttctgaaaatggcgacatggctgatagcggtacgggtctgtcagttaccactgtcaccgcgacatctgcggcgggtgaacctcactcagtcaacggcggcacaatatcagtaacgggggcctatggcgtactgacgattaatgctgacggtagctatacctatcaggcgtctggtaaggcgggttcggcaggtaatgcggatgtattcacatacaccattacggacagcaatggcgtgcaatcaaccaccacactgaccatcaatattggccaggaggttgaatcggcccaggccaatccggatacccaggcttactacgtcgggaatgtcgatgacaatattgatatacagggaggtaatgtcgttcaactggctggactttccttactcaatacggtgaatgtcgcgctgccgacaaatggctttaaatttaccgtagccgacgggactgaacaggatgtcaccctggccgtttcggggtcaacaaccttaagcgtggcgcttggcgcggtcactctggatcttatcctggtgaataccgataccaaccagattgtcggcgtcattaaggatggaatttcggcaacaccgcaggggctccttggattaagcctgcagtacgcgggtggcggtgagttcgaaaaaattggtgccggtaactatatggtcgttatttcgtcgccgacgactggaggattgattggttcgatactgaatctgaatttgggcaccagcattagtatggaggtgactgattcgactaaatacgtgacggggaatgttctgcacaccgatagcgatggcgatgttggcgatacaggtaatggaattaccgtaagcagcatccagtttggatcgcaggtcgagaccgtcactgccggcggcgtcacgattaacggcacctacggtactctgactatcaagtctgatggtagctatagttatcatgctaatggaacaaccggtgtgggtcagagtgatgtcttcacctatacgataacggatacgctgggtcatacatcgtcgacaacgctgacgatgaacattgagtcaacgccagcgatagcggttgatgatatcgcctccctgtcggtggcaacggcaatgcagtcggttacctggacgcaaagcgtcagtaatcttgcggtaacaaatgcagcagtagcggctaatacgacatcgacgactaaagttacaagccagaactttaccgtcgctgaaggccgggaagtggataacgcttccatcaccctaaatctgagtggcaccaggactagtggcttgactgtattgaacggcgatctctcagggacagtcacattggttcatcatgtgatggttgacggggtaatgactgatgtgacggtctggagcgggcctttgagtatggctctggatggtgtccccatcataagcccgacaacggatacggacactgtgacgcttaacctggttaatggaactactccggtacaacttgccgcaggtgattatactctgagtattagtcatacgatgcaggctggaccggcaatgacatacaacctggcggcgagcgtgacgggaaccgagattcataccgatgcgcatctgacggccgcgcaatctgtggccggcaatatcctcgacggttctggcgcagacggggttcaggatacgcttggatcattgcatagcgggttcacgataacgggggaaaacaatctgggtgtcgtgacgcattggacattccatactgatggagccttgaccaacgacacaggaaccagcgcgactaacgggaaagcggtgctgtatggtgaatatggaacgctgaccattgatgggcagggaggttatacctatcagctgaatagcggtatcaatactgatgccattacggctaaggagacgtttacttacacgcttattagtagtgatggcggtagttcgacggcgaatttgaccatcgatctccatccgcagattgccggcagcgtcaatgacgatagcattcacagtacggcttacgatgacacctatagcatgggagttggcgccgatacggtggtctataacctgttggcggatgacaacacggggggcaacggcagcgatacctggaacgatttctcggtcgcccagggagaccatatcgatgtctctgcgctgctggtcggctggaatggatccagtgatacgctgggtaactatattacgctgagctatgtcggcggtaatacggtggtgtctatcgaccgcgatggttcgggtggaacgacgcaccagccagcgacgttaatcacgctgcagggggtccatatcaattcgctcgacgagctgattgataccaataactcgcactaa

SEQ ID NO: 88115 - DNA, 1437 bp, Enterobacter aerogenes
atgcgtctatttcaacaaaaagggattgtcagcgtttacaggttcagcacaattttgctgtcgttaagcgtaatattaacggctgatgcggaagagctttcatttccgccgactaacattagtactcagagattaaacgatagccaacaggtcgccggatattctgaggatctcatcaatccgcagagtcatttaaccggcccgttagatattgccaccgcggtaaaatcagcggtcaactggcacccggcgattactcagcaggtgagtaaacttcaggaacaggtgcagcgcgtggatgtagctaaagccaaatattatccccaggtgaacgcggggatgaataatggttatagtaattcatactccgattccggctattcaccctcattagttgtttctgtttcacaaatgctctacgacttcggcaaagtctcaagctcggtcagagcggcagatgccgccgttgcccagcagcaggcgatggtgatgcttaatatcgaccaggtggcccatgatactgctggcgcggtggtgcagatgcagggctaccagaagctggtgaaaatcgctcaggcacaagttgattcgctaaaacaaattggcgatctgatccgccagcgtaacgatgccggggcaacttcgctctctgatgttgtgcagactgacactcgcgttgagggagcgcaggcgacgcttatccaatatcaggcggcgctcgaacgctggaaagcgactctggccacctatcttgggcttggcagtattacctccgtgactgacggcgtgccgcaggatatggatgcggcctgtgccgtaagtaaaattgattatcgtgccgtacccgctgtgctggccgctttagcgcaagccacgcaggcgcaggcgcagctcgataacgcgacagcgcaaatgctaccgaccatctctctggaaccccaggtgacgcattatctgaatgataattacgccaacagcgccgtgttaaataaaacgcaatattcggcgtgggtcaaagtggaaatgccaatctaccaggggggggcattaacggcctcccgcgaagcggcgcagcaaattttatctgcggctaacgccgggattagaaacgcccaactcgatgccagtcagaaattaagcgcctcgcgcgatgaggcgctgaatcttaaacaatccatcagtatccagcgccgccagcagcaacttggcgagcaaactcgcgcgctctatcaagatcaatatctgcagttgggtacgcgtccgctactggatctgcttaacgtcgatcaggaaatctatcaggcgcaattcagccaggtgttaactgaagcacaactgcgtaatctggagctggactgtctgttcagtactggaaagatgcgctccgtttttgctctggataatcaaagcatccagggtgtggagatccgcccatga

SEQ ID NO: 88116 - DNA, 2148 bp, Enterobacter aerogenes
atgagcgaacaacctcatcacagcgatattccccatcttctggattgggctaacgcgatggcttttgtcgccagccattatcggcagagctattcgccggggacgctgcatgcggcggcggagtgggcgacgcagaaaacactgcctgatgcgcttaaacatctctgtcggcacgccggtttgcattgtcaatttctcaacggcaacgaccggcgtatgtcggcgtggcgcttgccgctagtcgttcagcttaaagatgggcagattggtattatcgaaagctttgatcttaataatttagttggcatccgttttgtcaaagagctcaccttactcagccagtggccgctggacgcattattggctgagattgagcttaccgttgcatttcgtccagcttcgcccgaaaaagatatccgaactgaaagttatcttgcgcgctttcagccggactggctgcgcaaaatcgttctcaaagatatccgcccgtatatgcatgtcatgctggcatcgctggcaattaatgtactggctctggccggcattctattttcgatgcaggtgtacgaccgggtgatcccggcgcagtcttatcccaccttatacgttttattcagcggcgtattaatcgctgcagtattcaactttattctcaaaattacacgtggacacgttactgacctacttggcaaacgcggagatattcgtatttccgatcgtgtatttggtcacgcgctgcggctaaaaaactcagcggttccgcgttctactggcagttttatttcacagatacgcgagctcgagcaggtacgggaaatgatgacgtcaaccatgatgacggttattgccgatctgccgtttttcatccttttccaactggtactgttcattgtttcgccttggttgagttggatcgcgccggtcgcgacgatcctgatgctgcttccgggatttttattgcaaaagaaactggccgaactggctaacaagaatcaacacgaaagcacgctacgaaacgccattctggtggaaagcattcagggcctaccggatatcaaaatgatgcaggcggaaagccgctttctgcagcagtggaatagctatgtggctatcaccgcagaatcgggggtaaaaacccgcaaagtcacccacggcctggtgagctgggggatgtctatccagaatctgctgtacgccacggtggtggtggtcggcgcgccgctggtgattaatggcgacattacaaccggcgcgatggtggcggcgtcaatgttgtcaagcaggatggtggcgccaatgaccgcgctctgcggcgtattggcgcgctggcagcaggtgaaggtggcgaaagccagtctggataatctgatggcgctgccggtagaaggcgggcaggatgagccgcgcatccaccgcgctgtgctgcacggcaactatgagtttcgcaacgctgagtttcgctacggcaaggacaacggccccattccgctgcgtattaagcagttatcgattaaggccggggagaaaatcgctatcctcggacgcatcggcgccggcaaatcgacgctattgcaggcgatgatgggtaacgttgagctggcatccggtgagctgcggctcgacgatcttgccctgccgcaaatcgatctggcggatattcgccgcaatgcgactttgctgacccaggaagctcgtctgttccacggaacgctacgggaaaatttaacgctgggaaggccaatggccagtgatgacgaactggtgaaggtactggaactgtgcggggcgatggagttcgtcagtaaactgcccatggggcttgagcatctggtgatggaagggggccttggcctttccggcgggcaacggcaatcattgctgctggcgcgctctctgctgcgcgaccccaatattattttgctggatgagccgacttcattctttgatgaacgcaccgaaaaagcgtttgtcgagcaactggcgcattgggtgggcgaacgtacattgattattgctacccataaagcggcggtactgagcattgtcgatcgtattttggttatccaggatgggcaactggcgttggataaacctaaagcgacggtctttgaacaagaaaaagcgcgtggccaggtggtgaatatatga

SEQ ID NO: 88117 - DNA, 1218 bp, Enterobacter aerogenes
atgaataagtccgacgcgattctcccactggcgcaggatgccgatccggtttctgacatggtcgataatgaacgggatgaggctgaactggtcaaatcgcgccgcttaattctcctgctggcgctgctaatggtagtgaccggcgtatgggcgtggtttgcgaccctggacgaggtttcgaccgggacaggtaaggtgatcccaagctctcgtgagcaggtgctacaaacccttgatggcgggatcttaaccgagctcaacgtccgcgaggggagcagggtggcggccgggcaggtcgtcgcgcggcttgaccctacccgtagcgaatcgaacgtcggcgagagccaggcgaaatatcgcgcttcactggcagcaagcattcgccttaccgccgaagttaataaccaaccgctgatttttcctccttctcttaaggcctggccggggttactggcggaagaaacccgcctctatcatagccgacgggaccagctaaccaaatcgatgcgccagcttgagcagtcgctgtcgttggtgaaaagcgagttggctatcaacgaaaggctggctaaaaccggcgctgccagtaatgtggaagtgctgcgtttgcgccaacaggctgccgatattgagttaaagaaaatcgatctcaacacccgctactacgtcgatgcccgcgaacagttatcgaaagccaatgccgacgtagccagtcttgccgaagtcattaaagggcgggcggattccgtcgcccggctgaccgttcgctcgcctgtgcaggggatcgtcaaaaatatcaaggtcaacaccattggcggcgttattgccccgaacggcgaactgatggacatcgtgccgatcgatggccgcttattaattgaagcgcgtatttcgccccgcgatatcgcttttattcatcccgatcagaaggcgctggtgaaaatcaccgcctatgattatgccatctacggcgcgcttaatggggtcgttgagaccatttctcccgatactattcaggacgaggcaaaacccgatctttattactatcgggtgtttatccgtaccgatcataactatctggaaaataaacacggtaagcgttttttaatcggtccgggaatgatcgccactgttgatattaaaaccggcgaaaagacggtaatggattatctggtgaaaccatttaatcgagcaaaagaggcgctgagagaaaggtaa

SEQ ID NO: 88118 - DNA, 3135 bp, Enterobacter aerogenes
atggcattaagcgatttattacaacaggcctgctttcagagcagaccattaaaaacgaccgcgctgcctgctgattatcccgggtgggttatcttttttagcgtgagtgatggtaaggagcgggcgcatgtccaggtcgcagcggcggccagttttgatcaagcctggcttgctggcgccagagccctgcaggagtggcgcaaaaaacaagacaacgaaccacagtggttgcgtattgatattgtcgatagcgttgaaaaactcagctgggaaaatctacagaagaaactcagcatcaccaaacgcaattatttccgctttggcctttctttcgatgcgcaatttactcaggcgatcctcgaacaggaaattgcggcgaatgccttattgtatgacggagataacggtgtcgcggcgccaaatggcatcaatcttgaaaactatggccaacgacgctttaaacaaagtttgagctggccggatgcaccacagcagatactttggcgtttcaaaacccgcgcggtattctgcgaccgcagcggcgccaggctgattgagcacagcggccgcagttcaggctaccgcgttatcggcgaagaatggcaaaaaaactggctggcggaagtgatcaaaaaaggtagcgattacttagctcgtcaggtgaaaaaagatggactttattactacggttggtttccctgtttcgatcgtcctgtacgatcctataacgccttgcgtcatgccagttcgacctattcgttaattgaagcatgggaagcaaccaggcaaccgcacctgcgccaggcgatcgatcgagcgattggttacctggttaccaatcttatttctgtgcgtacccttgacgatgggcaacaggcggcatttttgtgtgatgtcgataatgaaattaaactcggcggcaatgcggtgagtattctggcgctggtcaaatacacggaaacgacaggcgaccagcagcacctggaattaatggcgcaactggccgccggcattgcatttatgcaggatgcgcagagcggcgagtttgtccatgttctcaatagtcacgacctctcgttgaaggctaagcatcgtattatctactacgatggcgaggcggcgttcgcgttgatgcgtttgtatagcctgacgcaaatgccgcagtggctggcgatggttgaaaaagcgttcgaatacttcattcggcaacagcactggcagcatcacgaccactggctgagttactgtgttaacgaattgacgcgttttcgtccggaagaacgttattttcgctttgggctggataacgtgcgtggacatctggatttcgtactgcagcgcgtgacaacctatccgacgctgctggagctgatgatggcggcagcagagatgattgcgcgccttgacgcttcgccggcgcaacgtcatttacttgaagggtttgataaagaaaagttctatcaggcgttggagtgtcgtgcgcgctacctgctggatggtttcttctggccggaactggcgatgttctttaaaaacccggcgcgtatcgtcaacagcttctttattcgccaccacagctaccgcgtgcgtattgatgacgttgagcactatctgtctggctatattgcctatcaaaaatattatcaggcggcgactatgcgccagtcaattcctgcggttgcgcctcccgaacgccgggggacaacggtatttttgttagagaacctgcgtgatgttggcaacggtattgaagtcgccgccacccggcgtgcgaagctgttcgtcgagcacctgcagactgtgccctggcttatcaccgcaatgtgggatccggaactgcatgtcgcggtcaaggcgttaaaggcgcgcggcgcgttgccggaagaggtgccggtttataacctctacgaggctttagtgacgagcttcgcagcggggaaaattatcccgctgcctgcgcttaaaggtgaggttgagctccgacaggctatcgcgccgaaggcccaggcctcggtcggcaaaaataactatcagctacgcccgcagggacagctggtggaggattatgtcgatgacgccggcaatgttctgctgcgcaaatatttcgacgaaagaaaagcgaatttgcaaattgcccgtatcgatgttgccttgcctgacggcgacgttaaatccttcaaccagcaggaggcgttcttctcgtggatgctggagatgatgctgcccgacgagcgccgctggcattttatcgtcgataaaaataaagcctggaaagcgtttgtctgttctcgtccggcacagcggatagactgcacgctgagcgcgattatccactcccatcatcagctgcttaatggcgtagtgaaagcctcctaccgccacttaattgagcaaccggaactggttgaccgcttaatcgttctcaccgatgagcagtggcaggacttacagcatgaaggatttcccggcgaacgtctgaccgtcatccctaatcatatggatgacagcaaaattccggcaaacccgcaaaaggatccctctgaaaccgttatctacctggcgcgttactcggaagagaagcagcacatgatgttgtttaacgcctttcgcaaggtagcggcgcagcttcctggtgcgcgactgcatacctatggcgttgggccgttacgccgtactctcagcgatcagataaaagcgtggaaaatggaggacatcatctccattaatggctttacctcagatattgccacagtacataaatccgcctgctgcacggtattgtgctcaaatcaggaagggcaatccttgtcagccgttgaggcgatggcgtacggcacgccgctcatcagctttgcgataaaatatggcccgcgcgatattctgcaggagcgacaggccgggatcctggtgccatacggtgatgaagatgcgctggcggtggcgttggtacaggttatttctgacaaggcgctacaaaaagagatgcaggctgccgccctgcgtaacgcgcgacgttattgcgccaatgcgattgcccaacgctgggagcagtggttgcagcagaatgaacagcggataagcgctgagggccaacaggggccgaacgtggtttctctcaaagaacgggtagtgtaa

SEQ ID NO: 88119 - DNA, 957 bp, Enterobacter aerogenes
atgcaaccagtaaaatcatgggcgacatcaatagcagcgtgttggttggcgatgtcttgtctcccttcagcctccgcggaagaaatggtgcaggtatcgcgctgtgttaaaggttcgatactacttaagcatgttcttgaaaaagaatatgtcgaagatgagttccacattttttatagcctgcaggggcctgatgcccttaaatttcagtacgacagttcgggtagcggtgttcccgacagcattaaggatattgccgttcagctacaggccgctaaatatctctactccacggtattgggattacgctttccgctacagcagaaaatttacgcacaggcgcggcaaatcaacatttatgtgctgactttgccaaaaggtaacggccttgccttcgaccgcgtcgcttcagaaacgatgggcgatggcaggcagataccttgcggcctgaagtttgtgctgaatgctgcgctagatccagcccgtaacgtcacaccggctcatgagtttttccatctttatcaatatggttacgcggtgtttaaacaacgatggtatctggaaggaatggcgcgctggatggaaaatagttttaaagcgccagagaaaaatacccgtcgtctggccgtgttaccggcctgtgaaagtaacttctcgcgcggctactctgcggccaactactgggcaagcgtcgcggcggcgcgatttgccagcgtcgcgctgcctgccgctgctcagcgttttcgctacagcgatggttctacggtgttgattgcgcaggacgttgccgggggaggaatgctacagcctttctttaatcagctgtcccgcaatagcgctgcgcagtcaagacagctgaatgtcgctaatactcgttggtcagaagctcaacaacaggccccgcagtttaacggcgcgatttgtcaggctttagctgacgcagaggttgagcattaa

SEQ ID NO: 88120 - DNA, 318 bp, Enterobacter aerogenes
atgattgccagcaaattcggtatcggccaacaggttcgccatacgctactcggctaccttggcgtaatcgttgatatcgatccagagtattcgcttgacgagcccgccgcggatgaaatcggcgccaacgatgaactgcgcgcggccccctggtatcatgttgtgatggaagatgaggacggccagccggtccacacctacctcgcggaagcgcagctcagcagtgaagccagcgatgaacatcccgaacagccgtcgatggacgaactggcgcagactatccgtaagcagttgcaggcgccgcgtctgcgtaactaa

SEQ ID NO: 88121 - DNA, 1203 bp, Enterobacter aerogenes
atgacagattccattatcccccgcttagtattagccaaaggacgcgagaaatccctgctgcgtcgccatccatggattttctccggcgccgtcgcccggatggaaggtaaagctcgctccggcgagacgatcgatatcgttgattcgcaggggaaatggcttgctcgcggcgcctattcgccctcctcgcagatccgcgcccgcgtctggagtttcgatcgtcatgaagctatcgataatgcttttttcgagcgtcgcctgcagcaggcgcaaacctggcgtcaatggctggccgaacgcgatggtcttgacagctatcgtttaatcgccggggaatccgacggcctgccaggcgtgacaatcgatcgctttggcgatttcttcgtcctgcagctgttgagcgccggcgcggaatatcagcgtgcggccatcgtcagcgctctgcagaccctgttcccgcaatgctcgatctacgatcgcagcgatgtggcggtacgtaaaaaagaaggattggacctggcgcaaggcccggtggtaggcgaactgccgccagcgctactgcccattaccgaacacggtatgcagctgctggtagatattcagggcggccataaaaccggctactatctcgatcagcgcgatagccgtctggcgacccgccgctacgtcgccgataagcgcgtcctcaactgcttctcttataccggcggattcgcggtttctgcgctgatgggcggctgccgccaggtcaccagcgttgatacctcacaagaggcgctggatgtcgccagacagaacgttgagctcaataagctggatctgtcgaaagccgaattcgtacgcgacgacgtgttcaaactgctgcgtaaatatcgcgatcagggggaaaaattcgacgtcatcgtcatggatccgccgaaattcgtcgaaaacaaaagccaactgatgggcgcctgccgcggttataaagacattaatatgctggcgatccagctgttgaacccaggcggcgtactgctgactttctcctgttccggcctgatgaccaccgatttatttcagaaaatcatcgccgacgccgcaatagatgccgggcgtgatgtacaatttatagagcagttccgtcaggctgccgatcacccggtgattgcaacctacccggaaggactgtatctgaaagggtttgcctgtcgcgtcatgtaa

SEQ ID NO: 88122 - DNA, 282 bp, Enterobacter aerogenes
atggcgaaggtatgcacgatggcgtgggttcacggagtcgtccagggcgtgggattccgctattcaacgcagcgtgaagcgctgcagctggggctgaccggttatgcgcgaaatctggatgatggcagcgtagaagtgctggcctgcggggaagcggagcaggtggaaaaactgattgcctggcttaaggccggcgggccgcgtagcgcaagggtcgacagggtgttaactgagccccatcaacccaccagagagtggcaaaaattcgctattctctattaa

SEQ ID NO: 88123 - DNA, 330 bp, Enterobacter aerogenes
atgtttatctttgaaggcagtgaaatagagaccgatagcgaaggctatctgaaagagacgactcagtggagtgaagcgatggcggaggttatcgccgctcaggaagggatcagcctgtccgtcgaacactgggaagtagtgcgcttcgtgcgcgatttttatctggagttcaacacttcgccagccatccgtatgctggtcaaagccatggcgaataaattcggtgaagagaaaggcaacagccgctatctgtaccggttattccccaaagggccggccaagcaggcgacgaaaatcgccggcctgccgaagcctgtaaagtgcatttaa

SEQ ID NO: 88124 - DNA, 660 bp, Enterobacter aerogenes
atggatcgtataattacctcatcgcgtgaccgttcatcgctgctcagcacgcacaaagttctgcgtaacacctattttctgctcagcctgacgctggcgttttcggcgatcaccgccaccgccagtaccatgctgatgctgccgtctccgggccttatcctcaccctggtgggtatgtatggtctgatgttcctgacctacaaactggctaataagccaagcggtattctggcggccttcgcctttaccggcttcctcggctacattctggggccaatgctgaacgcttacctgtccgcaggcatgggcgatttgatcggcctggcgttgggcggcaccgccctggtcttcttctgctgctcggcttacgtgttgacgacgcgcaaagacatgtccttcctcggcggcatgctgatggcgggcgtggtggtcgttctgattggtatggtggcgaacatcttcctgcagctgccggctctacatctggccatcagcgcggtgttcatccttatctcttccggcgcgattttgtttgaaaccagcaacatcatccgcggcggcgagaccaactacattcgcgccaccgttagcctgtatgtttcgctgtacaacatctttgtcagcctgctcagcatcctcggcttcgccagcagagactaa

SEQ ID NO: 88125 - DNA, 1629 bp, Enterobacter aerogenes
atgaaacgacaacaatataaccacatcacacacgcattactggttttgggtttactcggcagcgccgccacggcaatggccgcccaggtcccgcagggtaccgaacttgcagcaaaacaggagcttgtcaggaacaacggtaatgaacccgcttcgctcgacccgcataaggtcgaaagcgacgtcgagtttaatatcattagcgatctgttcgaagggctggtaagcgtttcgccgcagggcgagattcagccgcggctggcgctgaagtgggagaataaagataacctcatctggactttccatctgcgtccggggatcacctggtccgatggttcagcgattaccgcgcaggatatcgtctggagctggcagcggctggtcacaccgaccaccgcttcgccgtacgccagctatccgggcaatatgcatattgttaacgcccgcgatatctcggaggggaaacagccgccggaaactctcggcgtaaaagcgctggacgataccacgctgcaggtcacgttaaaccagcctaacgccgccttcctcgcgatgcttgctcacccgtcgctggtgcctattgataaggtgctggtggagcgttttggggataaatggactaaaccggaacatattgtcaccagcggcccttacacgctgtcgaagtgggtcgtcaacgagcgcatcgtggcgcaacgcaatcctaagtactgggataatgaacatacggtaatcaataaagtgacctatctgccgattacttccgaagcggcggatgtgaatcgttataaagccggtgagatagatattgtttatacggtgccggtgaaccagtttgcgttactcaagaaaacgatgggctcgcagctgaacgttgcgccacagctggcgacctactattacgaactgaataccactaaaccgccctttaatgacccccgagtgcgccgggcgctcaacatggggctggataaagatatcatcgccgataaggtgatggggcagggacaacgtccggcatggctgattagccagcccgatatcggcggcgtcacgctgaaacaaccggattacgccagctggccgcgcgacaaacgcattgccgaggcaaaaaaactgcttaacgaggcgggctttaatgaaagccatccgctggtctttaatctgctgtataacacctcggagacgcaccagcgcattgctatcgccgccagttcgatgtggaagaaaaatctcggcgtagaggcgaagctgcagaaccaggagtggaagaccatgctggataccatgcatacgcataattttgatgccgtacgttatgcctggatcgccgattatgacgatgcggcgtcattcctgaataacttccgcaccggcgacagcgaaaacaccagccagtacagtaacccggcctatgataaggcgctgcatgatgcggcgaaggcggcggataccaccgcgcgaggcaaattctatcagcaggcggaggatctgttggctgaggatgtgcccgcgattccggtttatcactatgtgcgtacccatttagtgaagccgtgggtcggcggcttcgagccggataagctgggttactactacaccaaagatatgtacatcataaaacattga

SEQ ID NO: 88126 - DNA, 933 bp, Enterobacter aerogenes
atgaaccatttatccgcaatcagaacattcgttagcgccgctgactataaaagtttcagcgccgccgccaaagccttaaatattgaagtatccaccgtctctcgccatatttccgagctggaagagtatttacaggtgacgttgtttaaccgctcaacccgtggattagcattaaccgaaaccggggcatttttttactcgcacgcccaacaactgttattacaatgggaggaaacccgtcagttaacttccgcactggataaacagccttccggcctgctgcggttaagcgtacccagtaccttcggccgtctgcacgtgatgccttttgttgatgaatttcttcgcctgcaccccaacatttcgctggatattagttttaacgatgaagtgcaggatctgattgaagcgcgcatcgacctgagtattcgcatcggcattttgcctgactcctcgattcatgcccgtaaactggcttctcagacgcgttcagcctgggccagcccgcagtggattgcggaaaaccgcccttctgccacgccgggcgccgaccagcagcagatcaatatcgtgatgttttctcgcctgcatggcgccggttggtatacccgtaagatgggttcagaagatgaatggcagcgcatctcgattaactaccgactgagcgttagcgatagcgccgccatgctttatgcctgcgtcaatcacaccgggattgcgattttaccgaactggctatcgcagcaggcagaagaacaagggctcattcaacgggtattcccggagtgggaatttagtatgttccctggcgaaaccgccatctggatgctgtacccgcaaaacaggagagtgccgcataaagtccgagcctttatcgactttatggttgaaaagattgggatgccgccctactgggaggaggagactcattaa

SEQ ID NO: 88127 - DNA, 1305 bp, Enterobacter aerogenes
atgaataaattactcctgcccctgcccgttatgctcgccacagcgctggcgctgtcaggatgcgatgagaaagcgaaactcagcccggatcagcaggtagggcccgatcccgtaatgccgaaggcccaggatttcctgatgccgccgatgcaggttccccgcggcgtgggctggaagagagatggacaaccggcggttgcccaggggctgaaaatagaaaaaatagccgatggattcctgcatcccagaatggtctatgtcctgccaaacgacgatattctggtcgttgaaagcaacggtcctggcgaggaaccgctgactacgccgaaacagctgattgccgggatagtgaaaaatcagtcaggcaaaggtggaaaaggcgggaatcgcattacgctattgcgtaaaaacgccagcggttgggagaaacatattttccttgaacacctgcactcgcctttcggcgtacaactgattggagatgatctttacgtcgccaataccggcaacatcatgcgttatcactaccagccgggggcgacacatatcagcgatgcggggagcgagctggctgacctgcccagcaccgtcaatcaccactggaccaaagcgttactggcaagcccggatggtaagaagctgtatgtgggcgtcggctcgaacagtaatatcactgagaatggactggatattgaatatcgtcgcgccacggttctggaggttgatacggcaaccggcgcaagccgtatcttcgccagcggtatcaggaatcctaccggactcggttgggaaccgcagacgggcaagctttgggctattgccaatgagcgcgatgaaatcggcgccgacctggtgcccgattatttaacttcggtgcaggatggcgggttttatggctggccgtggagctatttcggacagcacgttgaccgccgcgtacagccgccgcgcccggacatggtcgccaaagcgatcaaaccggattatgccctgagctcccacgttgcgccgctgggaatgctgttttataccggaaaaatgttgtcgcaaacctatcagggcggcgtgtttatcagcgagcatggcagttgggaccgttcgccgctgaatggttataaagtcagcttcgtcgcttttaaagacggcaaaccggtcggtaaaccacagagcgtgatcaccggctttgtctctcgcgatgagaaagagctgtacggcgcgccggtcggactcgcgcaggataatgaaggggcgttaatcattgccgacgatgtcggtaataccgtctggcgcgtcagcgcaaaataa

SEQ ID NO: 88128 - DNA, 438 bp, Enterobacter aerogenes
atgagtgaacgctctcatgaccgaggtaatagccttgcgatggtcatatataatctactcaatccggtgccttacggcttttttatcgccggtctcatcttcgatattatttatctctacagcactaacgtgatgtggggaaaatgcgccagttggcttattgcccttggccttatttttgccatcattccgcggttgattaatctggcgcaggtctggttttttactcctcgacgcccggcggcaaaaattgatttctggctaaaccttatcgctattattgccgcgttggtaaactgttttgttcatagccgcgacgcctgggcgattgcgccgcagaacgtaatctattcatcgattaccgttatctgtctgcttgtcgccaatattatcagctccacttgcctggctaataataaggggattcgccatgaataa

SEQ ID NO: 88129 - DNA, 888 bp, Enterobacter aerogenes
gtgaatattcgctacgttagatatttcctcgccgtcgccgaacatcagggttttacccgtgcggcggaagccctgcatatttcacaaccggcgctctcacagcaaatcaggatgttagaagagagcctggatgcgcagctttttgaccgtagcggccggcatattcatctaacggacgcgggagaagtgtttttgcagtatgcccgtcaggcatttcaactgctggatgagggtcaacgcgccattcatgatgtcgcagacctcagccgcggttctctacgtattgccgtgacgcccacttttacttcctatttcgtcgtcccattagtggcggaatttcatgcgcgttatccgcatatcacgctggatattcaggagatgccgcaggagaagatggagggcctgctgctggaaaatgagctggatattggcattgcctttgccggggggaccgcgccagagattgtttccaccccgctgttacaggaagtgctggcgttggttgtcgcggaccatcacccgttggcccgcgaagaatccctcaccttgagccagctcgccgcggaggagtttattctgctcaatcatcatttcgccacccggttgcaaattgaccactgcttacagcaagccggttttcacccgcaggtgaccattgaaatgcactcgatcaatgccatcctcgatatcatccagcgaacccaattagtgaccattctgccgctaaatgtcgccgcccagcgcactggcctggtgacccgattgcttaaagaagccgcgcttgagagaaccgcggtgttaatgcagcgcaaaggcgcccgaccaaaagctgcggcgcgaattttcgccgaaatagcccgggagctggcagcccaaatagaaagttaa

SEQ ID NO: 88130 - DNA, 651 bp, Enterobacter aerogenes
atgaaagaaatcattgacggttttcttaaatttcaacgtgatgcatttcctgagcgcgcagaactgtttaaaagtttagcctcccggcagagccccagtacgctgtttatttcctgttccgatagccgaatggttcctgaactggttacccagcgtgaacccggcgatctgtttgtcatccgtaatgccggcaatattgtcccttcttacggttcggagcccggcggcgtgtcggcctcggtggagtatgccgttgctgtcctgaaggtcacggatattgtgatttgcggtcactccgattgcggggcgatgacggcgattgcgcagtgtagctgtctggatcatgtccccgccgtcaaacactggttgcaatatgcggattcggcaaaagtggtgaacgatgcccgcgagcatcgcgatccacaggccaaaaccgcggcgatggtgcatgaaaatgtcattgcccaactggcgaatattcaaacccatcctgcggtacgcctggcgcttgatgaaggacgtctgtcgctacatggctgggtatatgacattgaaacaggggatattgccgcctatgacggcaatgccagagcttttatttcgctggccggtcatccggataccagagcggtgccggtttacggtcagtaa

SEQ ID NO: 88131 - DNA, 471 bp, Enterobacter aerogenes
atgattcagtcacaagtcagccgcgaagttcgtctggagttagcgaataaaattttgctgattaaagccaaaaaggatctctcctttgcacaactggttgaaggcaccggtttatccgaagccttcgtgacggccgcgctattgggccagcatccgctgcctgtcgaagtcgcgaaaatggtaggcgcaaaactggagctcagcgacgatgatgttttgctgctgcagaccatcccggtcagaggttctattgaagaccgcgtaccaacggacccgaccatgtatcgcttctatgaaatgctgcaggtctacgacactacgctgaaagcgctcattcatgaaaaattcggcgacgggatcatcagcgcgattaattttaagctggatgtgaaaaaagtcagcgatccggaaggcggacatcgtgcagtgattactttcgatggaaagtatctgccaacgaaacctttctga

SEQ ID NO: 88132 - DNA, 1014 bp, Enterobacter aerogenes
atgaaacctaaacgcattaccattaaagatatcgccgaactggctggcgtctctaaagccaccgccagcctggtcttgaacggtcgcggtaaagagctgcgcgtggcgcaggagacgcgcgaacgggtgctggctatcgcccgcgagcagcactaccagccgagtattcacgcccgttcactgcgcgatagccgcagccataccattggtctggttgtgccagagatcaccaactatggttttgccgtgttttctcacgagctggaaaccctgtgccgcgaagccggcgtacagctgcttatctcttgcaccgatgagaatcccggtcaggagagcatggtggtcaataatatgattgcccgtcaggtcgatggtttaattgtcgcctcttgcatgcatagcgacgccgactatctgaagctcagcgagcagctgccggtggtgctgttcgaccgtaatccaaacgacagcgcgctgccgctggtgatgaccgattcactggcgccgacggcggaacttatcgcccgtatcgccgggcaacacgcggatgagttctggtttctcggcgggcagccgcggctctcgccctcgcgcgatcggctggccggatttagtcagggattagcccaggcaggggttgagttacgcccggaatggatcatcaacggcaactatcacccaagctcaggctatgagatgtttgccgcgctgtgcgcccgtctcgggcggccgccgaaggcgctgtttactgccgcctgcggcttggtggaaggggtactacgttatatgagccagcataacctgctggattccgggatccatttagccagcttcgatgaccactatctgtatgattcgctatcgctgcgcatcgacaccatccagcaggataaccgccagttggcctggcactgctacgatctcatcagtcagctgatcgacggtaaaatgccacagccgctacagcgctatctgcccgccacgctgcaaatgcgttatcagccagccagataa

SEQ ID NO: 88133 - DNA, 1401 bp, Enterobacter aerogenes
atgtcgcagccttctttgttaccgttggtcctgcaggccgtcatgaaccaccagccgcgcgcgctgcgggataagcactatccgcagtggcatctggcgccggtatgcgggctactgaacgatccgaacggttttatccacttcaatggtcgttatcatctgttttatcagtggaatcccctcgcctgcgatcaccgctataagggctggggacactggagttcgccggatctgctgcactggcggcacgaaccgattgccctgctgccagaggaggagtacgaccgtaacggttgttactccggcagcgcggtagataacaacggcatcctgacgctgtgctacaccggtaatgtgaaatttaacgatggcagccgtaccgcctggcagtgtctggcgacgcaaaatcccgacggcacttttcgcaaacagggcccggtgctggcgctgccagcaggctatagcggccacgtgcgcgatcccaaagtctggcgcgatggcgatcgctggttgatggtgctgggcgcgcgcgatctggccgaccgcggcaaggtactgctattcagctctactgatttgatgcagtggaatagccatggcgaaattgccggtagcggacttaacggcttgaaagacgccggctatatgtgggaatgcccggatctgttcccgctcggcgatcggtatattttactgagctgcccgcagggattgccgcgtgaggcacagcgcttcctgaacacctatccggcagtctggatgcagggccatttcgatcaaaccgccgccacctggcgccatggcgcgatcgaagagctggatagcggcttcgaattctatgcgccgcaaaccaccctggcggaggatggtcgccgtctgctggttggctggatgggggttcccgacggagaagagatgcagcaacctacgcgggcccacggctggatccatcagatgacctgcctgcgggaactcagctggcgccacggcacgctgtatcaaaatcccgtgcgcgaactggcggcgcttcgcggcgaggcgcaaggctggcagaccgaaccgctggcgctgcagccgatggaactggccttcgaggttgcgccagacgatgcgctgacgctggatttcgcgggcgcgctgcagctttcgctggacagccgcggcgtacgtctggcccgtcgaagcctggtggccgatacagtcgattaccgttactggcgcggcgcggcgcataaactgcagatcctcatcgaccgttccagcgtcgaaatctttattaacgatggcgtgggagtgatgagcagccgcttctttgcggattatcctggaaaactggtattcagcggtgcgacgccgggggcattctgctgctggccgctgcggccatgcatggtagaataa

SEQ ID NO: 88134 - DNA, 1371 bp, Enterobacter aerogenes
atggattttcaacagatttctcgcgcgctgctgccgctgctcggcggcaaagaaaatatcgccagcgccgcgcactgcgccacccgcttgcgtctggtactggtcgatgacgcgctcgccgaccagcaggccatcggtaaagttgagggggtaaaaggctgctttcgtaacgccggccagatgcaaatcatcttcggtaccggcgtggtcaataaagtgtatgccgcttttattcaggcggccggtattagcgagtcgagcaaatccgaagccgcagacctggcggcgaaaaaactgaatccgttccagcggatcgcccgcctgctgtcgaacatctttgtgcccattattccggcgatcgtcgcctccggcctgctgatgggactgctggggatggtgaaaacctacggctgggtcgagccgggcaacgccatctacctgatcctggatatgtgtagttcggccgcttttattatcctgccaatcctgatcgggtttaccgccgcgcgtgaattcggcggtaacccttatcttggcgcaaccctcggcggtattcttacccacccggcgctgaccaacgcctggggagtggcttcgggattccataccatgaatttcttcggcctcgaggtggcgatgatcggttatcaggggacggtgttcccggtgctgctggcggtgtggtttatgagcctgcttgagaagcaactgcgacgcctgattcccgacgcgctggatctgatcctcacgccgttcctgacggttattatctccggttttatcgccctgctgataatcggcccggccggtcgtgccctcggcgacggcatctcatttattctcagcacgcttattgctcatgctggttggctggcagggctgctattcggtggactgtattcggtgatcgtcatcaccggtatccaccacagcttccatgccatcgaagccgggctgctcggtaacccgtcgatcggcgtcaatttcctgctgcctatctgggcgatggctaatattgcccagggcggcgcctgtctggcggtgtggtttaaaaccaaagatgcgaaagtgaaagccattgccctcccgtccgccttttcggcgatgctgggcatcaccgaagcggcgatattcggcatcaacctgcgctacgttaagccctttatcgccgcgttgattggcggcgcggcaggcggcgcctgggtcgtctccatgcacgtctatatgaccgccgtcggcctgaccgccatccccggaatggctatcgtgcaggccagttccctgcttaactacctcatcgggctggctatcgcgtttgtggtcgcctttatcgtttcgctgacgctcaaatacaaaacggatgcagaataa

SEQ ID NO: 88135 - DNA, 924 bp, Enterobacter aerogenes
atgaccagtaaagtatgggtactcggggatgcggtcgtcgatctactgcctgagggcgatggtcgtttattacagtgcccgggcggcgcaccggctaacgtcgcggtcggcgtcgcgcggcttggcggcaatagcgggtttattggtcgggtcggcgacgacccttttggccattttatgcgtcagacgctgtgccaggagaaggtggatatcagccatctttctttagatcccgcacaacgtacctcaaccgtcgtggtagcgctggatgaacacggcgaacgcacctttacctttatggtccgtccaagcgccgatctttttttacaaccagacgatctcccgccatttgaggccggccagtggttgcacgtctgctctatcgctctcagcgccgagcccagccggagcagcgctttcgcggcgatggaaaagattaaacataccggcggcagcgtcagcttcgaccctaatatccgcagcgatctgtggcaggatccccagctgttacggcgttgtctcgaccgggcgctggcattggctgacgtggtgaaactgtcggaagaggagttggcctttatcagcggtagcgacgatattgcccgcggtattgtgcggttccgcgagcgctttcagccaaaactgctgttaatcacgcaaggaaaagccggggtgcaggcgctgttccagcaacagcatattcacttcccggcccgtccggtggtcagcgttgataccaccggagccggcgatgcctttgttgccgggctactcgccagtctcgccgctcacggcttccctgaagatgtcgccgcgctggagccgatcgtcgcgctggcgcaaacctgcggcgcgctggcgaccaccgccaaaggcgcgatgaccgccttaccgtaccaggccgatgtgaaccgccagtattaa

SEQ ID NO: 88136 - DNA, 351 bp, Enterobacter aerogenes
atgggtacctccgaattacttaagcatatttatgacttcaacctgtcgtatttatttttagcacagcggctgatcaacgatgaaaaagtatccgcaatgtttcgtctgggaattgacgaaaccatggttgataccctggcgcaactgacgttaccgcagatggtgaaactggctgaaactaatcagctggtgtgcaatctgcgcttcagcgaccatcagactatcgagcaattgaccaaagagtcgcgcgttgatgacctccagcagatccataccggtatcctgctttccagtcacctgctgcaagagctccgcgccaaagaaggcgctgcagcgaagaaaagtgtttga

SEQ ID NO: 88137 - DNA, 582 bp, Enterobacter aerogenes
atggctgagaaaagtattgttcaggaagcgaaggatattcagctcgccatggagctgatttccctcggcgcgcgtctgcagatgctggagagtgaaactcagctcagccgcgggcgcttaattaaactttacaaagagctgcgcggcagcccgccgccgaaagggatgctgccgttctcgacggattggtttatgacctgggagcagaatattcattcgtcgatgttctacaacgcctatttgttcctgctgaagagcggcaaatgcagtggagtagaagcggtgatcaaagcctatcgcctgtacctcgaacagtgtccgcaagaagcgggcgaagcgccgctactggcgttgacccgcgcctggacactggtgcgctttgttgatagcggtatgctgcagctctctgcctgcaacaactgcggcggctcatttatcacccacgcgcaccatccgcagcacgatttcgtctgcacgttatgccaaccgccttcacgcgccgtaaaaagacgtaaactttctccgcaactggccgatataacctctcaactgctggacgagcaggctaaacgcgtcatgtaa

SEQ ID NO: 88138 - DNA, 891 bp, Enterobacter aerogenes
gtgctagtgatattgggttatctcgtggttctgggagcggtatttggcggctatttactggtgggcggccaccttggcgcgctgtaccagccggcggaattcctgattatcggcggcgccggcatcggcgcgtttatcgtcggcaacaacggaaaggccatcaaatccacgctgcgggccttgcccaaaatggtacgtcgctccaaatacagtaaggcgctgtatatggatctgatggcgctgctgttcctgctgctcgcaaaatcccgtcaacaggggatgctgtcgcttgagttcgatatcgacaatcctcaggaaagtgaaattttcgctaattatccgcgcatccttgccgataaccatctggtggagttcataaccgattatttacgcctgatggtgagcggcaacatgaatgcttttgaaattgaagcgctgatggacgaagagatcgaaaccttcgaacaggagagcgaagtgcccgccggcagcctggcgatggtcggcgactctctgccggcatttggtattgtcgcggcggtaatgggggtggtgcacgcgctggcctcggcggaccgtccggcggcagagctcggggcgcttatcgccaacgcgatggtggggactttcctcggcattctgctggcctatggatttatctcgccactatccacgctgctgcggcaaaaaagcgccgagaccgtcaagatgatgcagtgcatcaaggtgacgttgctctccagcctcaacggctacgcgccgcaaatcgccgtcgaatttggccgcaaaacgttatacaccaccgagcgcccgtcgtttgtcgagcttgaagagcacgtacgccaggtgaaagcgcctgtcgcgcaggcgacggaaagcgaagaagcatga

SEQ ID NO: 88139 - DNA, 924 bp, Enterobacter aerogenes
atgaagcataatcacccggtggttctggtcagaaagcgcaaatcacaccagccagcccatcacggcggttcgtggaagattgcctatgccgattttatgacggcgatgatggccttcttccttgtgatgtggctgctggcgatcgccagcccgcaggagctgacgcaaatagccgaatatttccgtacgccgctgaaagtcgccctcaccagcggcgataaaagcagctcggaaagcagcccgatccccggcggcggcgaagacccgacccgtgaagtcgggctggtcagcaaacagatcaataccgcggataaacgcgccgaagagctacggcttaacaaactgcgtgacaagctcgatcagttgattgagtcagacccgcgtctgaaggcgctacgtccgcatctgctgatcaacatgatggacgaaggactgcgcattcagattatcgatagccagaatcgcccgatgtttaaaaccggtagcgcccaggtggaaagctatatgcgcgatatcctgcgggcgatagcgccaatcctcaatgatttgccgaacaagataagcctcgccggccacaccgatgacatcccctacgccagcggcgaacgcggttacagtaactgggaactgtcggcggatcgcgccaacgcctcgcgccgcgagctaattgccggcggcctggcggaagggaaggtgctgcgggtggtcggtatggcggcgaccatgagcctgaaacagcacggcgctgatgatgccatcaaccgccgcattaccgtactggtgcttaacaaagagacccagcagagcattgagcatgaaaatggcgaaagcaatgcgctggagattagccagccggatacgctgccaaagctggtcgcgcccgcgccggttaaccgtgattcacacccagaggtgaccccatga

SEQ ID NO: 88140 - DNA, 1959 bp, Enterobacter aerogenes
atgagcatggatattagcgctttttatcagactttttttgatgaagcagacgagctgctggcagacatggagcaacacctgctggagctggatccgcaggcccccgatatcgaaccgctgaacgctatttttcgcgcggcgcactcgatcaaaggcggcgcggcgacgtttggcttttccgtattgcaggaaaccacccatctgctggagaacctgctcgacggcgcccggcgcgaggagatgcgcttgagcaccgaaattatcaatctgtttctggaaaccaaagatattatgcaggagcaactggacgcctataaaacctcgcagcagcctgacgctgagagctttgactatatctgccaggcgctgcggcagctggcgctggaagcgcagcagcaggacgcgccagccgcgccgcccgtcgtggcccagcctgcgccgacggccgtcgccggcggtatgcgcgtgagtttaaccgggcttaaagccaatgaaattccgctgatgctggaagagcttggcaatctcggcgaggtacatgatccgcagcaaactgacaatagccttgaggtgaccctgctgaccaccgccagcgaagaagatatttgcgcggtgctctgtttcgttcttgagccggaacagatcagctttaccacgccgccaaccactgccgctaaaccattgccatcggccgaagttgtgccgccgccggtcgcccaaccgcagcctgctgtcgtcgagccgccgaaagcgccgagagcgaaggccagcgaatcgaccagtattcgcgtggcggtagagaaagttgaccagttgattaacctcgtcggcgaactggtgatcacccagtccatgctggcgcagcgctcgggtaacctggatccggtgacgcatggcgatctgctcaacagcatgagccagctggaacgtaacgctcgcgacctgcaggaatcggtgatgtcgattcgcatgatgccgatggaatatgtattcagccgctacccgcggctggtacgcgacctggccggcaagctcaataagcaggtggaactgacgctgcagggcagctccaccgaacttgataagagcctgatcgagcgcattatcgacccgttaacccacctggtgcgcaatagcctcgaccacggtattgaagatccgcaaacccgtctggcggcaggtaagtctgaggtgggcaatctcattctgtccgctgaacatcagggcggcaatatctgcatcgaagtgatcgatgacggcgccgggctcaatcgcgaaaaaattctcgccaaagcggcggcgcaggggctggcggtcagcgacagcatgagtgatgaagaggtcggaatgcttatttttgcgccgggcttttcaaccgcggaacaggtgaccgatgtctctggccgcggcgtcggcatggacgtcgtgaaacggaatatccaggagatgggcggtcacgtggaaatccattcccgtgcgggcaaagggacctcgattcgtattttgttgccgctaacgctcgccatcctcgacggcatgtcggtcaaggtcaatgaagaggtctttattctgccgctcaatgcggtgatggaatcgctgcagccgcaggccgaagacctgcatccgatggccggcggcgaacggatgctgcaggtccgcggcgagtatctgccgctggtggagctttacagggtgtttgatgtcgccggggcgaaaaccgaggccacccagggcatcgtggtgattctgcaaagcgccggccgccgctatgcgctgctggtggatcagctgatcggccagcaccaggtggtggtgaaaaacctggaaagcaattaccgcaaagtgccgggaatttccgcggcgacgatcctcggcgacggcagcgtagcgctgatcgtcgacgtgtcggcgctgcaaatgctcaatcgggaaaagctgctgagcgcagcggccgcataa

SEQ ID NO: 88141 - DNA, 501 bp, Enterobacter aerogenes
atggcaggattagcaaccgtcagcaaattggctggcgaaacggtaggtcaggagtttttaatctttaccctcggcaatgaagaatacggcatcgatattctgaaagtgcaggagatccgcggctatgaccaggtgacgcgtatcgccaacaccccggatttcatcaaaggcgtcaccaatctgcgcggggtgatcgtgccgattatcgacctgcgggtaaaattcgcccagcagggcgtctcttatgatgaaaacacggtggttatcgtgcttaacttcggccagcgggtggtggggattgtggtcgacggcgtctccgacgtgttgtctcttaccgccgaacagatccgcccggcgccggaattcgcagtgacgctggcgaccgaatatctcaccggtcttggcgcgctcggagagcgcatgttgatccttgtggatatcgaaaagctgctcagcagcgaagagatggcgctggtcgataacgtcgccaaaagccactaa

SEQ ID NO: 88142 - DNA, 1671 bp, Enterobacter aerogenes
atgtttaatcgtattaaggtcgtcaccagtctcttattagtgctggtgctatttggcgcattgcagctgatttcaggcggtctgtttttttcgtcgctgaaaagcgataaagagaactttaccgtcctgcaaaccatccgtcagcagcagttgctgctgagtgaaagtcgggtcgatctgctgcaggcgcgtaactccctgaaccgcgcagggatccgctacatgatggataccaacaaaatcggcagcggcgcgactatcgacgagctgctggcgaaagcgaaagaagagctggcgcgcgccgagcgcaactacaccgcctatgaaaaaatcccgcaggacccgcgtcaggatcctcaggcgacggaaaagcttaagcagcagtatggcatcctgtacggcgcgctgtcggagctgatccagctgctgggcgagggtaaaatcaacgccttcttcgaccagccgacgcaaaaataccaggacgatttcgagcagacctataacgcctatctgcagcaaaacggcaagctgtatcaaatcgccgttgacgctagcaacagctcgtatagctcggcgatctggaccttaattgtggtcatcatcgtggtgctggcggcgatcgtcggcgtgtggatgggtatccaccatatcctggtgcgcccgctgaaccgcatgatagaacacatcaaacggatcgcgtccggcgatctgacccagcctattccggtgaccagccgtaatgaaatcggcgtgctggccgccagcctcaagcacatgcagaacgagcttatcgaaacggtaagcggcgtgcgtcagggggcggatgccatctatagcggcgcatcggaaatcgccgccgggaataacgatctctcttcgcgcaccgaacagcaggcggcatcgctggaagagaccgccgccagtatggaacagctgacagcgacggtgaaacagaacgccgaaaacgcgcgtcaggccagccagctggcgctgagcgcctccgaaactgcgcagaagggcggcaaagtggtggctaacgtggtggaaaccatgcacgacatcgccagcagctcgcagaaaattgccgatatcaccggcgttatcgacggtatcgccttccagaccaacatcctggcgcttaacgccgcggtagaagcggcgcgtgcgggtgaacaaggtcgcggcttcgcggtcgtggcgggcgaagtccgcaacctggcgcagcgcagcgcccaggcggccaaagagatcaaagcgctgatcgaagactcggtcaaccgtgtggatatgggctcggtactggtggaaagcgccggcgacaccatgggcgatatcgtcaatgcggtcacccgcgtgaccgacatcatgggtgaaatcgcctctgcttccgatgaacagagccgcggtatcgaccaggtcggccaggcggtagcggaaatggatcgcgtcacccagcagaacgcctcgctggtggaggagtcggcctcggccgccgccgcgctggaagagcaggccagcctgctgacgcagtcggttgccgtcttccgcctgaagtcggaagggcaggaagagtataaagcgccggtcagcaataaaaccgcgcctgccgccatcgctacgcataaaaaaaccagcgccagcgactaccaggataactgggagacgttctaa

SEQ ID NO: 88143 - DNA, 1611 bp, Enterobacter aerogenes
atgtttaaccgaatccgtatctctaccagtcttttcctgctgctgatctccttttgcatcatgcaactgatcagcaccgggctctcttacgtcgcgctacgcgccgacaaccacaatcttgaacgtattaccgtcagtagccagcagcgcgatgcgcttagcctgagctgggtatcgctgttacaggcgagaaatacccttaaccgcgccggtacccgcgcggcgctgaaggtgccgcaggagcaggtggatgcgctgatgggcggcgcccgcagctcgctgcaaaaagccgatctctattttaaccagttcctcgacacgcctcgcgcggatgagcaggaacagcagttggccgatgccacgcgtgatagctacgagaatctacgcggcgcgctgcgcgaactgatcgtgttcctcgaaaatcgcaacctgcaggcctttatggaccagccgacgcagaaaatacaggaccgctttgaggccgactttgtgcaatatctgcagctggcgaaggcgacgaccgatgaagccagcgcctccagccagcaggcctacggctggtcaatctggttggttgccggggcggtgctgatgctcttggtagtcaccctcagcgcgatgtggtggctgcgaaccatgctggtgcagccgctgaatattattcgcggccatttcgaacgtatcgccagcggcgatctttccgcaccgattgaggtctatgggcgtaacgaaatcagccagctatttgccagcctgcagcgcatgcaacagtcgctgattggtaccgtcggcgcggtgcgcgacggcgcggagtcgattcttatcggcctgcaggagattgccgaaggcaacaacgatctctcctcgcgcaccgaacaacaggcagcttcgctggaagagaccgccgccagtatggagcagctaacggcgacggtaaaacagaatgccgataacgcccgccaggcatcgcagctggcgcgtgatgcctcctccaccgccgccaaaggcggcgagctggcggatgacgtggtcaccacgatgcacgatatcgccaacagttcgcaaaaaatcggcgcgattaccagcgtcatcgacggcatcgctttccagaccaatattctggcgcttaacgcggcggtggaggcggcgcgcgccggtgaacaggggcgcggctttgcggtggtggccggtgaagtgcgcaacctggccagccgcagcgcccaggcggcaaaagaaatcaagctgctgatcgatgaatccgtcagccgcgtcaaacacggctcggtgctggtggaaaattccggcgccaccatgcaggacatcgtgcgctcggtcacccgggtcaccgacatcatgggcgaaatcgcctccgcctccgatgagcagagccgcggcatcgagcaggtgacgcaggcggttacccagatggatcaggtcacgcaacagaacgccgccctggtggtggaatcggcttccgccgccgctgcgctggaagagcaggcgattaccctcgccgatgcagtggcggtattccgtctggcggacgacaacttcgtcgcgccggaaacctcatccacggtaaaggagaccctggattgtcaaaccgcataa

SEQ ID NO: 88144 - DNA, 873 bp, Enterobacter aerogenes
atgaagcagacgacatcaaccgcggcgcgtgaaagcggatcggcgctggcgcagatggcccagcgtctgccgctctccgacgcgcattttcgccgcatcagccagcttatctatcagcgcgccgggatcgtgctggcggcgcataagcgcgagatggtgtacaaccggctggtgcgccgtttacgtctgctgggcattcatgatttcggcgactacctggcgctgctggaaagcgacccgcacagcgccgagtggcaggcgtttatcaatgcgctgaccaccaacctgaccgccttttttcgcgaggcgcaccactttccgattctggcggagcatgcgcgctcgcgtcccgggaactatagcgtgtggagcaccgccgcctcgaccggcgaagaaccttattccatcgccattacgctcggtgatgcgctcggggaacgtgcgggcagttgccaggtctgggccagcgatattgacacccaggtgctggagaaagcggaagcggggatttatcgccatgaagatctgcgcactctgacgccaatccagatgcagcgttattttctgcgcggcaccgggccgcatcaggggctggtgcgcgtgcgtcaggagctggcggcgcgggtcaacttccagccgctgaatctgctggcggcggagtgggcgctgccggggccgttcgacgcgattttttgccgcaacgtgatgatctatttcgataaaccgacgcaggagcgcatcctgcgccgctttgtccccttgcttaaaccgggggggctgctgtttgccggtcactccgagaatttcagccagatcagccgggatttctacctgcgtggacagaccgtgtatgggctgaccaaggagaagtga

SEQ ID NO: 88145 - DNA, 1050 bp, Enterobacter aerogenes
atgagtaaaatcagagtgttatgtgttgatgattcggccctgatgcgccagttgatgaccgagatcgtcaatggccacgccgatatggagatggtggcggtggccccggacccgctggtcgcacgggatctgatcaaaaaatttaacccacaggtgctgacgctggacgtcgaaatgccgcgtatggacggcctcgatttcctcgaaaagctgatgcgcctgcggccgatgccggtggtgatggtttcatcgctgaccggtaaaggttcggaaattaccctgcgcgcgctggagctgggggcggtggatttcgtcaccaaaccgcagctcgggatccgcgaaggcatgctggcctacagcgaactgataggcgaaaagatccgtaccgccgcacgggcgcggctgccgcagcgggccaatgaccagccgccggccattttaagccacggaccgctgctgagcagcgagaagctgatcgccattggcgcttccaccggcggcaccgaagcgattcgtcaggtgctacaaccgttgccggccaccagtccggcgctgcttatcacccagcatatgccgccgggatttacccgctcgtttgccgaacggttgaataagctgtgccagatcacggtgaaagaggcggaagagggcgaacgcgtgctcccgggacacgcctatatcgcgcctggggatcgccatctggagctggcgcgtagcggcgctaactatcaggtcaagttgcacgacggcccggcggtaaatcgccatcgtccctcggtggatgtgctgtttcgctcggtggcccggcacgccgggcgcaatgcggtgggggtgatcctcaccggcatgggcaacgacggcgcgcaggggatgctggagatgcatcgcgccggggcctataccctggcgcagagtgaggcgagctgcgtggtgttcggcatgccgcgcgaggccatcgccagcggtggggtcaacgaagtggttgaactggagcgcatgagccaacgcatgctggcgcagatcgccggcggccaggcgctgcgaatttaa

SEQ ID NO: 88146 - DNA, 390 bp, Enterobacter aerogenes
atggcagataagaatctccgttttctggtcgtcgacgacttttccaccatgcgtcgtatcatcagaaatttgcttaaagagctcggcttcaacaacgtcgaagaggcggaagatggcgcggacgcgctaaataagctgcgagccagcagctttgatttcgtggtctccgactggaacatgcctaacgttgacggcctggagctgctgcagaccattcgtgccgatgccgcgctggcggcgatgccggtattgatggtgacggcggaagcgaaaaaagaaaatattattgccgccgcgcaggcaggcgccagcggctatgtggtgaaaccttttacggcggcgacgctggaagaaaagctcaacaagatttttgaaaaattgggcatgtaa

SEQ ID NO: 88147 - DNA, 645 bp, Enterobacter aerogenes
atgagagagattccaatgcctgccagcgatgcagcgaccgcgggagagataatctcccgtatcggccagctcacccgtatgctgcgcgacagcatgcgcgagctggggctcgatcaggcgattgcccaggcggccgaggcgatcccggatgcccgcgaccgtcttgattacgttgtcaccatgacggcgcaggcggcggaacgggcgttgagctgcgtggaggcggcgcagccgcgccaggccgaactggagtccggcgccagcgcgctaaaatcgcgctgggatgagtggttcgctaatccgatcgaactggacgacgcgcgcgcgctggtgaccgacacccgtgagtatctggatcaggtgccgggccatacctcctttaccaacgcccaactgatggaaatcatgatggcgcaggatttccaggacctgaccggtcaggttatcaagcgcatgatggacgtggtgcaggaaattgaaaagcagctgctgatggtgctgatggaaaacatgccggaaccgccggtgaaagagaaacgggccaacgatagcctgctcaacggcccgcagcttgaccagaacggcgtcggcgtcatcgccaaccaggcgcaggttgacgatctgctcgatagtctcggtttctga

SEQ ID NO: 88148 - DNA, 1152 bp, Enterobacter aerogenes
ttggcggaagacagcgatctggaaaaaagcgaggcccccaccgcccaccggttggagaaggcgcgtgaagagggccagatcccgcgctcgcgcgagctgacctcggtactcatgctggtggccgggctcgccattatcctgatgtccggcagcaatatcactcgccaactggcggagatgctgacgcagggcctgcactttgaccacgggatggtcagcaatgacaaacaaatgctgcgccagctgggaatgctgctgcgtcaggcggtgctggcattgctgccggtaatggccgggctggtgctggtggcgctggccgcgccgatgctgcttggcggcattttattcagcaccaagtcgctcaaattcgatcttaaacggctgaatccgctttccggtctgaaacgcatgttctccacccaggtgctggcggagctgttaaaagggatcctcaaagccacgctggtcggttgggtaaccgggctgtacctatggcacaactgggcggcgatgctgcatctgatgacccaacagccgctcgacgcgttggccaatgcgctgcagatgatcctctattgcggatttctggtggtgctcggattgacgccgatggtggcgtttgacgttttttatcagctgtggagccacttcaaaaagctgaagatgaccaaacaggatatccgcgacgaattcaaagatcaggaaggcgacccgcatgttaaagggcggatccgtcaacagcagcgggcgattgcccagcggcggatgatggccgatgtgccgaaagcggacgtgatagtcactaacccgacccactatgccgtggcgttgcagtacaacgataaaaaaatgagcgcgccgaaggtgttggctaaaggggcgggggagattgcgctgcgcattcgcgaactgggagcgcaacaccgtattccgatgcttgaagcgccgccgctggcccgcgcgctctatcgccatagcgagattggccagcatattcccgccaccctctatgccgcggtcgccgaagtgctggcctgggtctatcagctgcgccgctggcggcgcgagggcggcctgatcccgaaaaaacctcaacgtttaccggtgccggaagcactggattttgcaaaagagagtgactctgatggctaa

SEQ ID NO: 88149 - DNA, 2079 bp, Enterobacter aerogenes
atggctaatttggcctccctgctgcgtttgccggggaatgttaaagatacgcaatggcaggttctggccggcccgatcctgatcctgctgattttgtcgatgatggtgctgccgctgccggcgtttatcctcgacctgctttttactttcaatatcgcgttgtcgatcatggtgctgctggtggcgatgtttacccagcgcacgctggacttcgccgcgtttccgaccattctgctgttctcgacgctgctgcgcctgtcgctcaacgtcgcctcgacgcgcatcattttgatggaagggcacaccggggccgccgccgcggggcgggtcgtggaggccttcggtcacttcctggtcggcggtaatttcgccatcggtatcgtggtgtttatcatcctcgtgctgatcaacttcatggttatcaccaaaggcgccgggcgtatcgccgaagtgggggcgcgtttcgtactcgacggcatgccgggtaagcaaatggcgatcgatgccgacatgaacgccgggcttatcggggaagaagaggcgaaaaaacgccgcgcggaagtcacgcaggaagccgatttctacggctcgatggacggcgccagcaagtttgttcgcggcgatgccatcgccgggctaatgattatggtgattaacgtggtcggcggactgctggtcggcgtggtgcagcacggtatggagctgggggcggcggcggaaagctacaccttgttgaccatcggcgacgggctggtggcgcaaatcccggcgctggtgatctctaccgccgccggggtcatcgtgacccgggtggcgaccgatcaggatgtcggcgaacagatggtcggccagctattcaataacccaaaggtcatgctgctgtgtgccgcggtacttgggctgctggggctggtgccggggatgccgaacctggttttcctgctgtttaccgccgcgttgctcgggctggcctggtggctgcgcgggcgcgaaaaacaggcgccgaaagccgccgacgaacccatcgtgcaggagaatacccaagccgcggaagccagctgggccgatgtccagttggaagatccgctgggcatggaagtgggttaccggctgattccgatggtcgattttcagcaaaatggcgagctgttggggcgtatccgcggtattcgcaagaaattcgcccaggagatgggctatctgccgccggtggtgcatatccgcgataacctcgaactggcgcccgcccgctaccgcattctgatgaaaggcgtggaaatcggcagcggcgaagcgcagcctgggcgctggctggcgatcaaccccggcaacgccatcggcgagctggcgggggataaaactatcgatccggccttcggtctggaggcggtgtggattgatagcgcgttgcgcgagcaggcgcaaatacagggctatacggtggtggaggccagtacggtggtggcgacccatctcaaccacctcatcggccagttcgccagcgagctgtttggccgccaggagacgcagcagctgctcgaccgcgtgtcgcaggagatgccgaagctgaccgaagatttcgtaccgggcgtggtatcgctgaccacgctgcataaggtgttgcagaatctgctggccgagcgggtatcgatccgcgatatgcgtaccattatcgagacgctggcggaacatgcgccaacgcaaagcgatccttacgagctgaccaccgtcgtgcgcgtggcgctggggcgggcgattgcccagcagtggttcccgggcaatggcgaaattcaggttatcggcctggatacccaactggaacgactgctgctgcaggcgctgcagggcggcggcggtctcgaaccggggcttgccgaccgcctgctggagcaggcgcggcaggcgctgcagcgccaggagatgctcagcgcgccgccggtgctgctggttaaccacgcgctgcgcccgctactggcgcgcttcctgcgccgtagcctgccgcagatggcggtgctttccaacctggagatcaacgacgatcgccagattcgcatgacctcaaccattggagcggcctga

SEQ ID NO: 88150 - DNA, 405 bp, Enterobacter aerogenes
atgacgcgctatcttcctttattttgccttttattgccggttaccgccggcgcggcatcgggctcatggattgccgaagggcccggcgtcactcttgaacagggcgggatgagtgattcttccgccgcgctgctgccgcccaatacgctgcctggcggcaatgcgcgcatcgagaccgttagctggcgctatcgtctgctgtcagcggagccggcggggctgcaggtgcatttatgtagcctgaatcgctgtattccgctgaccagcgccagcggcaccagccacgcgttggcaggtgaggcggcagatgggccgctgcgttttgtctactccgtacagacccgcgggccgttaaacccgccgctgcgggcgattgcaaatcaggttatcgttaattatcagtag

SEQ ID NO: 88151 - DNA, 435 bp, Enterobacter aerogenes
atggacagattacgcactctgctggataaactggcggaaaccctgcgggcgctggatgacgtgctggcgcaagagcaacaattgctgtgtgcggatgaactgcccggcgtggcgctgcagcgcgtcaccgatagcaagagtcaactgctggcgacggtggcctggcttgaacaacagcgcccggcgctggaagccaaccttgcgctacgcgcgccttacccgggccatgaaagcttcggcgaatgctggcggcagatccagcagttaagtcagagcctgcgtgaaaagaatcagcataacggcctgttgctcaatcaacagatcgcccataaccagcaggcgctggcaattcttagcaagaataataaatcgctgtacgggccggacggtcagtcgcgcgccgccagtctgctgggccgtaaaatcggcgtctga

SEQ ID NO: 88152 - DNA, 324 bp, Enterobacter aerogenes
atgagtatcgatcgcacccagcggttacagccggtttccacggtgcagccgcgtgaaaccccggccgacaacccgcttcagccgcgcaaggccaccgcggcggaaaccgccgttagcgccaccaaagtgaaactgagcgatgcgcaggcgcggctgatgcagcccggcacccaggatattgatatgaaccgggtcgaggctatcaaacaggcgattcgtagcggcgaactgaaaatggacgcgggcaaaatcgccgacgccctgctgcaggatgcgcacaacgatatccagcgccttgccggtagcaaaacagataaggcctga

SEQ ID NO: 88153 - DNA, 651 bp, Enterobacter aerogenes
atgaaaagtaaaatcctgctggtcggcctgctgtgcagcctgagcgcccgcgccgaaacgctggcgacgcaaatcgaaagcttcattaaaagcaaattcaatgataatgccgtgcaggtgaaagtgctggtgcgcacgccacccgcccagtggccgccgtgtgaattaccgcagctgtcgcttccgcccaatgcgcgaatcggcggcaatatcagcgtctccgcccgctgcgggcaggagcggcggtttattcagacccaggtgcaggtatttggccgttatctgacggcggcgcgcggtattagcggcggaacgccgctgaccccggcggatgtggtgctaaaatcaggcaggctcgataccctgccgccgcgtacgctgaccgacagcaaaaaagcgctgggcgccgtgacgctgcggaatatcagcccaggccaaccgctgacgctctctatgctgcgtcgcgcgtgggtgatcaaagccggtcagccggtgcaggtcatggccgagggcgacggctttagtatcagcggtgccggtaaggcgatgaataacgcggcggccgaagatagcgtgcgcgtgcgcatggtttccggcaaaatcgtcagcggtatcgccggggaggatggatccatccgtattacgttataa

SEQ ID NO: 88154 - DNA, 414 bp, Enterobacter aerogenes
atgctcgacaaactggacgctgctctgcgttttggccaggaggcgctgaacctgcgcgcccagcgccaggaaatactggccgccaatatcgccaacgcagacacgccgggctatcaggcgcgggatatcgatttcgccagccaactgaataaagtcctgcaacaggggcgggtaaacggcaacggcatggcgctgaacctgacggcggcgcgtcatattccggcgcagaccatgcagccgccggagctggatctgctgttccgggtgccggaccagccgtcgatggacggcaatacggtggacatggatcgcgaacgcaccaacttcgctgacaacagcctgaaatatcagaccgacctgacgctgctcaacggtcagatcaaagggatgatgtcggtgctgcaacaaggataa

SEQ ID NO: 88155 - DNA, 405 bp, Enterobacter aerogenes
atgtctttactcaatatttttgatatctccggctcggcgctctcggcccagtcgcagcggatgaatgtcagcgccagcaatatggccaacgccgatagcgtcaccggcccggatggcgaaccctatcgcgcgaagcaggtggtgttcgaagtggccgcggcgccagggcagcagaccggcggcgtgcgcgtctcgcaggtggtcgatgacccggcgcccgcgcggatggtttatcaaccgggcaacccgttggccgatgctaagggttatgtgcggatgccgaacgtcgatgtggtgagcgaaatggtgaacaccatctccgcctcccgcagctatcaggccaacgtcgaagtgctcaacaccactaagtcgatgatgatgaaaaccctgacgttgggtcagtaa

SEQ ID NO: 88156 - DNA, 678 bp, Enterobacter aerogenes
atggctatcgccgcaaccaccaatgaatcgaccaataacgcggttcttgattccgccagcaaaagcagcaccagccaggatctgcataacagcttcctgacgttgctggtggcgcagttgaaaaatcaggacccgaccaacccgatgcaaaacaacgagctgacctcgcagctggcgcagattaataccgtacaaggcatcgaaaaactcaacaccacccttggcgcgatctccgggcagatcaacagcaaccagtcgctgcaggccagcgcgctgatcggccacggcgtgatggtaccgggtaataacattctggtcggcagcaaagaaggccaggtcagcaccacgccgtttggcgtcgaactggagcgcgccgccgaccaggtgacggcaaccatcaccaacgccaatggccaggtggtgcggaccattgagattggcggcctcaccgccggggtgcacgccttcacctgggacggctcgctggatgatggtaccgccgcgccggacggtgcctataaagtggcgattaacgccaagggcaacggcgagcagctggtggcgcgtagcctgcacttcggcatggttaacggtgtgattaacgacagcaacggcgcgaagctggatctcggccttgccggtaacgccagtctagaagaagtgcggcagatcctgtaa

SEQ ID NO: 88157 - DNA, 1215 bp, Enterobacter aerogenes
atggccttttctcaggcagtcagcggcttaaatgcggcggccaccaatctcgacgtgattggcaacaatatcgctaactccgcgaccgcgggttttaaatccggcagcgtgtcgttcgccgatatgttcgccggttcgcaggtcgggctgggggttaaagtttccgggatcacccagaactttaaaggcggcaccactaccggcaccagccgcgcgctggatgtggcgattaacggcaacggcttcttccgcatgcaggataaagatggcggtattttctatacccgcaacggccagtttaagctggacgaaaaccgcaatctgaccaatatgcaggggctgcaactgaccggctatccggccgccggcacgccgccgaccattcagcagggcgccaacccggtaccgctgagcattccggaagggatgatgaacgccaaagcgtcgacttccggcgaaatggtcgccaacctgaagtcgacgcataaagtgccggagaacaagaccttcgacccggcgaagcaggacagctacaactacgtcaacaccatcaccgcctacgattcgctgggtaacgcccacaatatcaacgcctattttgtgaaaaccgacgataacaaatggcaggtctatacccaggacggcagcgcggctgcggtcagcgcgggcaccatggagttcaataccagcggcaacctggtcagcgttaacggccaggcgggcgagttcagtatgaccattccaatgagcgcgaaagacggcgcaccggcgcagaacttcacgctcagcttcgccggtagtatgcagcagaacgtcggtagcgattcggtgagtaaagtagcgcaggatggttatgccgccggtgaatacaccaacttccagattaacgatgacggtaccgtcgtcggtatctactccaaccagcagacccaggtcctggggcagattgtgatggccaacttctccaacccggaagggctggcgtcacagggcgataacgtctggcaggagaccggcgcctcgggccagccacgggtgggactctccggcggcggcggttttggcaagctgaccagcggcgcgctggagtcttccaacgtcgacctgagccaggagctggtgaacatgattgtcgcccagcgtaactatcagtccaacgcccagaccatcaagacgcaggattcgatcctgcagacgctggtcagcctgcgctaa

SEQ ID NO: 88158 - DNA, 756 bp, Enterobacter aerogenes
atggatcacgcgatttataccgcgatgggcgccgcgcgccagacgctggagcaacagtcgattaccgccaacaatctcgccaacgcctcgacgccgggctttcgcgcccagctcgccgcgctgcgcgcggtgccggttgacgggccgagcctcgccacccgcacgctggtggcggcctcgacgccgggcgccgatatgagccagggggcgctgaactacaccgggcgcccgctggacgtggcgctgcagcaggacggttttctggcgctcagcctgccgggcggcggcgaagcctatacccgcaacggtagcattcagatttcagctaacggtcagttgacggtgcagggaatgccgctgcagggcgacggcgggccgattgaggtaccgccatcggcggaaatcactatcgcggccgacggcaccatttcagcgctgaaccccggtgatccgccgaacaccatcgcgcagattggccgcctgaagctggtgaaagccgatgcgcgcgaagtgatgcgcggcgatgacggcctgttccgcctgaccccggaaacccagcagcgccgcggcaatctgttggccaacgacccgcaggtgcgggtcatgccgggcgtgctggagggcagtaacgtcaagccgatggagaccatggtcgatatgatcgccaacgcccgtcgctttgaaatgcaaatgaaggtcatccacagcgtggatgagaacgaacagcgggcgaactctctgctgtcagtaagctga

SEQ ID NO: 88159 - DNA, 783 bp, Enterobacter aerogenes
atgattccctctttatggattgcgaaaaccggtcttgatgcgcagcagaccaatatggacgtgatcgccaacaacctggcgaacgtcagcaccaacggttttaaacgccagcgcgcggtgtttgaagatctgctgtatcagaccatgcgccagccgggggcgcagtcctccgaacagaccacgctgccttccggcctgcagatcggtaccggcgtgcgcccggtcgccaccgagcgtctgcatagccagggcaacctgtcgcagaccaacaacagcaaagacgtggcgattaaaggccagggcttcttccaggtgctgctgccggacggcagccaggcttacacccgcgacggctcgttccagatcgatcagaacggccaactggtgaccgccagcggcttccaggtgcagccggcgatcactattccggccaacgcgttgaccattaccatcgcccgcgatggcatcgtgagcgtcacccagcagggtcagaccgccgcccagcaggtcgggcaactgacgttaaccacctttattaacgacagcggcctcgaaagcgtgggcgagaacctgtaccaggaaactgaaagctccggcgcgccgaatgagagcacgccgggcctgaacggcgccggtatgctctaccagggttatgtcgagacctctaacgtcaacgtggcggaagagctcgttaatatgatccagacccagcgcgcctatgagatcaacagcaaagcggtttcgacgtcggatcagatgctgcagaaactgacccagctgtaa

SEQ ID NO: 88160 - DNA, 720 bp, Enterobacter aerogenes
gtggtaaccacacattcgatggccaccctgccgcgccagggacaacgcttgctggcgggcatggtgatgctgacgctgagcggctgcgcgtacattccgcataaaccgttggtcgatggttcgacctcggcgcagcccgcgccgccgaccgcgccggtaccgaacggctcaatttttcaggccgcgcagccgatgaactacggctatcagccgctgtttgaagaccgccgcccgcgcaatgttggcgacacgttgactattgtgctgcaggaaaacgtcagcgccagcaagagttcttccgccaatgccagccgtaacggttccagcaagtttggcgtcgccaccgcgccgcgctacttagacggcctgctgggcaacgcccgcgccgatatggatatttccggcgataacagtttcggcggtaaaggcggggcgaacgccaataacaccttcaacggcaccattaccgtcaccgttaatcaggtgttgagcaacggcaacctgcacgtggtgggggaaaaacagatcgccattaaccagggcaccgagttcatccgcttctccggggtagttaacccgcgcaccatcagcggtagcaactcggttacctcaacgcaggtggcggacgcgcgcatcgagtatgtcggcaacggctacatcaatgaagcgcagacgatgggctggctgcagcggttcttcctcaacgtctccccgtactaa

SEQ ID NO: 88161 - DNA, 1101 bp, Enterobacter aerogenes
atggttaaaaaactcatcattgcgctattaatcggcgcggccagcttaccggcgacggcggagcgtattcgcgatctggtgacggtacagggcgtgcgagataacgccttaatcggctacggcctggtggtggggctcgacggctccggcgaccagaccatgcaaacgccgtttaccacccaaagcctgagcaacatgctatcgcagctcggtattaccgtgccgccgggcaccaacatgcagcttaagaacgtcgccgcggtgatggtcacggcgaagctgccgcctttcgcgcgcgcagggcagaatatcgatgtggtggtctcatcaatgggcaacgccaaaagcctgcgcggcgggagcttgctgatgacaccgctcaaaggggtggataaccaggtttatgcgctggcgcagggcaacgtgctggtgggcggcgccggcgcggcggcgggcggcagcagcgtacaggtcaatcagttggccggcggacgcatcagcaacggcgccaccatcgagcgcgaactgccgactactttcggcagcggcggggtgctcaacctgcagctcaatgatgaagatttcacccttgcgcagcagattagcgatgcgattaaccgccagcgcggcggcggcaccgcatcgccgctcgatgcgcgcaccattcaggtactggtgccgcagggcaatagctcgcaggtgcgtttccttgccgagatccagaatatcaacgttaacgttggcgccatggacgccaaagtgatcatcaactcgcgtaccggttcagtggtgatgaatcgcgaggtgatccttgactcctgcgcggtggctcagggtaacctgtcggtggtggtcgacagacaaaccagcgtcagccagccgacgacgccgttcggcggcggccagacggtggtcacgtcgaatacccagatttcgatgcagcagcagggcggttcgctgcagaaaatcaacgccagcgccaacctcaacaacgtggtgcgcgcgctgaacgcgctgggagcgacgccaatcgacctgatgtcgattctgcaagccatgcaaagcgccggctgcctgcgcgccaaactggaaattatctaa

SEQ ID NO: 88162 - DNA, 945 bp, Enterobacter aerogenes
atggccagcgatgttatggcgatgtcgggcgccgcctatgacgcccaggcgctgaacggcctgaagcgcgatgccgccgccgatccgcagggcaaccttaagcaggtggcgcagcaggtcgaaggcatgtttgtacagatgatgctaaagagcatgcgcgccgcgctaccgcaggatggcgtactcagcagcgaccagacccggctctacacctcgatgtacgatcagcagattgctcagcagatgtcgcaaaagggattagggctggccgacatgatggtcaagcagatgagcaacgccaacgcggtccccagcgaaacggcgggcaccgcgccgatggcgctggataatgaggtgctgcagacgctgccgaatcaggcgctggagcagatgatccgccgggcggtgccgaaagcgccgccggtcgccgcgccgctatcgctcaacaacggcaatttcgttgcccgtctgtcaatgccggcgcgcgccgccagcgagcagagcgggatcccgcatcagctgattgtcgcccaggcggcgctggaatccggctgggggcagcgcgaaatcctgaccgctgacggtacgccgagctacaacctgtttggtattaaagccgggggcaactggaaggggccggttaccgagatcaccaccactgagtttgaacagggggtggcgaagaaggtgaaggccaaattccgtgtctacgattcgtacttctcggcgattgctgattacgtcaagctgctgaccaacaacccgcgctatgcctcggttgccgaagcgtccactccggagcaggcggcgcacgagctgcagcgcgcaggttacgccaccgacccgcagtacgccagcaagctggtcagcgtgattcagcagatgaagcacgccggggcgcaggcggtgaaagcctatgccgcggatattaacgatctgttctag

SEQ ID NO: 88163 - DNA, 1650 bp, Enterobacter aerogenes
atgtccaatagcttaatcaatacggcgatgagcggactgaatgcggcgcaggtggcgctcagtaccgtcagcaacaatatctctaactacaacgtggcgggttataaccggcagacggcgattctggcccaaaacggcggcctggccaccatgaacggttttatcggtaacggcgtgaccgtgaccagcgtgaaccgcgaatataaccagttcatcaccaaccagctgcgcggcgcgcagagcgcggccggttcgcagaacgcctactacgaaaagatttcgcagatcgataatctgctggccagcaaaactaataccctgtcgggcagcctgcaggattttttcaccaatttgcagaacctggtgagcaacgccggcgacgacgcggcgcgccagacggtgctgggcaaggctaacggcctggtaaaccagtttaataataccgataaatatctgcgcgacatggacagcggcgttaatcagcagattaatgataccgctcagcagattaacagctatagccagcagattgcccgtcttaacgatgagattacccgcctgcgcggcagcgccagcggcgaaccgaacgcgctgctcgatcagcgcgatcagctggtcagcgaactcaaccaactggtgggcgttcaggtaacccagcaggacggcgacgcctataccgtctccttcgccaacggcctgaccctggtgcagggcaacaacagctatcaggtggaagcgatcccttccagcagcgacccttcgcgcctgactctcggctataaccgcggcagcggcgccagcgaagtgccggaagggcagatcaccagcggcagcctgagcggcgtactgcgttttcgcagcgagacgctggacggcgtgcgcaatcagctcggccaactggcgctggcgatggccgatagctttaaccagcagcaccgcgagggcttcgatctcaacggtgagcaggggggcgatttcttcagcttcagcggcgcgcgggtggttgataacacgcgcaataccggcgatgcctcgctgtcggtgtcgtataccgataccagcaaggtaaaagccaacgattaccgcgtagagtatgacggcgccaactggcaggtcagccgtctgcccgacaacgtcaaagtcaacgccaccgctggtaaagatgcagacggtaacccgacgctgagctttgatggtctcgaagtcagtattgatggcaacccgcagcagaaagatagctttacggtgaagccggtcagcgacgtggcgggcaacctgaaagtggcgattaccgattcagcgaaaatcgccgccgccggtaaagatgacagcggccgcggcgataacgataacgctaaaaaactgctcgatctgcagaccaaaaacctggtggatggcaaagcgacgcttagcggcgcctacgccgggatcgtcagcggcgtgggcaaccagaccgccgccgcgaaggtgagcagcgaatcgcagtccagtatcgtcacccaactggcccgtcaacagcagtcgctctccggggtaaacctcgacgaagagtatggcgagctcctgcgtttccagcagtactacatggcgaacgcgcaggtgatccagaccgccagctcgctgttcgacgcgctgctgaatattcgttga

SEQ ID NO: 88164 - DNA, 960 bp, Enterobacter aerogenes
atgcgcatgagcaccagcatgatgtaccaacagaacatgaccggcatcaccggcaatcagtcgctgtttatgaaggccgccgagcagctttcaaccggcaagaaggtgattaatccctccgacgatccgctggcggcatcgcgggcggtgatgctgtcgcaatcacaggccgagaacaatcagtacaccctggcgcgcactttcgcccgccagagcgtatcgatggaagagaccgtgctttccggagccacctcgacgatttctgatatcaaggcgctgatcgttaatgccggcggcaccgagagcgataacgaccgcgattcgctggcgacccaactacaggggctgaaggatcaactgctcaaccaggccaacagtaccgacggcaacggacgctacctgtttggcggctatgagaatgataagccgccgtttgtcgatactaacggcaagattagctatcagggcggcaataaaaccgttgaacagaaggtcgacgccaaccgtacgatgaccatcggccataccggtaattcggtatttatggcgctgaccagcaatccgaagccggagccggacggcagcgcgccggtcgccgatgtgttcgccagtatcgatattgcgctggaggcgttgagaacgccgctgcagggggccgatgacgccaccaaacagcaggtgaacgatgcgctggcgaaggccaaccgtggcctcgataactcctacaacaaggtattgagcgtgcgcgccgagctgggtaaccagctgcaggagatggatcaactcgatagcatcggtaaagagcgtgatatgaccaaccagctgcagatgagcgccctgaccgatgctgatcttgcggaatctatctcttcttattttatgcagcaggcggcgctgcaggcatcttataaaactttcagcgatatgcagggtatgtcgctgtttcagatgaatcgctaa

SEQ ID NO: 88165 - DNA, 399 bp, Enterobacter aerogenes
atgaaagaactggatatccgcgaggtcgcgacgctgtccggcattactccttcagcgctgcgtttttatgaaaagaaaggtttgatcaaaccgattggtcgtcatggcctgcgaaggcagtaccatgaaaatgtgctgaataagctggaactgatcgtgctgggacaggccgccggcttttcgctttctgaaatagccgggatatttaacgctgacggcaagatagccattgataaccaacggcttgagcagcgcgcgcaggaaattgataacaccattcgtcggttacagctgttaagccaggggctaaaacacgccgcccgctgtactgcgccggaacatatgcaatgccctgaatttaaaaaaattgtggcgaaaggaattcggctcttaaaatga

SEQ ID NO: 88166 - DNA, 498 bp, Enterobacter aerogenes
atggttgttgtgcaaattttagtaacggggatcggcgcgacgttagtcatggatttatggtcgctctttcagaagcacatactcaagattgcgccgctgaactatgcgctggtcgggcgctgggcgttatggctttcgctagggaaagtgcggcataacaccatctgcgcaaccccttcgctacatggagagcgttttatcggctggttatgccattatctgatcggtatcgcttttgcggcggtgccgcttgtgttgagcggcgccgattggttttatgcccccactctggcgacagcgctgctgtcaggggtcgtaaccttattcgcgccgttcttgatcctgcagcccgcatttggttttggcgtcgcggcctcacggactccccgaccatggctggcgcgttcgctgagcctgctggcgcacctggcctacggcatcgggctgtatctggcggcgagcgcttatagagttatggcgatgtcagctgatctttaa

SEQ ID NO: 88167 - DNA, 882 bp, Enterobacter aerogenes
atgaaagcagattttaactgggacgatacgcggatttttctggctgtggcccgctcaggtacgctaagcggcgcggcagaaactatggatatgggcatcgcaaccctgtcacgaagactcgaccggctggaaaaatcattggccgtcccccttttcagccggcatcaaagcggctaccggctaacggatgatggcgaggcgctgctggcgcgagcagaggcgcttgagcatgcagggctcgcttttggcgagacggcgaggctgcaggggaacgtggccggactggtccggctggctacctcggacaacctggcggcgcattttattctgccttcactcaacggcttgatggaaaaatatcccgacctgcgggtcgaggtgctcagcggcgtgcaatccgtcaacctgcatcgacgggatgccgatttagccattcgaatggtcaaaccggaaagcggcaacctgacgctgaagcgtctcgggaaggtggggtttggtctgtacagcgccgataccggacaagcaggctctaccgacatcgcgttcaatcacgctcactacataggctggccagaatcacaccagcatctgcccgccgcgcgctggataactcggacgcttcgcggcaggccgtgccgggtggaagccaacacgctgctggcgcagctgtcggcggtttcagctggcctgggattaggcgtgttgccacactttatggcgcggaaaaatggcctgcagtgcgtgaatgcggatatcggcgtcgaccaaaccctatggctggtgatgcattccgatttagcccattcgcggcgcgtcagagtggtggccgatcatttaattgccctgtttgatgagattaaagatcagctgacatcgccataa

SEQ ID NO: 88168 - DNA, 1191 bp, Enterobacter aerogenes
atgaacgacctcgttttacaggccaacccgacgccagtgcgcgcatggctcgccgtagttgcgctgggagtcagcgcattttcgattgtgaccagcgaactggcgccggtcggtatgctcagcgcgctggcgaacgatttgcatcagtcgcaggcgggagcgggtcttgccgtcaccgcttatggctgggtggccgcgctggccgctttactggccggcgcgatccccgcccggatttcacggaaggcgctattgattgtattgatgttaatcctcgcattttcttgtctggcggcgacgcagtcgcacaccatgcagacgtttatgacggcgcggatgacaggggcgctggcgcatggcgcattctgggcgctaataggcaccgtggcggtacaactggtaccggttgataaactggggttggccacctcggtgattttcgccggtgtttcggcggccagcgtgctgggcgtgccgctatcgagctttattgccgacatggtcggctggcgacaggcattcagtgcgatttcactgctctcattagccaccgccgtggctttgctctggacgcttcccacgctggcggctccgcagccgttgaggctgaaggtttacgttgggatagttaaaaatccgctactgctttcattgttcggcgctacagcttgcattatttccgcacattttgctgccttcacctatcttgagccgttgctaacgcaaacccgtggtataccgacatcaacgatttccgcgctgttattgatgtcaggactttcagggctgctgggaaatctcatcgccggcaaactcatcgatcgacatatccgagtgctgattatgacatcactgctgctcagcgcaggcgcgctggggatgctgagtatcaggggtgggtcagcacttcctgtttggttcgtcgcggtattgctcggcgtatggggcgcgggcatggctatcgtgttcgttggtttgcaaacctggctgttgcgtagcgcaggggaggctacgcagccggcatccgcgatctacgtcgccattttcaatgccgccatcggtactggcgcgcttgtcggcggcctggtatcggcaaagcttggtctttcgtcactgccgttactggcggcggtggcgatgatctgcggtatggcgctggtctggaagctgaaaagccccagggcgatataa

SEQ ID NO: 88169 - DNA, 1056 bp, Enterobacter aerogenes
atggagatcgttaccgcaccgcatcttgcggtcagaaacgagtggcttgcgttacatcgtgagccgccactacaacccgagctgcccattattgatgcgcatcatcatctctgggatcggcaaaccggacgctatctcacccatgagttcagcgacgatatccagacctcagggcatcgcgttttctcctcggtctacgtgcaatgccgctctatgttgcgtcgccacgggccggaaacgttgaaaccgcttggtgaaattgagtttgccagcggaatagccgcgatgttcgccagcggacattatgcaaacgctcttggatgtgaagccatcatcggcggcctgagcttgctggcgggcgatgcgatgcagcctgccatcgagagcgtgctggctttatcaggcgggcggttgcgcggaatgcgtaatccattggcctggcatccggatccgcgggtcacgtccagcccggttacaccaccggcaggactggccctgagcgaaccgttccgccggggcgctgcctgccttgcgaaaaatggattgtcgcttgatgtgtgggtttaccacacgcaactggatgaaattgccgagctggcgcggcaaataccaacgctacagattgtgctcgatcactgcggcgggcctgtcggcgtagggccttattcagaaagagctcctgacatgtttcagcagtggcgaagcagtatgcgacatctggcggaactgccgaacgtatgcgtaaaaattagcggatttggtatgacggtcaggggatttcccttcgcagcggcagaaacgccgccggattcgcaaatgctggcacaggcatggcaaccgtggtttgagaccatcattgctcttttcggtgcggaacgctgcatgtttgcgagtaactttccggtcgacaaaggcatgttcagctacggcgtcttctggaatgcgtgcaaacgcctggcgcaacaggcttcccctgatgaacaggcgcagttgttctggcgcactgccgcaacctgctaccggataacctctgtggagaatatcaatgaccagtaa

SEQ ID NO: 88170 - DNA, 1269 bp, Enterobacter aerogenes
atgaccagtaaaagcgagctcaagcagtttactgcgactaaagcgacgcctgacgctttgcctcagcacgtggctgagaaacgaactctggcgctgggcggccttggctgggcatttgaaagctacgactcatttctactctcattattattgccggtattaggaatggtgtttggcgtgaataaaagcgaacttggactgtttatcagcgtcacggccggtggacagatcatcggcgggatcctgtttggttttatcgccgataaaattggtcgggtaaaaacggccatgacctgtatcgccatctattcactcttttccggactgttagcctttacgcacgatcaacagcattttgcacttttgcgtttttgcggtgcgctgggtatgggcggaatgtggacgtcaggtgcggcgctgattgctgaaacctggcggccagagcggcgcgcgcgcggcggcgctttgatgcaaatgggcttacccgttggcgctattctggctatcagcctgacggcaatcgtgagctcggttaacgacggcctggagcagggcgcatggcgctatctgtttatgatcggcgcgctgccggtattcattatgagcgtggtggcctggttcacgccggaatcacaggtttggcttgcacgacagcaggggaaagctaagcgcactcaacctgcctcgaaactgggcaaacacaatctgaaaggcctgctgctggctttcgtctttatcttctttattcagtatctattctggggggtatttacctggacacccacctatctacgagaagtaaaacatctggattttttacatagcctgaaatttgtgctcgcgctgcaggtcggggcgatcgcaggttttctggtcttttcagtactggcggatagatggggacgccgtccgatgttcctgatttatctgttaacgggcgccattgccgtcgcgctttaccttgtgaccactcaacccttcattctgatgctggcgattttcatggctggttttggtgttaacgggatttttgccggatctggaccattccttgcagaaatcatcggagacacgtcatcgcgtggcttcctgatggggctcgcctacaacggaggccggctgggcggatttatcgcgcccctgctcatcggcgctgtggccagcgccggcggtttcactgcgggactggcgactaccgtggtcgccttcctggcggcaatggtggtggtgtggctggcgccagaaaccagaggcgtcaagctgaagtaa

SEQ ID NO: 88171 - DNA, 1335 bp, Enterobacter aerogenes
atgaccgaacaatcaccgaatagcgctatcgacaacgatgcgctggaaaaagagaccatgcggcgggttatctggcgcatcctgccttttctggtcgtaagctatctggtctcgattattgaccggggcaatataggtatggctgcgctacagatgaatgaggatctgggcctgagcaaggcggcttttggcttcgccagcagcttatattttgtcgcctactttatatttgaggtacccagcaacctggcgatgcagaaggtgggcgcgcgattgtggctcccgcggataatgatcagttggggagtggtatcgatgtgcatggcgctggtgcaaaatacaacctccctttatatcgtgcgttttctgctgggagcggcggaagcgggctttttcccgggcgtggtgctctatcttacctggtggatcccttcgcgttaccgggcgcgtattattgcctcttttatggtggccattccgctggctaactttatcggttcaccgctttcaggtttgatcctgacgctggatggctggtttgggctgcgcggctggcatctgttattcattattgaggggctgcctgcggtgctgctggggatagccgcattttttatcctgcgggaccgcccacatcaggctggctggttgaacgagcggcagaaagcgtggctggaaaacacccttcaggcagagcgtcaacagcagaaacagatcggccacatcagcacatggcagctgttgaagcaccgccaaatctggctgatggcgctgatttatgccggcgcgtcgtctgctggcaccacgcttagcgtctggtctccacagctactgaagtctttccatcttgataacctgactaccgggctgcttaatgctatcccctatggcctggcctcggtgctgatgattgtctggggtcggagttcggatcgcactaatgaacgtcgctggcacacggctctcaccctctttatgattgcggctggcgtgttcgcggcgttcatcaatctctcgctgccgattaccattgttattctcagtaccatattaattggcgcttattcggcgaaggggccattctgggcgctggcctcaggctggatgagcagcacctcagccgccgcggggctggcggcaatcggcgcgatagctaatctgattggcggagtggtgatggtgaatgcctatggtgtgattagcgaacagacaggaagccatacgctggcgatgctaccactggctggcttgtgcctggcaggcggtatcgcggtgctgatcatgggacgccgttactcgcagcctgccggtcaggaaaaaccggtcacccattaa

SEQ ID NO: 88172 - DNA, 717 bp, Enterobacter aerogenes
atggggaatgaaggcgtaattgccgttgaaaaggcgctcgctttactggattgcttccggcccggtaatgacagcctgacgttaactgagctggcgcagctttcgggataccacaaaaccaccgtttatcgcttaatgaattcgcttgagcgtatgaactacattatccggcatgatgatggcacctatacgctcggccaccgtctgctctatctcggcaagctttatgagcaatcatttcagcttgcgagaattgtacaaccggaattgcaggcgctgtctcaggcctccagtgaaagcgcgagctggtatgtgatagagggcggccaacgcctgtgtctgttccgcgccgaagcgtcagagggattacgccatagcaacctgcccggcagtcaatttccactggatggctccgctatcagcaaagttttacgtcattggggactgggtgaggcgctttcggaagacgaagaaacgctgccgttctatacctctggcgcgcgcgatccgcacaccgcggccttcgcgatgccggtttttggcgtccacgataaccccatcgcggcactggcgctgacaggaccgtcatcgcgtctgactgcggaccgcaaagaaagcggcctcagccagctaatgcgcgagacggccaaccgcctgtcgatcaagttaggagccagtaaatccttctgcgaaacgttttacgatataaaagaataa

SEQ ID NO: 88173 - DNA, 696 bp, Enterobacter aerogenes
atgcctgcatcacaacagaaattaatcaatgtggatattgaacgcgttagcgcggaggaggtccgtcaggccgctgaatatcaggcggcgattctcgccgacgtggccggacgacgcggcacattacatggccgtatcaagccactggcgccacacatggcagtggccggcccggcgattaccgtagaggtccgtccgggagataatctggctattcacgcggcgatggccgtcgccaaacctggcgatgtgttagtgatagacggcaagggcgatctctcctgcgctttactgggtgagatcatggccacgcaggcgcaggccagcggcatcgcaggtatcatcattgacggcgcagttcgcgatgctgaaaccttaagtaaacaaagctttcctgttttcgcagccggtcttaatccgtgtggtcccaccaagttcattccaggccgggtcaatcatgctatttcggtcgcgggcgccgcggtgcaggcgggtgacctggtggtaggggatattgacggcgtggtggttatcccccgcgatgaagtaggcaccatcattgagctggcgaaaggtaaactggaaggggaagtcaaacgtctttcggctatccacgatggcgatcttcgcccacactggctggagaatgcgttgcgtcaggcgggtatgctgagcgaaggggaggcattgccatga

SEQ ID NO: 88174 - DNA, 948 bp, Enterobacter aerogenes
atgagcgctaaaaaagtcgtactggtaaccggcagcgatttggccgaagcggcgatcggcatgctggaagattatgagctcgtgtttgctggccgccaacctacagaaaaccaattgatagcattatgtcagcagcataatccggtcgccatattagtgcgctatggcaagattacggcatctgtgatggatgccgctccggcgttgaaggtcatttccaagcatggcagcggcattgatgtcattgacgtcgaagcggcggtggcgcgcggcatcatggttcgcgcggcgacaggcgctaacgccgcggcggtttcagaacacgcctgggcattaattctggcctgtgccaagtcaatcattccgcttgaccgccgcctgcgcgaagggcactgggataaatcgacgcataaatcgctcgaactggaaggcaaaacgctggggctgattggtctgggggcgattggcagtcgggtggcgaaaattgccggcgccttcggtatgaaggtgttggcttacgatccttatgccgccacggttcctcccggatgcgaacgtgttgatgtactcgaagactttctcgcgcaggctgatgttgtctcccttcattgtcccttaacgccgcaaaatcggggaatgataaatgccgttaccctggcacagtgtaaacccggcgccatcctggttaataccgcgcggggcggattaatcgacgatgcagcgctggcagcggcattaaaagggggggcattgcgctgggcggcgctcgatagctttaacagcgaaccactcactacgccgcacatctgggagcgggtcgaaaatgtcattctgtctccgcacgttggcggcgtaagcgacgcctcttacgtcaaaatgggtaccgccgccgcggccaatattctacaggtagtgcaggattcatcgcagactgaaacagcgtactaa

SEQ ID NO: 88175 - DNA, 480 bp, Enterobacter aerogenes
atgagtattacgattcgacaggcccgtccggacgatgcttctgccatctacaacatgatttatgagctggcggtgtatgaaaaagccccgcaggaagtggtcaccacccccgacgagatccgcgaaaccttatttggcgacgacagtaagaccgaagcgctgatctgcgaaattgacggtaaaacggcgggctatgccgtgttcttcaccagctattcaacctggctcggacgcaacggtatttatatggaagatttgtatatctcaccggattatcgcggccagggcgcgggtcgagcgctgctaaaaaccattgcccggtatgcggttgcgcgccgctgcggacgccttgagtggagcgtgctggactggaaccagccggccattgatttttacctcagtattggcgccgcggcgcaaagcgaatggatacgctatcgcctcgatggcgaagcgctggttaattttgcggagcaataa

SEQ ID NO: 88176 - DNA, 936 bp, Enterobacter aerogenes
atgatgaatattatgcatccggcgctcagacgcctcgatctcaatctgttgcttgtttttgatgccatctatcgccacagttccgttcgtctcgccgccgatgagctggcgatgagtacctccgcgttgagccacgcgctgtcgcggctgcgcgtggcgctgaacgatccgttgttttttcgcgaagggcatcggatgtgcccgagcgtctatgccacgcaactcgcgccctccatcgcttcagtattaaaattgcttaatcaggaactcacgcgacagccagagtttagtgccgccgacagcacagagcggatccagatagccattaccgatttcaccgcgttatgcattttccctgcgctaatgcaaaagctgcagcatgaagcgccgggcctgcgttttgagctccgttatttgccacatagcccggcgctgacggagctactggcgggggaggtggatctggcgctgggcttcagcaccgctgaagatattcgtcatcatgaactcgaggaaattgactggtttgaggatgagtatgtggttatcagccatacctgtcgcacggcgctgacgctggcggattatctcgccgcgcgccatctggtggtcacgccgtggaacgaaaagcagggggtgttggatttacgtctgcaggaattaggctatacccggcagatagcgctcaaaaccccctcaatgcttagcgcgccgtttattgtggcgcaaagcgatctgttaatggcgattcctcgttatgccgcagagaagttccttcatgccgccccgatcgcgatttttcctttgccgttcgccatcagcccgttcaccgtgaagatctattcccataaacgcggcgggcagcgaggggcaaccaaatggctgaagacggcgctacaaagcctggtgttggcagagaacgccgggagtttttaa

SEQ ID NO: 88177 - DNA, 408 bp, Enterobacter aerogenes
atgaaaaataaccctgaactgattatccttacgttaatttgtctgctaacggttatgatgtggatcccctatattattgccagagccacacgtgctaacgtcgcgcccgcagcgggtaatggccattcgccatcaatcgggacggcgccctgggcgcagcgtgcgcaaaaggcgcacgccaacgcggtagaaaacctcgttatttttgccccactggttgtggccgccgcgttgctaaacgtcaataacgccataacgttaattgcggctaaaatttatttgctcgcgcgcatcgtccattatattgcgtataccgccgggatccccgttatccggactctcgcctttcagagcggttttgtcgcgacggttactattgcgatagttattttaagttccgttttttga

SEQ ID NO: 88178 - DNA, 135 bp, Enterobacter aerogenes
atgattaaggcgaaaggtaaccgtatagcgcggcgaatattaggcctgccccactgggaaagtaaccgatttaaaatcgtgctggccgacactgccgctggcggaaaatggaaagtggtgaagaaaaagaaataa

SEQ ID NO: 88179 - DNA, 783 bp, Enterobacter aerogenes
gtgatcccctttgacagcgcgcagcttagcgaatggctcagccagtatttctggccgctgctgcgtattctggccctcatcagcaccgcgccggtgctgagtgaaaagcagataagcaaaaaggtgaaaatcggtctcggcggcctgattgcgatactgatcgccccaacgctgcccgccaacacgatccccattatctctgctgccggtttatggctggcgattcagcagatcctgatcggcgcggcgctggggctaacgatgcagctggctttcgccgcggtacgcctcgccggcgaagtcatcggcatgcagatggggctatcgttcgccaccttcttcgaccccagcggcggccccaatatgccggtgctggcgcggctgctgaacctgctggcaatgctgctgtttttaagctttgacggccacctgtggcttatctcgctgctggccgacagtttccataccctgccgatccagagccagccgctgaacggcaacggtttcctggcgctcgcccaactgggttcgttaatctttatcaacggcatgatgttggcgttaccgctgatttgtctgttgctcacgctcaatatcgccctgggtctgctcaaccgtatgacgccgcagctatcggtattcgtgatcggtttcccggtgaccatgacctttggcattatgaccctcggcatgatgatgccgatgctggcccccttctgcgaacacctgtttggcgagatgttcgatcgcctggcagccgttatcggcggtatgacgttttaa

SEQ ID NO: 88180 - DNA, 270 bp, Enterobacter aerogenes
atgacgccggaatccgtgatggccattggcaccgaagcgatgaaggtcgccctggcgctggccgccccgctgctgctggcagcgctaatcagcgggctggtggtcagcctgctgcaggccgccacccagattaacgagatgaccctatcgttcatccccaaaattctcgcggtagtggcgacgattattatcgccgggccgtggatgctgaacctgctgctggactatatgcgcacattattcagcaacctgcctaatattattggctag

SEQ ID NO: 88181 - DNA, 762 bp, Enterobacter aerogenes
atgttccctactctgttcgcttgccttcgccgtcgggcgccgtggctcgccgccgcgttactgctgctgagccctgccgccttcgcacagctgccggggcttatcagtcagccgctggctaacggcggccagagctggtcgctgccggtgcagacgctggtgctattgacctcgctgaccttcctgccagcgatgctgctgatgatgaccagttttacccgcattatcatcgtactgggtctgctgcgtaacgcgctgggcacgccttccgcgccgccgaaccaggtgatgcttgggctgacgctgttcctgaccttctttatcatgtcgccggtgttcgacaaggtctatcaggaggcgtacctgcccttcagccaggacaagatcggccttgatacggcgctggataaaggcgcgcagccgctgcgcgaatttatgctgcgccagacgcgcgaaagcgatctggcgctgtacgctcgtttggccaaccagccgccgctggccgggccggaggcggtaccgatgcgtattctgctgcccgcctacgtcaccagcgaactgaaaaccgccttccagattggttttacggtgtttattccgttcctgattatcgatttagtggtcgccagcgtgctgatggcgctggggatgatgatggtgccgccggcgacgatctcgctgccgtttaagctaatgctttttgtgctggtggatggctggcagctgctgctgggctcgctggcgcagagcttctattcctga

SEQ ID NO: 88182 - DNA, 393 bp, Enterobacter aerogenes
atgaccgcccccgttaccgtgcaggccagccaaccggttaccgaaccggcagtatccggcggcgcggcgctcatgcaggtaagcagcgcgctcggcgcgattctgctcctgatcctgctggccggttggttgttccgccgtctcggctttgcgccgcaggcgcgcaacggccggttgcttcacctgcgcgccagctgccaggttagccagcgcgagcgcgtggtggtggtagaagtcgataataccctgctggtgctgggcgtcaccgcccagcagatcaccccgcttcatcagttcccggcgccgccgcgcgatgaaaatactccggcggtcacgcctgcgaacgacttccgccagctgatgcaaaacgtcctcaaacgcccggaaaaatag

SEQ ID NO: 88183 - DNA, 417 bp, Enterobacter aerogenes
atgagtgatcctaagcaaccgtctggcgcaggaaaggaatccgtagacgatctgtgggctgatgcgcttaatgaacagcagtcgtctgagaaatccagcgccaccaccgatggggtgttcaaatcgctggaggcccaggatgcgctcggcagcctgcaggatatcgatctgatcctcgatattccggtaaagctgaccgttgaactggggcgcaccaaaatgacgattaaagagctgctgcgcctgtcgcagggatcggttgtcgcgctggatggcctggcgggcgaaccgctggatatcctgatcaacggctatctgatagcccagggcgaagtggtggtggtggccgataaattcggtgtacgcattaccgatatcattaccccgtccgaacgtatgcgtcggttgagccgctaa

SEQ ID NO: 88184 - DNA, 1008 bp, Enterobacter aerogenes
atgggcgatagcattctttcacaggcagagatcgacgccttgctcaacggcgacaacacgggcgacgagcccgagacggttgtcggcggtaaagagagcgaggttaagccttacgatccgaatacccagcgccgcgtggtgcgtgaacgcctgcaggcgctggaaattatcaacgagcgttttgcccggcagttccgcatgggattgttcaacctgttgcgccgcagcccggacatcaccgtcgggccgattaaaattcagccgtaccacgagtttgcccgcaacctgccggtgccgaccaaccttaacctggtacacctgaacccgctgcgcggcacggcgctgtttgtcttcgcgccgagcctggtatttatcgccgtcgataacctgttcggcggcgacgggcgtttcccgaccaaggtcgaaggccgcgaattcacgcccaccgaacagcgggtcatcaaacgcatgctgcgcctggcgctggacgcctacggcgacgcatggagcgcaatctataagattgacgtcgaatatgtgcgtgcggaaatgcaggtcaaattcaccaacatcaccacctcgccgaacgatatcgtggtgaccacgccgttccaggtggagattggcgcgctaagcggtgaattcaatatctgtattcctttcgccatgattgaaccgctgcgtgaactgctgaccaatccgccgctggagaattcccgtcaggaagatagccagtggcgcgaaacgttggtcaagcaggtgcagcactctgagctggagctgattgccaacttcgtcgatatcccgatgcgcttatcgaaaatacttaagctgcagcctggcgacgttttaccgatagataaaccggatcgcattatcgcccatgtcgacggcgtgccggtgctgaccagccaatatggcaccttaaacgggcagtacgcccttcgtgttgaacacttgattaaccctattttgaatgctctgagtgaggaacagcccaatgagtga

SEQ ID NO: 88185 - DNA, 489 bp, Enterobacter aerogenes
atgtctcaaaactcccttccggcaaccgcgcccaaacgccccttactgatcatcctgctgacgatcgtcgccgtggccgcctgcgcagccgcaggttacagctggtggctgctgcaacagcgcgacggcggcgcgcaaaccgccatcgaaaaggaaaaaccgcccgcgccgccagtatttatgccgctggataccttcaccgtcaatctggtgaccccggacaacgatccggaccgcgtactgtatatcggcctgacgctgcgcctgccggatgaagcaacccgccgccagcttaatgatttcctgccggaggtacgcagccgcctgctgatgctgctctcgcgtcaggaggccggtcatctggccaatgagcagggcaagcagcagctggtcgcgcagatcaaagagacgctgagcgcgccgctggttaagggacaaccgaagcaggtggtcagcgatgtgctgttcaccgccttcatactgcggtaa

SEQ ID NO: 88186 - DNA, 1179 bp, Enterobacter aerogenes
atgaatctcaatgctttgcccgcccttagcctacccggcgacgccagcgccctggcggatctggcgctcgatgacgctcagctgtcatctgcctttgcgcaactgcttggcgcgcgcttcacgcccgcgcaaagcggcacgctgccgccggcggcgctgagcgccgacgatgaaagcgccccgccgctaagccgtaaccagcttaaccagctgctggccgcgcttggcgaacgcggcgcgctgctggtcaatgcgctaccggcatcggcggaaaacgccgtcgacgcaacagcgaaaaaagaggatacgcgcccggatacgccgccgctcagcgaggcgaaaactttagatccggcgacgctgcaggcgctgtacgccatgctgccggcggcaatcgtcgccccgccgccgcagaccgcgctaccgcaggctcaacaatcagcacccagcggcgataaagccgcgctccgcatcggcaacgcggcgactcagcatgtcgtgaacctgccggaaggcgagccggcggcgaagccgcagccgggcacggatccccttagcgggcaaaatctgccttctcctgttgtgcagaccgcgaccacgccgcagcacgatatggccgaatcttcggctgagaataccctatcgcaacctgccgccgtcgctttcgccgccgccagccccagccaaagcgccacgcccgccagtgcgctggtaaccgcgccgccgacgccgcagcttaatgcccagctcggtagcccggaatggcagcaggcgctgagccagcaggtgctgatgttccaccgcaacggccagcagagcgccgaactgcgcctgcatccgcaggagctgggggcgctgcagatcaccctgcagctcgacgataaacaggcgcagctgcacatcgcttccgcacacggtcaggtacgcgcggcggtcgaggcggctatgccgcagctacgtcacgcgctggctgagagcggaatcaacctcggtcagagcagcgttggcggcgaggcgacgccgcagtggcagcagcaaaacggtaacggtgaaggccgcgccagctacgctgaacgccatggcggcggcagcgatgccgcgccgattgagccagtcagcgccccggcagccctgcagcgaatggccaaccagctcaacggcgtcgatattttcgcctga

SEQ ID NO: 88187 - DNA, 447 bp, Enterobacter aerogenes
atgaaagcacagtcccctttgattaccctgcgcaatctggcccaggaggccgtcgaacaggcggcgcagcgtttgggccaggcgcgccaggcgcaacaggccgccgagcaacagctgacgatgctgctgaactatcaggacgagtaccggcaaaagctcaacagcaccctttctggcggcatggaaagctcgcgctggcagaactaccagcagttcattgccaccctcgaacaggctatcgaacaacagcgccagcagcttctgcagtgggggcaaaaggtggatcacgccgtgaagcagtggcaggaccatcagcagcggctgaacgcctacgataccctgcacacgcgcacgcaaaacgccgagctgcagttggaaaacaaacgcaatcaaaaattgatggatgagttcgcgcaacgcagtacacaaaggaataccgcttcatga

SEQ ID NO: 88188 - DNA, 1362 bp, Enterobacter aerogenes
atgaccgcccgtctcggccgctggctgaattcgcttgaagcgctggagcagcgtatcgcccgtacgccgaccgtacgacgctatggccgtctgacccgcgccaccggtctggtgctggaggccaccggcctgcagctgccgctcggcgcaacctgccttatcgagcgtgacggcggcggcggcgtgcaggaagtggaaagcgaagtggtcggctttaacgatcagcggctgtatctgatgccgctggaagaggtcgaagggattgtgccaggggcgcgggtttacgcccgcagcgcggcggacggccagcacgctggtaaacaactgccgctgggcccggcgctgctgggacgcgtgctcgacggcggcgccagaccgcttgacggtctgcccgcgccggaaaccggctatcgcgcgccgctgattaccgcgccgtttaacccgctgcagcgtacccctatcgagcaggtgctggacgtcggcgtgcgcaccatcaacggcctgctgaccgttgggcgcggccaacgtatgggactgttcgccggctccggcgtcggtaaaagcgtgctgctgggcatgatggcgcgttacacccaggccgacgttatcgtcgtcggcctgatcggcgaacgcggccgggaagtcaaagactttatcgagaatattctcggcgccgaaggccgcgcgcgttcagtggtgatcgccgccccggcggacgtatcgccgctgctgcgcatgcagggcgccgcttacgccacccgcatcgccgaagattttcgcgatcgcggccagcacgtgctgctgatcatggattcgctcacccgctatgcgatggcgcagcgtgaaatcgcgctggcgatcggcgaaccaccggctaccaaaggctatccgccatcggtattcgccaaactgccggcgctggttgaacgcgcgggcaacggtatcagcggcggcggttcgatcaccgccttctataccgtacttaccgaaggggacgatcagcaggatccgatcgccgattcggcgcgcgcgatcctcgatggtcacgtggtgctgtccagacggctggcggaggccggtcactacccggccatcgatattgaagcctcgatcagccgcgcgatgacgtcgcttatcgatgacgaacattatcgccgggtacgcacctttaaacagatgctggccagcttccagcgcaaccgcgatttaataagcgtcggcgcctatgccgccggtagcgacccgctgctggataaagccattaccctgtatccgcaaatggagacctatctgcagcagggaattttcgagcgctgcggttatgacgaagcctgtctgcagctacagcagttgattgtttaa

SEQ ID NO: 88189 - DNA, 702 bp, Enterobacter aerogenes
atgtctgatcgcattaattccatgccctggcagccctggtcactcaacgacctcggcgacacggcgccagctttcgaaccaccgctaccgacgttggataacgaagccttgcagcctgacgctcaggcggaactgcagcagcagcttgccgccctgcgcctgcaggccgagcagcaaggtcagcaatccggttatgccgatggccagcaaaaaggctatgaagccggatttcagcagggacttgaggagggccgccagcagggactgctggaagcacagcagcagcaacagccgctgaccgaccactggcagcagctggtgagcgagtttcagcacacccttgatgcgctcgattcggtcatcgcctcacgcctgatgcagctggcgctaaccgccgcgaaacaggtgcttggccagccgccggtctgcgacggcactgccctgctgacgcaaattcaacagttgatccagcaagaaccgatgttcaacggcaagccgcagctgcgcgtacacccgcaagattatgagcgcgttgaacagcagctaggcaccaccctcagcctgcatggctggcggctgctggcggacggcgatctgcatcccggcggctgtaaggtcagcgccgaggagggcgatctcgacgccagtctcgccacccgctggcacgaattgtgtcgcctcgccgcgccgggagatctgtga

SEQ ID NO: 88190 - DNA, 993 bp, Enterobacter aerogenes
atgagcctgaccggaaccgataaaagcgccattttactgatgacgctgggcgaagaccgcgcggcggaggtgctcaagcacctctcctcccgcgaagtccagcttttgagcggcaccatggccggcatgagccaggtctcgcataaacagctcggcgagatcctgtctgaatttgaagacgatgccgaacagttcgccgccctgagcgtcaacgccagcgactatttgcgttcggtgctggtgaaagcgctgggcgaagagcgtgccgccagcctgctagaggatattctcgaatcccgcgaaaccacctccgggatggaaacgctcaactttatggagccgcagagcgccgccgacctgatccgcgatgaacacccgcagatcatcgccaccatcctggtacacctcaagcgcggccaggcggcggatattctggcgcagttcgatgagcgcctgcgcaacgacgtaatgctgcgtatcgccaccttcggcggcgtgcagccggcggcgctggcggagttgaccgaagtactcaacaacctgctcgacggccagaacctcaagcgcagcaaaatgggcggagtgcgtaccgccgccgagattatcaacctgatgaaaacccagcaggaagaagccgttatcgacgcgatgcgcgaatacgatggcgagctggcgcagaagattatcgacgagatgttcctgttcgaaaacctggtggaggtcgacgatcgcagtatccagcgcctgctgcaggacgtggacaacgaatcgctgctgattgctctgaagggcgccgagcagccgctgcgcgagaagttcctcaaaaacatgtcccagcgcgcggccgatattctgcgcgacgatctcgccaaccgtgggccggtgcgcatgtcgcaggtggaaaacgaacagaaagcgattctgctgatagtcagacggctggcggagagcggcgaaatgattattggcggcggcgaggacacctatgtctga

SEQ ID NO: 88191 - DNA, 1677 bp, Enterobacter aerogenes
atgagtgcctcgttatccgccggcgaaagccgcgacaacggcctgcaggccatctggagccgtctgcgcgccaatccaaaaataccactgctggtggccgcctccgccgctatcgccattatcgtcgcactgctactgtgggcgaaaagcccggattatcgcgtgctgtacagcaacctgaacgatcgcgacggcggcgctatcgtcacccaactgacgcagatgaacatcccctaccgcttcgccgagaatggcgcggcgctgatgatcccggcggagaaagtgcatgaaacccgtctgcgtctggcgcagcaggggctgccgaagggcggcgcagttggcttcgaactgctggatcaggaaaaattcggcatcagccagttcagcgaacagattaactatcaacgcgctcttgaaggcgaactctcacgcactatcgagtcgctggggccggtgcagaacgcgcgggtgcacctggcgctgccgaagccctcgctgttcgtccgcgagcaaaaatccccttccgcctctgtcaccctgacgctgcagccgggccgtgcgctggatgatggccaaatcaacgctatcgtctatatggtatcgagtagcgtcgccggcctgccggctggcaacgtcaccgtggtcgatcaggcaggacgcctgctgacgcagtctgacggcaccgggcgcgacctcaacgcctcgcagttgaaatatgccagcgaagtggaaagcggctatcagcgacgcattgaaacgatcctggcgccggtggtcggcagcgccaacgttcgtgctcaggtgaccgcacagatcgatttcgcctcccgcgagcagaccgacgaacagtaccagccgaaccagcagcccgataaagcggcgatccgttcgcagcaaaccagcagcaacgagcaaatcggcggaccgcaggtgggcggtgttcctggggcgttatccaaccagccgagcgcgccggccaccgcgccgattgaaaccgctaaaccggcggccaataacgccagcaacgcgaccaacacccgtagcgccgcggccaacagcggcccgttaagcacccgacgcgacgccaccaccaactacgaactcgatcgcaccatccgccatacccaacaaaaagccgggacggtggagcgtctgtcggtcgccgtggtggtgaactacagcctcaacgccgacggcaaagcgcagccgatgagtaaagaacaactggcgcagattgaagcgctggtgcgcgaagcgatgggctactccagcagccgcggcgatagcctgcaggtggtcaatacgccatttactgacaatcagatgaccggcggcgagctgccgttctggcagagccaggcgtttatcgatttgctgctcgaactgggacgttatctgctggtgctgctggtcggctgggtattgtggcgcaagctgattaagccacagctgcagcagcgtcaggccgcacagcaagccgcggtcgccgccgccagcgcgccgatcgctaaagcgaacgacagccataaaccaagcaatgaggagctggcgctgcgccgtaaatcgcagcagcgcgtcagcgcagaagtccagagccagcgcatccgcgaactggcggataaagatccgcgggtcgtcgctctggtaatccgccaatggatgagtaacgaactatga

SEQ ID NO: 88192 - DNA, 315 bp, Enterobacter aerogenes
atggcgattcagggtattgaaggcgtactgcaacagatgcaggcgatggcgattcaggcgggaaataacgggcagaatagcgtaccgcagggagtcagttttgccagtgaattgaccgccgcgctgggtaaaatcagcgatacccagcaggccgcgcgtcaacaggcgcaaaacttcgagctgggcgtgccgggtatcagcctgaatgatgtgatggtcgatttacagaaatcttcagtttcgttgcagatgggcgtgcaggtgcgtaataagctggtggcggcctatcaggacatcatgaatatgccggtttag

SEQ ID NO: 88193 - DNA, 324 bp, Enterobacter aerogenes
gtgggaaagcagctaacagaagatgagcttcgtgaacatggcttcaccgataaagagattgcccgcctgcgcgaaatcctgacgcgacaagaaagtaacaatgaaacctatgctactttgatcgacagtttacgaaagcgtttttggggcggcgttattgttgtttgtattgcctttgccatagtcgtttcgtggatttttaacttcgaaagtaatgattttacttatacgctaatcattatttttattctgattgctgtttggaaattaacacctttcccgatggcttttaaagcatatcttatctacttgaaaatcgagtga

SEQ ID NO: 88194 - DNA, 408 bp, Enterobacter aerogenes
atggaacgccaacagcagcttttagccgcctatcagcagatccatacccttagcagccagatgattgccctggcgcgcgccgggcaatgggaagcgctggtggaaatgcagtttgcctacgtgacggcggtcgagaaaaccgccgaatttaccggcaaagcggggccatcgctggctctgcaagagatgctcaacgctaagttgaagcagattatcgacaacgaaggggtattgaaagggctattgcagcagcggatggagcaattaaaaacgctgatcgatcaatccactcgccagaacgcggtcaacaccgcttacggccagttcgacgatcgttcgctcctgcttggcgaactgcagtccgataatgtggtcgccattaagagcaaaagcgaagaattacaataa

SEQ ID NO: 88195 - DNA, 411 bp, Enterobacter aerogenes
atgtataaccgtagcggcacgcaagcctacgcacaggtcagtctggaaagcagcgcgatgagcgccagtccgcaccagttaatcgtaatgttgttcgacggggcgcttaacgccctgcttcgcgcacgcatcctgatgaatcagggggatatcgccggtaaaggcctggcgctgtcgaaggcaatcaacatcatcgacaacgggttgaaaagcggcctcgaccaccagcaaggcggtgaaatcgccgataatctggcggcgctgtacgattatatgaagcgacgcctgatgcaggccaacctgcataatgacgaagcggcgatcgtcgaagtggtcaagctgctggagaatatcgccgatgcctggcggcaaattgggccaaactttcaacctgcacagggtacattgtga

SEQ ID NO: 88196 - DNA, 1404 bp, Enterobacter aerogenes
atggcatcgatcagttccttaggcatcggctcaggactcgacctcaacggtttactggacaaactcagcaaggcggaacaacagcgcctgacgccgtataccactcagcaaaccagctataacgcgcagctaacggcttacggcacgttaaaaagctcgctggaaaaattcgataacctgagcaaggagctggccaaaccggagtttttcaacagcaccaccgccaccaagcacgaccagttcaccatcaccaccaccaataaggcggtgccgggcaactatagcgttgaagtgcagaagctggcgcagccgcaaaccctgaccacccaggcgacgattaccgatcagcaggaaaaactgggtaccgctggcaatagcgatcgttccattacgatcaccgccggtaatccgccgaaagagaccacgattccgctgagcgatgaccagacctcgctgctggagatgcgcgatgccatcaacggcgctaaagccggcgttaccgccagcatcatgcgcgtcggtgacaatgactatcagctggcgctgagctcctccaccaccggcgagaaaaacaccgtttcggtgcaggtgaataacgacgataaactcggcgctatcctcaactacgacagcaatagcaaaagcggcgcgatgaagcagaccgttgccggacaggatgcggagattatcgtcaacggcaccaaaattaagcgcagcaccaactcgattgccgatgcgctgcagggcgtcaccatcgacctgaaaaccaccaccaaagccggcgaaccgcaaaacctggtgatcggcatcgataaaagcggcaccgccgacaaaatcaaagagtgggtcgataactacaattcgctgctcgacaccttcggctcgctgaccaaatacaccccggtgaaaagcggtgaagcgcaaagcgccaagaacggcgcgctgctcggcgataacaccctgcgcggcattcagtcgtcgattaaaagcgcgctcagcgccgctcaggacaacccggagctgaaaggccttggcaacctcgggatctctaccaatcccaaaaccggcaagcttgaagtcgacagcaccaagctcaataaagcgctcgacgagaaaccggatcaggtcgccaacttcttcgccggcaacgggacagacaccgggatggccaccgaaatccataatgaaatccagaactatattaaagcgggcggcatcatcgagaactcgaccaaaagcatcaacaccaatctcgatcgcctgaatatccagatcgacactgtttccgacagcatccagaacactatcgatcgctataaacaacagtttgttcagttggataccatgatgtccaagctgagcagcacgggtaactacttacaacagcagttctcgtcccagtaa

SEQ ID NO: 88197 - DNA, 1275 bp, Enterobacter aerogenes
atggcacaagtaattaataccaacagcctgtcgctgatggcgcaaaataacctgaacaaatcccagtcttccctgggcacggcgattgagcgtctgtcttccggtctgcgcatcaatagcgccaaggacgatgccgcgggtcaggcgatctccaaccgtttcaccgccaacatcaaaggcctgactcaggcttcccgtaacgctaacgacggtatctccctggcgcagaccaccgaaggcgcgctgaacgaagtcaacgataacctgcagaacatccgccgtctgaccgtacaggcgcagaacggttctaactcttccagcgacctgcagtccatccaggatgaaatcacccagcgtctgtctgaaattgaccgaatttctcagcaaaccgatttcaacggtgtgaaagtactgagtagcaatcagaagctgactatccaggttggcgctaatgatggtgaaaccatcgacattgatctgaaagatattaataaaagcaccttaaatctggatactttctctgttgcgttcggtgttgataaaggcagcgttggaactactgcagttaaaacaacagatactattacattagacaaaacagccacttttaaagctggtcaaaaagttggtggtgatgatgttgttggctatgttcaggggacagatggcaaaacctatgcccgcactgcaaatgcagctacgccttatgcggaagttactggcttaactaaagacggcactgcaacatttggcactgcaacagcagcaactccggaaattactgcgggtaaagcagtaactgaaggtaaaatcatggtgaaagctgcagacaatgccgatggcgatttggctaaaactttcgcgtacacgggtacagagaaaggtgctcctaaatatgtgattaaagatactagtggcgcgactgaccgttattacgcggctacttttgatgccgatggtaaagtggttcgcggcaacgagctcagctcaactcctgctactgaagatccgcttgaagcattagacaaagccctgtcccaggttgaccaactgcgctcctccctgggtgcggtacagaaccgtttcgattctgttatcaacaacctgaacagcaccgtgaacaacctgtccgcgtcccagtcccgtattcaggatgctgactacgcgaccgaagtgtccaacatgagccgcgcgaacatcctgcagcaggcgggtacctccgtgctggcgcaggctaaccagtcgactcagaacgtcctgtctctgctgcgttaa

SEQ ID NO: 88198 - DNA, 723 bp, Enterobacter aerogenes
gtgagcgatttgtataccgccgaaggcgtgatggacaaaaattccctctggctgcgctacgttccgttagtgcggcacgaggcgttacgcctgcaggtcaggctgcccgccagcgtcgagcttgacgatctgctgcaggccgggggaatcgggttgttgaacgccatcgagcgttacgactcgctacagggaacggcctttaccacctatgcggtacaacgtatccgcggcgcaatgctcgatgaactgcgcagccgcgattgggtgccgcgcagcgtgcggcgtaacgcccgcgaagtcgcccaggcgatgcagaagctggagcagcatctgggccgcccggccacggaaagcgaacttgcgcagacgctgggtatctcccttgccgagtaccgacaaatcctgctggataccaataacagccagctgttctcctacgatgaatggcgggaagagcagggcgagaatgccgaacgactactggaagggcacgaagaggccaatccgttgcatcatctgctggaaggcagcctgcgccagcgggtcatcgaggccattgaagccttgcctgaacgcgaaaaaatggtgcttaccctctactaccaggaagagctcaaccttaaagagatcggtgcggtgctggaggtgggggaatcccgcgttagccagctgcacagccaggcgattaagcgcctgcgcgcgaagctggccaacgaaggctaa

SEQ ID NO: 88199 - DNA, 1170 bp, Enterobacter aerogenes
atgcctaatcgcaacttgataaaaccgctggctgcgctactgctcgccgccctgctcccccacccggctttcgccatcgatcctccgcggcgggaggcatcgcgctttgcgatgaaaaccaattacctgcaggaagccaacgaaggggtttatgagctggcgttcgacaacggcgacaacctgctattcgccgcggccaccgaccgggttaaacgcgcggccaataaaggttatctttacgcctttaatccggccaccctgcaggttatccagcgctatgatatgccctggcgcgccttctcgctggcgatgaatcagtcggcgcacgtgctttatgtcggccatacccaggcggcttcgctgcgtatcagccagttcgacgccgccagcggtaaaatcacccgcaccagtccgcacctgagcttccccaccgacggcgccgccgatgcgcgcttcgaacatctgcggcatatggtatacagccgcgccgctaatctgttatttgtcagctacagccatatgctgaaaacccaggacgggatgcgtccgctgcacaaattactgatgctcgacggcacgacgttgcagctgaaaggggaagtcaaaggcgcctatcgcggcaccgcctacggcctgacgctggatgaaaagacgcagaagatctacgttggcggccgcgactatatcaacgagatcgatgccagaacccagcaggttgtccgcaccatcccgcttaacgcgccgcagctggccagcgcgcaaaatctgatcgtcgattccgactcagggcgtattttcgtcgtcgccttcgatcacgacgatcgcagcggccctcatgacggcctgtatattttcgatctgaaagacggcaaatcgctgggctacgtgcgtaccggcatcggcgctaacgcggtgcgctacaatccgaaatataacgagctgtacgtcagcaatttcaccagcggcaccatcagcgtcgtggatggcaaaacctggcgggtgactcatgaattccgcgccccggtttatccgaatcaaatggtgctgtcgccggacatggataccctgtacgtcggcattaaagaagggttcaatcgcgagtgggatcctgaggtatttgtcgaaggggcgaaggagcgcattctgcgcattgatttgcgtaaatcgtaa

SEQ ID NO: 88200 - DNA, 2223 bp, Enterobacter aerogenes
atggaaaaatcacaaataatcacggggctcgttaccgggctacttatcgtcaacggccaggctttcgccgccgaaagcgaaggagaatcggttttctctcctatcaccattaccgataacccgctggcggaaaatgccggccaggtcggctcctcagaggagagctatacccgtcccggcgcctacagttcgcgaacgctcaataagaatctgcaaagcctcgatgcctcgctgcgcagcatggcgggcacctatacgcaaatcgacccgctgcagggcaccatcagcgtcaatatccgcggcatgaacgggctgggccgggtaaacaccatggtcgatggcgtcacccagaccttcttcggcatggcgccggctaactatcacggcggggcgaataccgccgccggggtgccgcttgaccccaacttcctggccgaagtggatatcacccgcggcaacagcgccggttcgcaaggcgtcaacgcgctggcgggcagcgccaatctgcgcacgatcggcatcgatgatgtgttaaaaccggggcatcaggtcggcctgctgtcgcgtttttccgtgggcgataacggactcggccgcaccggtatggtaacggtagccggcaaaaccgacaccttcgataacggcggcggccttggcgcgctactcggcatcagcggcacccgcacctatgcgacctataaaaacggcggcggacgcagcagcgaagagtttatcggcgaggataataaatatttgcgtcaggagccgcgctcgcagctatataaaatcaatttcaacgttgatcaatttaaccgcttcgagttttccgggcgtaattaccgcaatagttttacccgtcgcgatattagcagcgacgactactatctgcgctataactacgcgccgctcaatgaactggtcgagttcaatgtattagccagcaccagccgcggcaatcaggcatataaaccggagtcgctgtataattttaacgactcctcgaccaccaataagtccaacgcgctggacatgaacaacaccagccgttttcgtattaccgacgatctgtatgccgctttccagctcggcggcaaattaatggacacccgctattcccgccgcttcgagcaggataccgagaccgaccacaacgccttcgccccggcgggcaagcagaagatcgcctcgctctatagcgggctgacattaaacaaggatatttatcagctcgatcttaatctcaactatacccgcagccgggtacagggctataaaccggcctgtgcagataacgaaaagtgcttcccgcaaggggccacccaactcaacgtcaaagataacggttttaatccctcggcgaccttctccgctcaggtgacgccatggctgcagccgtttgtcagttggagccgttcctcgcgtgcgccgaacgttcaggaagtgttcttcgccaacgagggcggcgcatcgatgaacccgttcctgaaaccggaaaaagccgaaacctgggaggccggttttaacgttatcaaacaaggattattgagcgagcaggatagcctgcatctgaaagctctgacctaccgctcgcggattaaagattacatcaccagcgaatccttcctgctgtgcagcaacggcgggctgtgtaaagatgtcgccaatgcttcgccggatttcaacgccaatatctcggttaacgtcacctcgccggtgaccaccgagggctatgagattgaagccggatacgacatcggttttgcctacgccaatgtgtcatggagcaagcagcgtaccgatcagcccacctctattgccagcacggtctatagcttcgcctatagcgacctgagcgatctccccagcagctacgccacggtggatgtcggcgggcgcctgttcgatcgcaaactcaccgtcggcagcctggtgaaattcaccggtaaatcaaaacgcctgagtaccgaaggcattagcctcgacaccaatacggtgcctaaagagagcatgccgaatatcccgaccattatcgacctctatagcagctggcagatgaccgataacgtgctgctgcgctttagcgtgcagaacgtaacgaatcgtgactactccgaagcgctaaaccgtatgaaccagagtctcgataacgccaaagaaggcgcgtctgttaacactaccgcccgcggccgcacctatattttcggcggcgaaatccagttctga

SEQ ID NO: 88201 - DNA, 792 bp, Enterobacter aerogenes
atgaatatccctctctccacgccattgatagcgtcgcatccccgctggttcacgggaacaacggccagcgtgctgggtcatctggcgctggcggtgccttttatcattcatttcgcctcgccgccggatgtcgcgccccctgccgcggtgatggtggagtacgcgccggaactggaagtgtcatttattcaccccgagctgccgccgggcgtcacccagcagcgcaaagtcgaggcgatgaccgagcaggaaacagcagcggtgaaagaggcgccgaagctacatattcacgacaatgcgcaaataaagctctccgccagcaaacccgaaccgcagcggaaaaagaaaatcgaggttaaaaaacagtcccgccgccagcagcaagaggaaaagggcaattcaaccatcaccagcttcgctgcgcccccggcgccggccgtcctcactcagcgcaccaccgcgccgctcgatagcgatgccgcgcgcctgagcgacaacaagatcagttgggaatcgctggtgaaaggcaaaatcaacaaaatgcgccactacccggaagatgcgcgccgccgtaaacgtaccggtaccgtcattattaccttcagcgtcaacgaacgcggcgaggtgttgcaatcgcagctggcgaactcgtcagggacccattcgctggatcgcgccgcgctgatggcgctggaaaatgcgcgtccgcttccgccgccgccaaaagagctgctgcgtaacggcataaataaggtcaccctgccggtagagttcggcttattaaaaatataa

SEQ ID NO: 88202 - DNA, 864 bp, Enterobacter aerogenes
atgtttaaggacccccttttaaagactctggttataggctgcgcgtggttactgagcgcctgtcacagcccggttcaccccctctctcctgccggggagcacgcgctggtagagaaggcgaatattcgtgataccgccagcgggcgcaccctgacgccgcaacaattgctgaaccaactcgcccaggcgccgctggttattgttggcgaagaacataccaacgctcagcatcaccagattgagcgctggctgctgcagaacctccacacccttcgcccgcagggtagcgtgctgatggagatgatcgacctaagccagcaggaggcagtcaatcgggtcaagcgggccagcctcagcgggacgaccgtgagcgccactcgcgcggcggaaaccctgcgctggaaccccggctggccgtgggcgctttatcgcgacgtcgtgatgaccgcgctgcaagcaccttatccactgctggcagccaaccttagccgccagcaggtgagcgatatctatcagcatcccacgtttccccgcggaatgctctccaacagcccgcaggtacatgaatcgctatcggccattatctatctgatgcataacgggcaaatcgatggcgagcaggtcacctctatgctcgctattcagcagcagcgcgatcgcctgatggcgacgcaaatgcaagccgcgccgcgcccggcgctgctgattgccggcggctatcatgcggctaaagatattggcgtaccgctgcatctggccgatctcaaggcggaaaaaccgctggtgttactgctgaccaccgacggcgccacgctgacggcgaagcaggctgattacatctggtcggtggcggcggaaaaatga

SEQ ID NO: 88203 - DNA, 1017 bp, Enterobacter aerogenes
atgaatttccgcttatcggcatattgcgcggcgatgctcgctgcttcggctctgtttaccgctccgcaggttatggctgctgacaatggcgacggcattgtggtgtataacgcccagcatgaaaacctggtgaaatcctgggttgacggctttaccaaagaaaccggtattaaagtcacgctgcgcaacggcgacgatagcgaattgggtaatcaactggtgcaggaggggtcagcctcgccggcggatgtcttcctgaccgaaaactcaccttcaatggtgttggttgataatgccaaactgtttgcgccgctggatgccgtgacgctgaatcaggtcgcgccgcagtatcgtcctgagcacggccgctggattggcattgctgcccgcagcaccgttttcgtctataacccggcgaaaatcagcgaatctcagctgccgcattcgctgatggacctggcgaaacctgagtggaaagggcgctgggccgcctctccatcgggcgcagacttccaggccatcgttagcgccatgctggcgttgaagggcgaaaaagcgacgctcgactggctgaaggcgatgaaaacgaacttcgtggcctacaaaggcaacagcacggtaatgaaagcggtcaacgccggtcaaatcgacggtggggtgatctaccactattaccgctttgtcgaccaggcgaaaaccggcgagaacagcaaaaacaccaaactttattatttcaaaaatcaggatccgggcgctttcgtgagtatctccggcggcggcgtactggcttccagcaaacataaagagcaggcgcaggcctttatcaaatggatcaccggcaagcagggtcaggatgaactgcgtaccaataatgccttcgaatatgcggtgggcgtgaatgccgcctctaacccgaaactgacgccgctgaaagagctggacgcgccgaaggtagagccgtcaacgctgaatagcaaaaaagtgatcgacctgatgacccaggctggcctgctgtaa

SEQ ID NO: 88204 - DNA, 1575 bp, Enterobacter aerogenes
atgtctgtcctgagtctggtactcggaaagaaaacaggacgcctgcccgagcgcaggcgtcctgcatttccgatggttgccttagctgtactgttttcagtaatggcgttactgccgttaggttttgtggccgctgtggggattgagaccggctggccgaccattaaagcactggtgtttcgcccgcgggtagctgaactgctcagcaatacgctgtggctgacgctgctggcggtgcctatctctatcgtactgggcgtggcggtggcctggctcactgaacgcaccgcgcttgccgggcgtcagctgtggtcggcgctggcggtcgcgccgctggctatcccggcatttgtccagagctatgcctgggtcagcgcggttccctcgctgcacggcctgtccgccggggtgttcctctcggtgctggcctactatccttttatctacatgccggtggcggcggtgctccgtcgtctcgatccgacgctggaagatgttgccgcctcgttgggtacgccgccgtggaaggttttcttccgcgtggtgctgccgcagctgcggttggctatctgcggcggtgcgctgctggtggcgctgcatctgctggcagaatatggcctgtatgtgatgattcgcttcgataccttcaccaccgccatttatgaccagttccagtccacctttagcggcccggcggcgaatatgctggcgggggtgctggcgctgtgttgtctggcgattctgctactggaaagcgtctcgcgcggcaaagcgcgttacgcgcgcatcggcgccggcgcagcgcgcgaacagaagcgtcgtccgttgggcaatgtggccgcatggggcgcgcaactgctgctgttgacgctggtgatgctggcgatgggcgtcccgctgctggtgttgtgccgctggctatggcttggcggggtggagaactggctgcatgccgatctttggcattcgctgcgccagaccctgctgctgggagcgggcggcgcgctgctgaccaccgcctgcgcgattcctatcgcctggctcggcgtgcgttatccgcgccggctgtttcgcctgctggaaggctgtaattacatcaccagctcactgccgggtatcgtcaccgcgttggcgctggtgacggtcaccatccactatgcccgtccggtgtaccagaccgaggtgaccctgttcctcgcgtacctgctgatgtttatgccgcgagcgctgattaacctgcgcgccggtatcgcccaggcgccggttgagctggaaaatgtcgcccgtagccttgggcgcagcccggcccgcgccttatggagcgtcaccatgcggctggccgcgccgggagcggccgctggcgccgcgctggtgtttcttggcgtgagcaacgagcttaccgcgacgttgctgctatcgccgttaggcacccgcacgctgtcgaccggtttttgggcgttgaccagcgagatcgactacgtcgccgcggcgccctatgcgatgctgatgatcgtgatttcgctgccgctgacggcggttctttatgtgcagtcgaaaaaaattgcagggttgtaa

SEQ ID NO: 88205 - DNA, 1029 bp, Enterobacter aerogenes
atgctggaattgtcttctatctcgaaatctttcgccgacgcgctggtgctcgataaccttaatctggcagtggcgccgggaagccgtaccgccattgtcggcccgtcgggttccggtaaaaccacgctgctgcggattcttgccggttttgaaacccccgacaacgggcgaatcgttctgcagggcaataccctgtttgccgaaggcgtgtttgtgccggcgcatcagcgcgggatcggtttcgtgccgcaggaaggggcgctgttcccccatcttaacgtcgcggacaatattgcctggggactcgattgcagtcgcgaagagaaacgccgtcgggtggccgcactgatggagatggtggcgttagatgcgacattagcgaaccactggccgcatgaaatttccggcggccagcagcagcgggttgcgctggcgcgcgcgttggcccagcggccatccctgatgttgctggatgaacctttctcggcgctggataccgggttgcgggcggcgacgcgcaaagccaccgccgatctgctggccgaggctggcgtagcctcgatcctggtcactcacgaccagacggaggcgctgtcgtttgcaagccaggtcgcggtgatgcggcaggggcgtttcgctcaagtagggacgccgttcgaggtctactcgcgtccggttgacgaggccaccgcgctgtttcttggcgatgcgctggtgctcgacgccgagctcatggaagggcgcgcccgttgcgccatcggcgagttgccgaccgacgatcctcacgccagcggccgcgggcgcgtgatgttgcgcccggaacaactgcgggtgtcgtcgtgcgcgccgcaggagagcgcctttcgcatcgtggatgtcgatttcgccggccatatctcgacgctgaccgtgagcgcggcggggcaatcgatgccgctggtgctgaaaaccgtcagccaggccgcctggcaagctggcgccgcggttcgcctggacgttattggtcaggcgcggatattttgcgcatag

SEQ ID NO: 88206 - DNA, 966 bp, Enterobacter aerogenes
atgtctgattatcaaatgtttgagacgatcgttcgcgatgttgaacagatcaccgcccaggttaagcgttttacgctggtgtcgccgaccggcgccccgctgccgggattcagcggcggtagccatattatcgtccagatgcaggatggcgagcagcgctacagcaatgcctattcgctcatgagctcgccgctggataccaccagctggcagattgcggtgcgtcttgagtcgccttccaaaggcggctcgcgttttatgcatcagcaggtgcgaccgggcgataccctgacggtgtccacccccaacaacctgttcgccatcgaaccgcaggcgcgcaagcatctgctgatcgccggcggcatcggcattacgccgtttttagcgcatattcctgaactggaacagcagcaggctgactggcagctgcactactgtttccacgacgccgacaataatgctttcgtcgatgcgctcagcgccgcgccgtggcgcgaccgggtcgatattcacatatcagcgctcggcagccgtctcgacctgtcgcgcctgttcgccgatatcgaacccggcacccatatctatacctgcggcccggcagcgcttaacgaggcggtgaaagccgccgccgaacggtatcaggttcccgccagccagctgcactttgagcaatttatcgttgaagataaaggcggagaggcatttaccctggtgctggcgcgttccggacgcgaatttaccgtgccgcaggagatgaccattttgcaggtgatcgagaataacaaagcggcgaaggtggaatgtctgtgccgcgaaggggtgtgcggcacctgcgaaacgatgattctggagggcgaagccgaccaccgcgatcagtattacagcgatgaagagaaagccagccagcagagtatgctgatctgctgctcacgcgctaaaggcggccggttagtgctggatttatag

SEQ ID NO: 88207 - DNA, 1449 bp, Enterobacter aerogenes
atgtccgtatttcactctgatctgtttcgccagcaggcgctgattgccggaagctggcgcgacgccgccgacggtacatcgcttgccgtcagcaatccctccaccggcgcgacgctcggccaaatccccaatatgggacgagcggaagcgcagcaggcggtggatgccgctactgccgcgcttccggcatggcgcgcgcttaccgccgcccagcgcgccgcgttattgaagaactggcaccacctgatcctcgaaaacaagaccgcgctggcgcagataatgaccgccgagcagggcaagccgctggcggaagcggaaggcgaaatcgcctatgccgcctcgtttatcgagtggtttgccgaacaagggaaacgcgccaacggcgaaataatcccctccccctgcgccgataaacgcctgatggtgatccgccagggcgtgggggtctgcgcggcgatcaccccgtggaacttcccggcggcgatgatcacccgtaaggccggcccggcgctggccgcgggttgtacgatggtaattaagcctgccaatgaaacgccgtttaccgcgctggcgatggcggaactggcgaatcaggccgggatcccgcagggcgtcattaacgttgtcaccggccagtcgcgtgagattggcgcggtgttcaccggcgatgagcgggtgcgtaagctctcctttaccggctcgaccgaagtcggccgcgtgctgatgcgccagtgcgcggaatccatcaaaaagctctctttagagctcggcggtaacgcgccgtttatcgtctttgacgacgccgatatcgataaagcggtcgagggcgcgctgatcgccaagttccgcaacgccgggcaaacctgcgtttgcgtcaaccgcttctatattcatcgcgccgtctacgaccaattctgcgacaagttcgtcgcccgcgtcgccgccttgaaagtcggcgatggcagcgagtccgatgtccagattggcccgcttatcaacgccgacgccggacgcaaagtccagtccctgctcgacgacgcgctcacccgcggcgcgacgctgttaaccggcggtaaagcgcatccgctgggcggtaatttcttcacccctacggtgatcggcgacgtacagccggggtcactgctgctgcaggaagagattttcggcccggtggccgcgctggtgaaatttgaggatgagcaagaggtcattgagcaggcgaataacaccatctacggtctcgcctcctatttttacagcaacgatgccgcccgtatctggcgcgtctccgagcaactggaatacggcatggtcggcatcaataccgggctgatttccaacgaagtcgcgccatttggcggagtgaaacagtcgggtcttggccgcgaaggctcggaacacggaatcgaagattacctggagatgaagtatctctgccaggggttgtaa

SEQ ID NO: 88208 - DNA, 1125 bp, Enterobacter aerogenes
atgagcaatttaagccctgactttaccctgccgattaacttttgtgccaatccacaggacgcctggaccattccggcccgtttttacaccgacagccaggcgtttgagcacgagaaagagcgtatcttcgccaatagctggatttgcgtcgcccacggcagcgaagtcgccaggccgaacgattacattacccgagagatcatcggcgaaaatatcgttatcgtccgcgggcgcgacaacattctgcgcgccttctataacgtctgcccgcaccgcggccaccagttgctgagcggcgagggtaaagccaaaaacgtgattacctgcccctatcacgcctgggccttcaagctggacggcaatctcgcccacgcccgcaactgcgaaaacgtggcgaatttcgatagcgataaggcaacgcttgtgccggttcgccttgaagagtatgccggctttgtgtttatcaatatgaacccgcaagcggagagcgtggaaacgcagctaccggggctgcaggacaaagtgctggaagcctgcccggatgttcatgagctgaaactggcggcgcgctttaccactcttaccccggcgaactggaaaaatatcgtcgataactatctggaatgttaccactgcggcccggcgcacccgggcttctcggattccgtgcaggttgaccgttactggcacaccatgcacggcaaatggacgctgcagtatggcttcgccaaaccctccgagcagtcgtttaaattcgaagaaggcaccgacgccgcgttccacggtttctggctgtggccgtgcaccatgctcaacgtcacgccgatcaagggcatgatgactgtcatttatgaattcccggtggatgaagagaccaccctgcagaattacgacatctatttcaccaacgaagagctgaccgacgagcagaaagcgctgattgagtggtatcgcgacgtgttccgcccggaagatttgcgtctggtggaaagcgtgcagaaagggctgaagtcccgcggctatcgcggccagggacggattatggcggataacagcggcagcgggatctccgagcacgggatcgcccatttccacaatctggtcgcccaggtattccagccgtaa

SEQ ID NO: 88209 - DNA, 1608 bp, Enterobacter aerogenes
atgttgagcaacgtaaagaaaaaagatgtgccgctgattgtcatcagcctggcggccattgttttcatcgccgctacattaagtctcttcccccaacaaaccgcgcaggcggctaattcgatttttaacggcgttacccgcctgctgggttccgcggtacaggtgctggtgctgctggcgctgggactggtgttatatctggctaccagcaaatacggcaatatccggctcggcgaaggcaaagccgagtacagcactctctcatggctgtttatgtttatctgcgccggactcggctcctctacgctgtactggggtgttgccgagtgggcttattactaccagacccctggcctgaatattgcgccgcattcagcaaaagcgctggaatacagcatcccgtactctttcttccactggggcattagcgcgtgggcgacctacaccctcgcctcgctgatcatggcctatcacttccacgtgcggaaaaataaaggcctcagcctttccgggatcatttcggcgatcaccggcgttaatccgcagggcttttggggccgcctggtcgatctgatgttcctgattgccaccgtcggcgcgttaaccatttcgctggtagtcactgccgccaccttcacccgcggcctgtcagctctcaccggactgccggataacttcaccgtccaggcgtttgtgatcctgctctccggcggtattttctgcatgagttcgtggattggtatcaacaacggcctgcagcgtctgagcaaaatggtcggctggggggcgttcctgctgccgttggtggtattactgatcggcccgaccgaattcatcaccaataacatcatcaacgccatcggtctgacgagccaaaactttctgcagatgagcctgtttaccgacccgctcggcgacggcgcctttacccgcaactggaccgtcttctactggttgtggtggatctcctatacccctggggtggcgatgttcgtcacccgcgtctcccgcggccgtaagattaaagaggtgatctgggggcttatcctcggcagcaccgtcggctgctggttcttcttcggggtgatggaaagctatgccatgcatcagttcgtaaacggcgtgattaacgtgccgcaggtgatgcagtccctcggcggcgaaaccgccgtccaacaggtgctgatgtcgctgccggcgggcaagctgttcctcgccgcctatctgttcgtaatgatcgttttcctcgcttcgcacatggatgcggtggcttacaccatggcggcgaccagtacccgtaacctgcgcgaaggcgaggatccggatcgcggcatgcgcctgttctggtgcgtggtgataacccttatcccgctatcgattctgtttaccggcgcttcgctggaaaccatgaaaaccaccgtggtgctgaccgccttaccgttccttgccattttactgatcaagaccggcggcttcgtacgctggctaaaacaggactacgcccacgtgcctgtgcatcagatagaaacccatacgcccgagccgatcgttaaagccgagacgctgccggttggcgcggtactcaaaggcgacggccagtcgctgtaa

SEQ ID NO: 88210 - DNA, 1086 bp, Enterobacter aerogenes
atgaaaaaaacctgtcgtattgccgccatccccggtgacggaattggtaaagaagttctgcctgaaggtattcgcgtgctgcaagccgccgcgcagcgttgggatctgtcgctgagcttcgagcagatggagtgggcaagctgcgaatattacgcccatcacggcaagatgatgccggacgactggcgcgagcagttgcagggcttcgatgctatctatttcggcgccgtcggctggccggataccgtccccgaccatatctcgctttgggggtcgctgctgaagttccgccgtgagttcgatcagtacgtcaacctgcgcccggtgcgcctgttccccggcgtcccctgtccgctggcgggtaaaaaggccggcgacatcgatttttacgtggtgcgcgaaaataccgaaggcgaatattccgcccttggcggtcgcgccaatgaaggcaccgagcatgaagtggtgattcaggagtcggtcttcacccgccgcggcgttgaccggatcctgcgctacgcctttgagctggcgcaaagccgcccgcgtaaaacgctgacctccgcaactaaatctaacggtctggcgatcagcatgccctactgggatgagcgcgtggaagagatggccaaaagctatcccgaaattcgctgggacaagcagcatatcgatattctctgcgcccgcttcgtgctgcagccggaacgtttcgacgtggtcgtcggctccaatttgtttggcgatattctgtcggatctcggcccggcctgtaccggcactatcggtattgcgccgtcggctaacctgaacccagagcggaccttcccgtcgctgttcgaaccggttcacgggtcggcgccggatatctacggtaaaaatatcgccaacccgatcgctaccgtttgggctggggcgatgatgctcgatttcctcggaaacggcgacgagcgctaccatgccgcgcacaacggcattctggcggcgatagagcaggtgatcgccagcgggccgaaaaccccggacatgaaaggcaacgcctcaacgcagcaggtcagcgacgctatctgcaaggccattttggcgtaa

SEQ ID NO: 88211 - DNA, 975 bp, Enterobacter aerogenes
atgaataatctgccgctgctaaatgatttacgcgtgttcatgctggtcgctcgccgggccggttttgccgccgccgccgaggagcttggcgtctcaccggcgtttgtcagcaagcgggtttcgctgctggagcaaaccctgcatgtgatgttgctgcaccgtaccacccgtcgggtcaccattaccgaagagggggagcggatctacgaatgggcgcagcgcattctgcaggatgtggatgagatgatggacgagctttccgacgtgcgtcaggtaccgcagggaacgctgcgtattatcagcagctttggttttggccgtcgggtggtggcgccggcgctgtcggcgctggcgcgccagtacccacaacttgagctgcgcttcgatgtccaggaccggctggtggatttagtcaatgaaggggtggatctcgatattcgcgtcggcgacgatatcgcgccgaatctgattgcccgcaagcttgcgaccaaccaccgtattctctgcgcgtcgccgcagtttcttgcccgccatccgcagccgaagcagcttagcgatctggctaccttgccctgtctggtgattaaagagcgcgaccatccgtttggcgtctggcaattgcacagcaaagagggccagcacgcgatcaaagtgaccgggccgctctcctccaaccatggagagattgtgcatcagtggtgtctggatgggcaggggatcgcgttacgctcatggtgggatgtcagtgaaaatatcgccagcggccatctggtgcacgtgctgccggactacttccagcccgccaacgtctgggcggtctacgtgtcgcggctggcgacctcagccaaaattcgcaccaccgtggagtttctacgccactattttcagcagcactatccccagcagtgtatcgtcagcagcgaggaaaacagccggcgaccagcgccgccggcggagggcgttacagacgagtaa

SEQ ID NO: 88212 - DNA, 1266 bp, Enterobacter aerogenes
atgagcaacaatgaattccatcagcgtcgtctttccgctaccccgcgcggggtgggcgttatgtgcaacttctttgcccagagcgcgcaaaacgccaccttgaccgatgtcgaaggcaatgaatatatcgatttcgccgccggcatcgcggtgctgaataccggccatcgccatccgcggatggtcgccgcggttgaacagcagctacagcaatttacccataccgcctatcagatcgtgccttatgaaagctatgtgtcgctggcggagaagctcaacgaactggcgccggttaaaggcccggcaaaaaccgccttcttctctaccggcgcggaagcggtcgaaaacgcggtgaaaatcgcccgtgcccataccgggcgccccggcgttatcgccttcggcggcggtttccatggccgtacctatatgacgatggcgctaaccggtaaggtcgcgccgtacaaactgggcttcgggccgttccccggctcggtataccacgtgccgtatccgtcagcgctgcacggtatcagcaccgccgattcgattaccgcccttgaacgcctgttcaaagccgatatcgaagccaaacaggtggcggcgattattttcgaaccggtacagggcgaaggcggttttaacgtcgcgccgaaagagctggttgccgcagtacgccgcctctgcgatgagcacggcatcgtgatgattgccgatgaagtacagagcggcttttcccgcaccggtaaattgttcgccatggatcactatgtcgataaaccggatctgatgacgatggccaaaagcctggcgggcggcatgccgctttccggcgtggttggtaacgcgcagattatggatgccccggcgccgggcggcttaggcggcacctacgccggcaacccgctggcggtggcggccgcgcatgcggtgctggatatcattgataacgaagcgctgtgcgagcgcgcccagttcctcggcgagcgcctgctggcgacgctacaggaagttaagggctggtgtccggcgctggtggaagcgcgcggcgtgggttcgatgatcgccgccgagttcttcgatccggcgaccggcgaaccatcggcggcgattgcgcagaaaatccagcagcaggcgctggagcagggtctgctgctgttgacctgcggtcagtatggcaacgtcattcgcttcctctatccgttgaccatcccggatgcccaattctcccgcgcgctgacgattctgcagagcgttactcgtctgtaa

SEQ ID NO: 88213 - DNA, 1281 bp, Enterobacter aerogenes
atgactgaacataccactagctactacgccgccagcgccaataaatatgaaccgttcccgacgctggaggaatcaatcacctgtgatgtctgcgtcgtcggcggcggctacaccggcctctcctcggccctgcatctggccgaaatgggttacgacgtggtggtgctggaaggcgcgcgtatcggcttcggcgccagcggccgtaacggcggacagctggttaactcctatagccgcgatatcgacgttattgagaagaactacggcccggatgcggccaaaatgctcggcagcatgatgttcgaaggcggcgatattattcgcgagcgcattcagcgctaccagatccagtgcgattaccgcccaggcggcctgtttgtggccatgaaccataagcaaatggaaacgctggaagagcaaaaagccaactgggagcgctacggcaatacccaactggagctgctcgacagccatgccattcgtcgcgaagtagacagcgaccgctacgtcggcgccctgctcgaccacagcggcggccatattcacccgctgaacctcgccatcggcgaagcggacgccattcgtcttaacggcggccgggtgtatgagcagtcgccggtgacccgaattcagcacaccagcccggcggtagtcagtaccgctcgcggccaggtaaccgcgcgctacgtgatcgtcgccggtaacgcctatctcggcgacaagcttgaaccggagctggcaaaacgcagcatgccgtgcggcactcaggtcgtgacgaccgctccgctgtcggaggacttagcccgctcgctgatcccgaaaaactactgcgtggaagattgtaactacctgctggactactaccgtcttaccggcgacaaccgcctgctgtatggcggcggcgtggtctacggcgcccgtgacccggacgacgtagagcggctgattatgccgaagctgctgaaaaccttcccgcagctgcagggggtgaaaattgactaccgctggaccggcaacttcctgctgaccctgtcgcgtatgccgcagttcggccgtctggataacaatatttactacatgcagggctacagcggccacggcgtgacctgtacccatctggccggacgcttgatttcagaactgctgcgcggcgatgccgagcgcttcgatgccttcgccaaactgccgcactacccgttcccgggcgggcgcagcctgcgaattccttttaccgccatgggcgccgcctactacagcctgcgcgatcgccttggggtctga

SEQ ID NO: 88214 - DNA, 1488 bp, Enterobacter aerogenes
atgaattttcagcacctggcttactggcaggaaaaagcgaaaaacctggccattgaaacgcgcttatttattaacggcgaatattgcgccgcggccgataataccaccttcgagactatcgaccctgccgcacagcagacattagcgcaggtcgcccgcggtaaaaaagccgatgtcgaacgggcggtgaaagccgcgcgtcaggtttttgataacggcgattggtcgcaggcctctccggcccggcgtaaagcggttctcacgaaatttgctgacctgatggaaacccattgtgaagagctggcgctgctggaaacgctcgataccggcaaaccgattcgccacagcctgcgcgacgatattcccggcgccgcccgcgccattcgctggtacgccgaagcgctggataaagtttatggcgaagtcgcgcccaccggcggcaacgagctggcaatgatcgttcgtgaaccgattggcgtgattgccgcggtggtgccgtggaacttcccgctgctgctggcctgctggaaactcggcccggcgctggcggctggtaatagcgtaatcctcaaaccctcggaaaaatcgccgctcaccgccctgcgtctggcagggcttgcgaaagaagccggacttccggacggggtgttaaacgtgatcagcggctttggccacgaggccgggcaggcgctggcgctgcatcctgacgttgaagtcatcaccttcaccggatccacccgtaccggcaaacagctgctgaaagatgccggcgacagcaatatgaagcgcgtgtggctggaagcgggcggtaagagcgccaatatcgtcttcgccgactgtccggatctgcaaaaagcggtcaacaccaccgccggcggtatcttctataaccaggggcaggtctgcatcgccggcacccgcctgctgctggaagagagcatcgccgacgagttcctggcattactgaaagcacaggcgcaaaactggcagccgggtaatccgctcgatcctgaaaccaccatgggaatgttaattgataacgcccatgccgacagcgtgcacagctttatccgcggcggtgaaaccaaaagcacgctattcctcgacgggcgaaaaaatccgtggcctgccgccgtcggcccgaccattttcgtcgatgtcgacccggcctcaaccctcagccgcgaagagatcttcggcccggtgctggtcgtcacgcgcttcaaaagcgaagaacaggcgctgcagctggccaacgacagcgactacggtcttggcgccgcggtgtggacccgcgatctgtcgcgcgcccaccgcatgagtcgccgcctgaaggccggctcggtcttcgtcaacaactacaacgatggtgatatgaccgtcccgttcggcggctataagcagagcggcaacgggcgcgataaatcgctgcacgcgctggaaaaattcaccgaactgaaaaccatctggattgctttggagtcttga

SEQ ID NO: 88215 - DNA, 558 bp, Enterobacter aerogenes
atgagcgatgacggactggcgccagggaaacgtctgtcagagatccgccaacagctgggtctttcacagcgtcgtgccgccgaactgtctgggttaacacatagtgccatcagcaccatagagcaggacaaagtcagtcctgccatcagtacgctgcaaaagctgctgaaagtatatgggctgtcgctctcggaattcttttctgaacccgaaaagccggatgaaccgcaggtcgtcattaatcaggacgatcttatcgaaatggggagtcagggcgtttcaatgaaactggttcataacggaaatccgaaccgtacgctggcgatgatttttgaaacttaccagcctgggaccacaaccggggagagaattaagcatcagggtgaggagataggcaccatactggaaggtgagatcgtgctgacgattaacggtcagtcgtaccacctggtggctggacagagctatgccattaataccggcatccctcatagcttcagcaacacctcggcaggtatctgccgcattatcagtgcccacacccccaccacattctga

SEQ ID NO: 88216 - DNA, 765 bp, Enterobacter aerogenes
atggaaaatataatgtacaagccagttattggcgtcgtgatgtgtagaaacaggcttaagggtcaccagacccagactctgcaagaaaagtacctgaatgccattgttaacgctggcggactgccgattgccctgccgcacgcgctggccgagccggaactgctggatgcgttagtcgataaactggacgggatctacctgccaggcagccccagcaacgtgcagccgcacctttatggtgaaaacggcgatgagcctgacgccgaccccgggcgtgatcttctgagcatggcgctaattaacgccgcgctcgaaaggcgcatccccattttcgccatctgccgagggctgcaggaactggttgtcgccaccggcgggactctgtatcgtcgtctgtttgaacagccggaactgctggagcatcgcgaagatcctgaactaccggtggagcagcagtatgcgccgtcccaccaggtggaggtgcaggaaggaggtttactttctcagttaataccgggctgcaacacgttttgggtaaactcgctacacggccagggcgcaaaaacgctgggttcgcgtctgcgcgtggaggcccgttcaccggatgggctggttgaggcggtcagcgtcaacgaccaccctttcgcgctgggcgtgcaatggcatcctgaatggaacagtagcgaatacgccctgtcgcgtatgttgtttgatggttttatcaccgcctgtcagagccatgtcgccgaaaagcggcggctctga

SEQ ID NO: 88217 - DNA, 1419 bp, Enterobacter aerogenes
atggataccaatatcgtagaagttgagaattttgttcagcagacggaagagagacgggtaagcgcgttcgctaaagaagtgaagcgctacctcgaaacctaccccaacactcagtatgtcgatgtactcctcacagacctgaacggctgcttccgcggcaaacgcattccggtcgccagcctcagcaagctggagaagggctgctacttcccggcgtccgttttcgcgatggatattctcggcaacgtggtggaagaggccgggcttggccaggatatgggcgaaccggaccgcagctgtgtcccggtattgggcacgttgaccccttcggcagccgatccggaatacatcggccaggtcctgttgaccatggttgatgaagatggcgctccctttgacgttgagccgcggaacgtactcaaccgcctctggcagcagctccgccagcgcggattgttccccgtggtagcggtagagctggagttctatttactcgatcgcaaacgcgatgccgaaggctacctgcagccgccgtgcgcgcctggcaccgacgaccgtaatacccaaagccaggtctattccgttgataacctcaaccattttgccgatgtactgaatgatattgacgaactggcccagttacagctgatcccggcggatggcgcggtggccgaagcctctccggggcagttcgaaatcaacctccaccacaccgataacgtgctggatgcgtgcgatgatgcgctggcattaaaacgtctcgtgcgtttaatggcggagaagcataagatgcacgccacttttatggcgaaaccttatgaagaacatgcgggcagcgggatgcatatccatatcagcatgcaaaacaataagggcgaaaacgtgctggcggatgcggacggcgaggattcagccctgctgaaacgcgtgctggccgggatgattgacctgatgccggcgtcgatggcgctgctggcgccgaacgtgaactcgtatcgtcgcttccaggcgggcatgtatgtgccgacgcaggcgtcatgggggcataacaaccgtacggtagcgctgcgcattccgtgtggcgatcggcataaccaccgcgttgaatatcgcgtggccggggcggacgccaacccgtatctggtgatggcggcgattttcgccggtatcctgcacgggctggataatccgctgccgctgcaggacgaggtggaaggtaacggtctggaacaagaaggcttgccgttcccgatccgccagagcgatgcgctgtgggagtttatgcaaaacgatcatctgcgggagcgtcttggcgagcgtttctgccacgtttaccacgcctgtaagaatgatgagttactgcagttcgagcgtcttatcacagaaacggaaattgagtggatgttgaaaaacgcctga

SEQ ID NO: 88218 - DNA, 192 bp, Enterobacter aerogenes
atgatgcagatgttcaaatatccgcagggagaagggggcctctttggccgcattggatgccaacttaccgccgttcatcggtccgtcttacccttttatttacgccttacccccttgctaagcaggtttgttacccggtctttgtgcccgcaaactgtcgtcggcatggggggaatgcgtcatggctgctaa

SEQ ID NO: 88219 - DNA, 1392 bp, Enterobacter aerogenes
atggctgctaatcttcctgcagaaaacgccgctcaggcgggaaaaccgcgtctgcgtaaatcgctcaaactgtggcaagtggtaatgatggggctggcttatctaacccccatgacggtgtttgataccttcggcatcgtttccggcatcagcaatggccacgttccggcctcgtatttgctggcgctggctggagtgctgttcaccgccatcagctacggcaagctggtgcgccagttcccggaggcgggttcggcctacacctatgcgcaaaaatcgattaacccgcatatcggttttatggtcggctggtcctcgctgctcgactatctgttcctgccgatgattaacgtcctgctggcgaagatctacctctccgcgctgtttccggaagtgccgccgtgggtgtgggtggtgacctttgtcgccattctgaccgcggcgaatctgaaaagcgtcaatctggtggccaacttcaataccctgttcgtgctggtgcagatctccatcatggtggtgtttgtgattctggtggtacaagggctgcataaaggcgagggcgttggcaccgtctggtcgctgcagccgtttatcagcgagaatgcgcatctgatcccgattattaccggcgcgacgattgtctgcttctcgttcctcggctttgacgccgttaccacgctttctgaagaaaccccgaatgccgcgcgggtgatcccgaaggccatcttccttaccgcgatgtacggcggcattatttttatcgtcgcctcgttctttatgcagttgttcttcccggatattcatcgctttaaagatccggacgccgcgctgccggaaattgcgctgtatgtcggcggcaagctgttccagtcgattttcctgtgcaccacttttgttaataccctggcatcgggcctggcgtcacacgccagcgtgtcgcgcttgctgtacgtgatgggccgggataacgtcttcccggaacgcattttcggctatgtgcatccgaaatggcgtaccccggcgctgaacgtgattatggtgggcatcgtcgcgctgtcggcgctgttcttcgacctggtgaccgcgacggcgcttatcaacttcggcgcgctggtggcctttaccttcgttaatctctcggtatacaaccacttctggcggcgcaaggggtataacaaaacctggaaagatcgcttccactatctgctgttgccaatggtcggcgccctgaccgtgggggtgctgtggttgaacctcgaggcgacctcgctgacgctggggctggtgtgggccgcgctgggattgctttatctgacctacctgacccgccgtttccgtaaaccgccgccgcagtttgacgcgacgaaagcggagcaggcctgggagtcgtaa

SEQ ID NO: 88220 - DNA, 2511 bp, Enterobacter aerogenes
atgacagaacaaactaaaataattcaattacaggatacattaaaccgttatttgctttactttccgcgaagcaaaagtacggctgtcgatgtgcattcttttataggcgaagagacgctcagcaaaccgtatcggtataccatccgtttttccagtgccgatgacaatatccccgccggagctgttctcaatcagatcgcgcagttttatcttcgggcgcctaatccgaacgcgcgttggcagaacgaggctgcctggttaccggtacgtcagattaacggcgttataacacaatttacccgcctgaagtcgtcctcagatgaggcgctatatgagtgcgtgctggagcatgagcttgcgctgctggataaaaattatcgctcagcggtgtatacggatgtcaccgtgccggaagttgttacgcaactcatgaaaaatagcggctacttcaaagggtataatatcgatttcgacaggctgagttacacctatcctcgaagggaaatgattattcagtggaaagaaacggatctgcagtttattcgtcggctgttggctgaaattggcatctggtttcgttttgagaatcaccataaggttcagacggaaaccgtggtgatttttgctgactctgacagtcgatacatttaccgcgataaaaaactcccctacgtccgctattccgggatgaccagctatgacgagtacgtgaccgatctggaagagcagcactcgctggttcctgaacaggtattagtacgcacctacaactatcgcgatccgtattctccacaagctgttaaaaccattatcaataatgatatcccggaggggattacgtccgggggagagtatcactacgccgatcattacctcgcagacggcgattttcacgcaacagaagctgagacagccacgttttacgcccgcctgcgctatgaacgtctactgaatgagcagagccggctcagtgcaacaaccagcgatccggcgctgcggcctggcgttatgtttcatcttactgggccggtaccagacggcttcaaaccgggttttttgattaccaccatgacgattacgggcagtcgagcccggcattatcacgcgcagctcgccggcattccgtatctgtcaggatacaactttcgaccagagtatctgtcgcgacctgtcattgccggtacggtgcccgcgcgggtggcctctatcggaagggataaaacgtatgccggggtggatgccagggggcgttactgcgtgaagtttgattttgatctcaatgaaaaacgcagcggctttgaaagcgcactcgtccggctgggcaggccttacgccggcgacacttacggttttcattttccgttgctggatgggacggaagttgccattgcctttgaaggtggcgacccggacaggcctttcattgcgcatgtgatgcatgacggcgctcgccccgatctggtcacaaaccgtaatgatacccgcaatattatccgcacggcagcgctgaacaaaatccgtctggaggaccgccggggtaaggagcatatcaagatttcgacggagcacggcaaggggcaactcaatctgggccaccttgtcgatgcggaaggaaaaaaacgcggggaagggctggaggcccgtaccgatgactggatggctttgcgtgcggcaaagggggtgatgatcaccacgcaagcgcagccgcgggcccaggggcagcagttggatatgaccgccgcgattacgcaactggaaaaagcgctctcgctggcaatgacattgcaacaaagcgcactgacggccggcgccagtaatgtggataccgatcggcaaaatacgctcggccagacgctgaatagactcagcggtgcagctctgctgacctatggcgggcaaggacaggcgcatgtgaccccggaaagtctgcaactgtccgccggacaggatgtgattacgacggcaggtcgtcacgccagtatgaacgtgatgaagaaattctcgctggccgttggcgaaaaactctcattgtttgcccgcaagctaggtattcagatggttgccggcgccggggatatcaccacgcaggcgcagcgcggcgccatacatatgctctctcagcaggattttacgctaaccagttcggacgggagactgcatggcagcgccaaacagggcatacaactggtgtgcggaggcggcgggatccgtatcagccctgatggccaggttgagattttctctcctgtcggggtcgatattaaagggccgaatctcaggtatctggggccagaaagcgcgcaggtgcaagcacctgcctttgataaaggaacctttacgcgtcgctatcaactgcatgcttctgacgatccggaacaggttctggcgaatcgtcctttcaggctcaagagctcaaccggcgaagtgctcgagggcgagacggacagcaatggttgctctccattgctcgattcggccgatcttgattcgtacaaactggaggtactgtaa

SEQ ID NO: 88221 - DNA, 2142 bp, Enterobacter aerogenes
atggctggcgagaaaaagaggccgtattgcccgcgtattgtgtccgagaacgatgtgggagtgcataaatcactggggctggaggcgaagacctgcagggttggcattccccgaccgatgccggggatagtgattttggtccatggcgtgaacgacgtcggcgaggcgtaccagaatcaggagaaggggattattgccggactgaagaaacggcttaatcggccggatttttacgcccacgaatggaaagactaccgaatcaccgttcccggccgttcccccatcatcccgttctattgggggtataagcctgtcacgcgtgaagagtacatgggcgatcaacagcgttaccggaatgaggtcagcaagctacaagacagcgcgcacctgccgtttgacgcttaccaggaagataacgccgataagaaagctgaactgggtaacgatggcaaaggtaggtttaagtaccagaacgacaactttaaaaatgcccttgatgttaactttgccaaagggggcgggacgttcgcgaacgccacaacgaacatcccggatatgctcggaccgggtgcgggaggggtagcgttagccgcagctggatttagcacgctgtacatgaacggcggtgattttacgcaccctattttccctaatccacatcgtatttatcagttttttgccgcgcaacgtctggccgatttgatcctgacaatccgaagtgagccagtgacggaaaatgatgtgattaatatcgttgcgcatagccagggcacaatcattaccatgctggcgaatatgctggtaaaacaggccggaagccagccagttaactgtgtcattttgaatcactcgccgtattcgctggaagggcgtctgagtgaagatattcagcccgggcatcaccagacggataacgcccggcaaacgacctttaaaaatttttgtgcgttgatggcaactcagtacaaaggcggtgaaatatcagaagctaacttgctggcaatggaaggggcctgtacgttacgaaaagcgtcagatagcccactgcggcaggatgaaaagtaccgtcgggacaataatggcaaggtctataactatttctgtccaaacgatggcacggtatcgctgaagaatattcagggaattggctggcgggggatccccaggaacatagccagtgctattcccaatctgtatcaacgggtgttctatcagcatgggcagaccggaatcgccccgaccgggaagccttttgagttaccgccatcacataaaggggatgcggaatatagctctctcaccaacacggcttataccgcgcatgatgttgtcgttaatggagaagaactgccgcagccgttcgtctttaaactgcaggggcaggataaccatccggacaatgatccgaaaacgagcgataaaccgtataccgcgtatatcgatccggacagtccggatgcctatatctcctattcagcaaaagcctacgctatcaaacgaactcgcagcgccacctattcgcttagccgttacgcaagcctgagttggcgccctggccatattctgacggcggatgagctgaaaatggaaagctatgagcgaaaggtagaagttattcatggtgaggtcattggaacgaaagacttttctcaacttacgctgacatggcttaaacctcgcgaagagcttgaaaacgaatggcagaaagccgacccggtgggttacagccagcactcatcgatcgttatgagcgaatttgccccatcccatgctatggcgtttgacctggcaattggtccatgtcgttcatttgactataaagcgggtaagttctgggaagatctactgcatcgtgcagactggcgcgatcctttgaatggaaatatcgcggctaaagaatattaccgtacagggaggcttccgggggctcagacaaagaatcatatgaataagccggatgaggtgcttccacatggcaattatggggtgttaaacgaatttaacaatgcgaccagggtgaggccatcccgcgacctggctgccggtaatcaggaagtggcaaacctgcagtgggagatgccgaaacccaaaagtgacagggaactgggtataggaaaccaacggtcagcgctcgatatctag

SEQ ID NO: 88222 - DNA, 696 bp, Enterobacter aerogenes
atgaagcagagatacacatcagggactgttctggcggccatgcttatggtcgttggatgtcaggcgcaacagccgccgacgcaggtcatttatcgtttcgatgaccaccgttatctggagctgaaggggtgggactgtgaaggtgagctttggtatacggatagccaaaggaaaattcactcgcaaatatactcgcagttttatcgcgttttcaccaggaagttagtccatccatcagagcgatacatcgccattattggttggggggcagatggttttcgaatatcaaaggattatggtcaaacatggtccgatgctcatttttctccggggcataatgagccaaatggcgataattacgcgccttatgatgaccttatctctttcaccgtcgtcaacgatcagggttttttgcagaccaggcaccgactgtatatgtcgtccaaaccgttcgacgatccacgtctggcggctggtggcccgggtatccaatatgtcattgaaggggaaactcacactattactccgcaatccccggggccttcgtggggtatggattacataacgaagcaaggacttgagaacgatacggcaaaataccacaccaactaccaggggctccccgacagagtacccgaagtgaaaggctacaccggctgggatcatatgcgttgtgatatggatgcagggagatag

SEQ ID NO: 88223 - DNA, 687 bp, Enterobacter aerogenes
atgaaaggattattcaccgctctggcggccatgtttatggtcgttggatgtcaggcgcaacagccgccgacgcaggtcatttatcgtttcgatgaccaccgttatctggagctgaaggggtgggactgtgaaggtgagctttggtatacggatagccaaaggaaaattcactcgcaaatatactcgcagttttatcgcgttttcaccaggaagttagtccatccatcagagcgatacatcgccattattggttggggggcagatggttttagaatatcaaaggattatggtcaaacatggtccgatgctcatttttctccggggcataatgagccaaatggcgataattacgcgccttatgatgaagttctctctttcaccgtcgtcaacgaccagggttttttgcagaccaggcatcgcctgtatatgtcgtccaaaccgttcgacgatccacgtctggccgcaggtggcccgggtatccaatatgtcattgaaggggaaactcacactataaccccccagtttccaggttggtcatgggggatggtttatatgaccaaacaaggacttgagaacgatacggcaaaataccacaccaattaccagggactccccgacaacgtgcccgaagtaaaaggctacaccggctgggatcgtatgcgttgtgatatggatgcaggacgttaa

SEQ ID NO: 88224 - DNA, 258 bp, Enterobacter aerogenes
atgaaaggtgtcattaggttaaatgatctgctggtgggcggaggaaaagtgatcacatcatccggtgctgaatttatgggagcccctgtcaccctaaaaggtgacaaagttcagtgtgctacgcacaaagggactttcggtattactgagtgccaccccttttggacgatgaacggtcgcggtgtggtggtggatggctgtaaagctgaatgtggatgcgcgatacgaacgacgctacaaactgcgggagcggtgtaa

SEQ ID NO: 88225 - DNA, 1380 bp, Enterobacter aerogenes
atggaatggtggctatattctgagcaggaagatattcaggatgggatgcctgtattggctgtcgtgatgatttatatagcgcttatcgcggtatgcctgtttatacaggcgctagtctggcctgaaaataaacctgtcacgtttgagttcttcattccttccgtattacttcctacctgtgttttgaccacgatattgttcttcgtgaagatggtattgagtgcgacagtgtgttacgcagaaatacgcaaatatattgccaaatcctgggaggtggagcttaaaacctatgcccgaaaaaatatcgcgctagccgcctggactgctttaacccctttagaacagcctgcgctcaatatgctgaaactggaaggggagtttccgttagctccgaaaaccccactcaggatagaaattgaagatcttttcgagcagacccgtaatgagcaaattttcacgaaattgcttaccccaatggctatgatgttgaacggtaataattaccgcggaattgaaattatcgtctgggtacgtgggggagataacttctgtgtagatgcattgaggagggggctggagcatctgaatatccctaacgccaacgcctgtgaaatcgaataccttaccgagtgtccggagtacggcatggtggataaatggatcgctgcgcccgatgacaacgtcattaaccgaatcgtcattactgtcgatatgcatgaagaagatagcgattctaaaagcatggaaagcgcctgtgcgtttttgttcactaatcactatgtcagaggagcaggcgaaaagccggtatatctttatcagccgatgtccggcgttactgatgtagaagaaaagatgccggtctatctggaggttgagtccgttattgcacctaaaacactgtggtatacaggattgtccagagtggataaatacccattattgcaggcgttagatgcaaaaaatctggcgtcagaacgcctggatatggaggcctcactaggggaaaagagtgccggttatcgatggctggctttggcgctggctgccgatgccgttagatatgcgcaaggcgagcagctggtggcgacatctgaaaataacaagtttgctattacttccttgtcttcaaagaagacgaatttacccgacaaagctaagtggggccatacgataccacctgttgtgcacagcgttatagtatcgggaggcctgatgatttcgtggctgttttataatgtgagttttacgcctaaacctgaacatatctctacgctgtggatcgtggcgagtatagccattcctgcaattatcgcttttggcgctggtttgtcattgactgttttagccgtcaataaggcatatcaacatatggggtattga

SEQ ID NO: 88226 - DNA, 123 bp, Enterobacter aerogenes
atgtcgggtttcttgctctttatcgtggcgatcgctctactgggtgtcgccgtttacagcctggtgtcttacatcaaagaacgtcgcgccggtcagttgccaaccgataaaaaaaagaaataa

SEQ ID NO: 88227 - DNA, 225 bp, Enterobacter aerogenes
atgtttaaaacaagtctcgccggcctgcttgcttcggcgcttatgctgacggcttttgccagttgggcgcagtcggaaagccaacaggttcgcgaacgaattgtcgagcaggtgttaaaaccctgcgaaggtaaaaaggccggggataaagtggtgatggtcgaccgccggggcggcgaacatgaagcgatttgtacgctggcggcggtgccattaccggaatag

SEQ ID NO: 88228 - DNA, 1248 bp, Enterobacter aerogenes
atgaaaaaaagtctactcgccgccgcggtggccggggccgtattgttatccgccggcgcccaggcgcaggacgccgttgcgccggaagggtatcaactgcaacaggtgctgatcatgagccgccacaacctgcgcgcgccgctggccaataacggcagcgtacttgagcagtcgacgccgaaatcctggccgcagtgggatgtgccaggcggccagttaaccaccaaaggcggcgtgctggaggtctatatgggccactatatgcgtgagtggctggcgcagcagaagctggtgaccagcggcgaatgcccgccggaaaatgccgtctacgcctacgctaatagcctgcagcgcaccgtcgccaccgcgcagttctttattaccggcgctttccctggctgcggggtgcctgtgcatcatcagccgcagatgggaacgatggatcccacgttcaacccggtcattactgacgattcagccgaattcgcgcaaaaagcggtgcaggcaatggaaaaagagcgtcaggggatgcagctcgctgagagctacaagctgctggaagagatgaccgactatcgtaattcgccatcctgtaaagaaaagcatgtctgctcgcttagcgacggtgaagatacctttagcgccaaatatcagcaggagccaggtgtttccgggccgctgaaggtcggtaactcgctggtggatgccttcaccctgcagtactacgaaggttttccgaaggatcaggtggcgtggggcgaaattgccagcgataagcagtggcaggtgctgtcaaaactgaaaaacggctatcaggacagcctgtttacttccgcggaagtggcgcgcaacgtcgctaagccgctggtcaaatatatcgataatgcgctggtgggcgatggcgccgctaaggcgaaagtgacgctgctggtcgggcatgattccaacatcgcttcgctgctgacggcgctggactttaaaccctaccagttacccggccagtatgagcgcacccccatcggcggcaagctgctgttccagcgctggcacgatagcggcagcaatcgcgatttaatgaagattgagtatgtctatcaaagtactgaacagctgcgcaacgcggatgctttgagcctgcaatctccaccgcagcgggtcacgctggcgcttaacggttgtccggttgatgaccagggattctgcccgttggagacgttcaaaaaggtcatgaacgaggcggcaaaataa

SEQ ID NO: 88229 - DNA, 228 bp, Enterobacter aerogenes
atgccgaatcaagaagcgaaggcccaccacgtgggcgaatgggcaagcttacgtaatacctctttggaaatcgccgaagccattttcgaactcgcgaattacgatgaaaagttggcggagaaaatttgggaagaaggcagcgatgaggtgttgtcgcgagctttcgccaaaaccgataaagacagcctcttctggggcgaacagaccatcgaacgtaaaaacgtctga

SEQ ID NO: 88230 - DNA, 597 bp, Enterobacter aerogenes
atggctaaaattctggtgctttattattccatgtatggacacatcgaaaccatggctcatgccgttgccgaaggggcaaataaagttgacggcgttgaggtggttgtgaagcgcgtgccggaaactatgcaggctgaagcgtttgccaaagcaggcgggaaaacacaaaatgcgcccgtcgccacaccgcaggaactggcggagtatgatgccatcatctttggtacccctacccgtttcggcaatatgtcgggacagatgcgcaccttcctggatcagaccggcggcctgtgggcttccggcgcgctgtatggcaaagtcgccagcgtctttagttcaaccggtaccggcggcggccaggagcagacaattacctcaacctggactacccttgcccatcatgggatgatcattgtgccgattggctacggcgcgcaggagctgtttgatgtctcccaggtgcgcggcggcacgccatatggcgcaaccaccatcgcaggcggcgacggctcccgtcagccaagccaggaagagctggctatcgctcgctaccaaggtgagcacgtcgccaatgtagctgtgaaattacacggctaa

SEQ ID NO: 88231 - DNA, 174 bp, Enterobacter aerogenes
atggcaaaccatcgtggcggttccggcaattttgccgaagatcgtgccagagcatcagaagcaggtcgtaaaggtggccagcacagcggggggaactttaaaaacgatcctcaacgcgcctcggaagctggcaaaaaagggggtaaaaatagtcacggcaatcgcaatagctag

SEQ ID NO: 88232 - DNA, 927 bp, Enterobacter aerogenes
atgtcttcgctcaaactctcgataacgccgcaggaactgatcctgattgtgatcaccatgttctggggcggtacctttcttgccgtacagtacgccgtgaactttagcgggccgtttttcttcgtcggcctgcgctttgccaccgccgcgctggcggtggcgctactgtcgctgcgtacgttacgcggcctgacctggcttgaggttaaggccggtgtggcaatcggcgtagcgattgcgctcggatacagcctgcaaacctggggcttacagtccatctccagcagtaaatcggcgtttattaccgccatgtatgtgccgctggtaccgctgttgcagtggctgtgtcttgggcgcatgcctggcgtcatgtcctgcgtgggcatcgtgttggcgtttatcgggctgatcctgctggcggggccggaaaacaatctgctggctttggggattggcgaaatgattaccctggcaagcgcggtggctatcgctgccgaaatcattttaatcagcgcgtgggcgcgtcaggtcgatgtgcgccgggtgacggtggtacagctggcgactgcctcgctggtggcttttgccgcgatggggccggctggggagtctatcccgccgatgcgcccggaactgctggccgtcgcgctgggactggggattttcagcgccattattcaggtcaccatgaactgggcgcagcgtagcgtatcgccgacgcgggcgacgctgatttacaccggcgagccggtttgggctggcgtgtttggtcgtatcgccggcgagcgtctgccgctgctggcgctggtgggctgtctgtttattctcgccggagtgctggtcagcgagctgaagtggaagaaaaaatcgcggccgcagattgcagcagaggaagcgccagagcttgccgagcggcgcgagccctaa

SEQ ID NO: 88233 - DNA, 1323 bp, Enterobacter aerogenes
atggcactcttcgattttcctcgctggcagttaaccacccccgccgcagatgccggcgttgtcgccccggatgaacgtttatccgccgggcaaacgctgatcatgggcgtgcagcacgccgtggcgatgtttggcgcgaccgtattgatgcctttattgatggggattgaccccaacctggctatcctgctgtcgggggtgggcactctgctgttctttgtcgtcaccggcggccgggtaccgagctatcttggctccagcgccgccttcgtcggcgtggtcatcaccgtgaccggctttaccggtcaggggttgaatcctcatctcagcgtcgccctcggcggcattatcgcctgcgggctgctctataccctgatcggtctggtggtgatgaaaatcggtaccggctggatagagcgactgatgccgcccgcggtaaccggcgcggtggtgatggcgatcggtctaaacctggcgccaattgccgtgcacagcgtttccgccaacgccttcgacagctggatggcgatgctgacggtgctttgtatcggcgccgtcgcggtctttacccgaggactgctgcagcgtctactgatcctgatggggcttattatcgcctgtgcgctctatgcgctgctggccaacggattcgctcttggtaaaccgctggattttgctcctgtcgcccaggcggcgtggtttggcgtcccgcactttacttcccccacctttgacagccaggcgatgctgctgattgcgccggtggccatcattctggtggcggaaaacctggggcatttaaaggccgtatcaggaatgaccgggcgcaatctggatccctggatggggcgcgcgtttgtcggcgacgggctggcgaccctgctttccggcgcctgcggcggtagcggcgtcaccacctatgcggagaacatcggcgttatggcggtgaccaaagtctattcaacgctggtgtttgtcgccgcggcgctgatcgccatcctgctcggcttttcgcccaagttcggcgccctgattcatacgatcccaggcccggtcattggcggcgcgtcaatcgtggtctttggtttgattgcggtcaccggggcgcggatatgggtgcagaatcgggtcgatctcagcctgaatgcgaatttaatcatggtagcggtgacgctggttctgggcgcaggcgattttactttatcgctggggggctttcgccttggagggattgggacggcgactttcggcgctattttactgcatgcgttgcttaaccgccgtcagcatcaggaaaaggtggcaaaagccaccacgatataa

SEQ ID NO: 88234 - DNA, 495 bp, Enterobacter aerogenes
atgaacgtagcggatcaacacagttttcgtgacgccatggcccatgtcggcgcggcggtcaacattatcaccaccgaagggcctgccgggcgcgccggttttaccgccagcgcggtatgcagcgtaaccgataccccgccgacgctgctggtgtgcctcaaccgttcggcttcggtctggccggtattcagcgaacatcaggccctttgcgtcaataccctcgcggccggacaggaggccctgtcgacgctctttggcggtaaaacggcaatggatgagcgctttgccgccgccgactggcaaaccggcgcgaccggctgcccgcggctgaaagaggcgctggtcagtttcgactgccgcatcgaccagcggctacaggtcggcacccatgacattctgttttgccaggtcgtggctatcgcccgccagccggaaccgcgcggcctgatgtggtttgaccgcggctatcacacgcttatgcggcccgtttgttaa

SEQ ID NO: 88235 - DNA, 591 bp, Enterobacter aerogenes
atgagcgaagcaatcaaccaaaaggcttgcgagaccctattcacccatgcccggacctacaatggctggcgggagcaggcggttaacgatcggcagctgcaggagatttacgacttgatgaaaatggggccgacctcggccaactgttcaccggcgcgaatcgtttttgtgcgcagcgccgagggcaaagcgaaactccgcccaacgctctccagcggcaatgtggaaaaaaccatgcaggcgccggtcaccgccatcgtggcctgggataacgcgttttacgagcgcctgccggcgctgtttccgcacggcgacgcccggagctggtttacttccagtccgcagttggccgaggaaaccgcctttcgcaacagctcgctgcaggcggcgtatctgattttcgcctgccgctcgctgggcctcgacaccggcccgatgtcggggttcgaccgcgagaaagtcgatgcggcgtttttcgccaacagcggctggaaaagcaatctactggtgaatatcggctatggcgaccccggcaaattgtacgaccggctgccgcgcctgagttttgatgaagcctgcctgctggcataa

SEQ ID NO: 88236 - DNA, 804 bp, Enterobacter aerogenes
atgatgaggctcaatattgccccgccgccgtggcccggctccccggtggtggtgctgagcgccggactcggcggcgctggtgcgtactggctggcgcagcgggcggcgctggaacagcattatcaactggtgtgctatgaccataacggtaccggggagaaccgcggcccgttgccggaaaattacagcatggcgacgatggcgcaggagctgttcagcgccctgcaggcggcgggcatcatgcgcttcgcgctggttggccacgccctgggagcgctgattgggatgcaattggcgctcgactatccgcgcgcggtcagcgcgctggtgctggtaaacggttggctaacgctttccccgcatacccgccgctgctttcaggtccgcgaacgcctgttgcatgccggcggcgcccaggcgtgggtcgaggctcagccgctgtttctctatccggcggagtggatggcggcccgcctgccgcgtctcgaagcggaagacgcgttggctattagccatttccagggcaaggagaatctactgaaaaggctgcaggccctgaaacaggcggatttttcgcgccgcgcggcggctatcgcctgcccgacactgatcatcagcgccaccgacgacctgctggtccccgcctcctgctcgcgaatgctgcaggcggggattccaggtagccgactcgtggaaatggcctggggcggccatgcctgtaacgttaccgacagcgacacttttaaccctattttacgcgacggcctgacgaccctgctgccggtcgccgaggagaatatatga

SEQ ID NO: 88237 - DNA, 393 bp, Enterobacter aerogenes
atgcctaaacaggtgattattccccccggcaccgctacgccgattgccccctttgttccagggacgctcgccgacggagtggtatatgtctccggcactctgccgttcgataagcaaaacaatgtgctctaccccggcgacccaaaggcgcaaacccgtcacgtgctggagattatcaaaagcgttatcgaaacggcggggggcagtatggcggatgtgaccttcaacagtatctttatcaccgactggcaaaattacgccgcgattaacgaggtttacgccgagtttttccccggtgataaaccggcgcgtttctgtattcagtgcgggctggtgaaacccgatgcgctggtggaaattgccagcgtcgcccatatcggtactccaacatga

SEQ ID NO: 88238 - DNA, 711 bp, Enterobacter aerogenes
atgattacccttcccgctcgcccggaatcgctgaccttgtcgccgcagcacagcgcgctaatcgtagtcgatatgcaaaacgcctatgcaagccagggcggatacctggatctcgccggttttgacgtctccgccacccggccggttatcgataatattaatctcgcggtggccgccgcccgcgccgccggcatgttaattatctggttccagaatggctgggacgaacagtatgtggaagccggcggccccggctcgccgaattaccataaatcaaacgcgctgaagaccatgcgccaacgcccggaactacagggcaagctgctggcaaaaggcggttgggattatcaactggttgacgaattacggccctgggagggcgatatcgtcctgccgaaaccccgctacagcggctttttcaataccccgctcgacagcattctacgcagccgcggtattcgccacctggtattcaccggcatcgccaccaacgtctgcgtcgaatcgacgctgcgcgatggtttcttcctcgaatacttcggcgtggtactggaggatgccacccatcaggcaggtcccgccttcgcgcaacaggcggcgttattcaacattgaaacctttttcggctgggtcagcgacgtcggcagcttctgtcgcgccatagaacccgacgccccgctcgcttttaccgaggagaaacgctatgcctaa

SEQ ID NO: 88239 - DNA, 1092 bp, Enterobacter aerogenes
atgaaaatcggtgttttcgttcccattggtaataacggctggttaatttccacccatgcaccgcagtatatgccctccttcgaactgaataaggcgattgttcagaaggccgagcactaccatttcgacttcgcgctctccatgatcaaactacgcggcttcggagggaagaccgagttctgggatcacaacctggaatcgttcaccctgatggccggtctggcggcggtgacttcgaagatcgagatttatgccaccgccgcgacgttgacgctccctccggccatcgtcgcccgcatggcctcgacaatcgactctatctccggcggacgttttggcgtgaatctggtgaccggctggcaaaaaccggaatatgaccagatggggatctggcccggcgatgaatacttcgccagtcgctatgactacctgactgaatacgttacggttctgcgcgatctttggggcaccgggcgcagcgattttaaaggtgattacttcaccatgaacgactgccgggtcagcccacgtccatcgcaaccgatgaaggttatctgcgccgggcaaagcgacgccggcatggcgttctccgcccaacacgccgactacaacttttgctttggcaaaggggttaatacccccgccgccttcgcgcccaccgccgcacggatgatgcaggcggcggaaaaaaccggccgcgaggtcggctcctacgtgctgtttatggtgatcgccgacgaaactgacgaagcggcccgcgctaaatgggaacactacaaagccggcgcggatgaagaggcgctggcatggctgaccgaacagagccagaaagatacccgctccggcagcgataccaacgtccgccagatggccgaccccacctccgcggtcaacatcaatatgggcaccctcgtcggctcctatgccaacgtcgcccgtatgctcgatgaggtggcggcggtccccggtaccgacggcgtactgctgaccttcgatgatttcctgcagggcattgacgccttcggcgaacgtattcagccgctgatgcgctgccgtgaccatattgctcccattacccgcgaggtggcctga

SEQ ID NO: 88240 - DNA, 639 bp, Enterobacter aerogenes
atggcacagggcgccgtgaaaaaaaccggcaagcgttcacaggcggtgagcgccaaaaaagaggccattctggccgctgcgctggagaccttctcgcagttcggcattcacggtacgcggttggagcaggtcgctgaactggccggcgtatcgaaaaccaatttactctattactacccgtcaaaagaggcgctgtacgttgccgtactgcagcggatcctcgccatctggctggcgccgctgcgggcatttcgcgaagatatcagcccgctggtggcgatccgcgaatatattcgcctcaagctggaggtatcgcgcgatcatcctcaggcttccaggctgttctgtctggagatgctgcagggggcgccgctgctgatgggcgaactgaccggcgatctgaaggcgttgatagatgaaaagtcggcgataatctcgtcatggattgatagcggcaagttggcggcggtcgatccccagcaccttatctttatgatctgggcgacaacacagcattacgccgatttcgccactcaggtggaggcggtaaccggcgcaacgctgcaggatgagttgtttttccagcaaaccgtggataacgtgcagcggatgattatcgaagggatccgcgtacgttaa

SEQ ID NO: 88241 - DNA, 396 bp, Enterobacter aerogenes
atgaaacgcactttaattgccgccgctgcccttttggccagcggcgcggcgtgggcggatgactgcagcaacgccaacacgcaaaccgaaatgaatcagtgcgccgccgcgcaatatcaggcggccgataaaaagctgaatgagacctggcaacaggcgctgaaacgcgcctccggccaacagctggaattgctgaaaaaagcccagcaggcgtggatttccctgcgtgacgccgactgcgcgtttctcgcttccggcgcggaaggcggcagtatgcaaccgatgctgataagccagtgcatgaccgataagagcgtcgagcgcgaagccttcctcgcctcgctgcttcagtgcgaagacggcgaccaaaactgcccgctgccgccagctaattaa

SEQ ID NO: 88242 - DNA, 3963 bp, Enterobacter aerogenes
atgggcaccactaccatgggtgtaaaacttgacgacgccacgcgcgaacgcattaagtccgccgcgagccgtattgaccgcacgccgcactggctaattaaacaagccattttcaactatctggaaaagctggaaaacgacgagacgctgccggaactgccggcgctcctctccggcgccgccaatgaaagtgatgaaaccggcgctccggcggatgagccatatcagccgttcctcgaattcgccgaacaaattctgccgcagtcggtcagccgcgcggcgatcaccgcggcctggcgtcgcccggaaaccgatgcggtaccgatgttgctggagcaggcccgtctgccgcagccgttaggcgaacaggcgcacaagctggcctaccagctggcggaaaaactgcgcaaccagaaaaccgccagcggccgcgccggcatggtgcaaagcctgctgcaggagttctcgctttcctcacaggaaggcgtggcgctgatgtgcctggccgaagcgctgctgcgtattccggataaagccacccgcgacgcgctaatccgcgacaaaatcagcaacggcaactggcaatcgcatatcggccgcagcccatcgctgttcgtcaatgccgccacctggggactgttgtttaccgggaaactggtgtcgacgcataacgagaccagcctctcccgctcgctgaaccgcattattggcaagagcggcgaaccgctgatccgcaaaggcgtcgatatggcgatgcgcctgatgggcgagcagttcgtcaccggggaaaccatcgccgaagcgctggctaacgcccgcaagctggaagagaaagggttccgttactcctacgatatgcttggcgaagccgcgctgaccgccgccgatgcgcaggcctatatggtctcttatcagcaggcgatccacgccatcggcaaagcctctaacggccgcggcatttatgaagggccggggatctcgattaaactttccgcgctgcacccgcgctacagccgcgcgcagtatgatcgggtcatggaagagctctatccgcggctgaaatcgctgacgctgctggcgcgccagtacgacatcggtattaacatcgacgccgaagaggccgatcgtctggagatctccctcgatctgctggaaaaactgtgcttcgaaccggagctggccggctggaacggaatcggctttgttatccaggcctaccagaaacgctgcccgtttgtgattgattcgctgatcgacatggcgacccgcagccgtcgtcgcctgatgatccgcctggtgaaaggcgcctattgggatagcgaaatcaaacgcgcgcagatggaaggcctcgaaggctatccggtttatacccgtaaggtctacaccgacgtttcttatctcgcctgcgccaaaaagctgctggcggtaccgaatctgatttatccgcagtttgccacccataacgcccatacgctggcggctatctaccagttggcggggcaaaactactatcctggccagtatgagttccagtgcctgcacggcatgggcgaaccgctgtatgagcaggtcgtgggcaaagtcgccgacggcaaactaaaccgtccgtgccgtatctacgcgccggtcggtactcatgaaacgctgctggcgtatctggtgcgtcgtctgctggaaaacggcgccaatacctccttcgttaaccgtatcgcggataataccctgccgctggacgaactggtggccgatccggtcagtgcggtagaaaaactggcgcagcaggaaggccaggccggcttgccgcatccgaaaattccgctgccgcgcgatctgtacggtcacggccgcagcaactctgcgggactcgatctggctaacgaacatcgtctggcctccctctcctcttcgctgcttaacagcgcgctgcacaagtggcaggcgctaccgatgctggagcagccggtggccgaaggagaaatgcagccggtcatcaacccggcggaaccgaaagatatcgtcggctacgtccgcgaagccagcgatgccgaagtgcagctggcgctgaccagcgctatcaataacgcgccaatttggttcgccaccccgccgcaggaacgcgccgccattcttgagcgcgccgccgtgttaatggaaagccagatgccgaccctgatggggatcctggtgcgcgaagctggcaaaaccttcagcaacgccattgctgaagtgcgcgaagcggtcgacttcctgcactattatgccggtcaggtgcgcgacgatttcgataatgaaacccaccgcccattaggcccggtcgtctgtatcagcccgtggaacttcccgctggcgatcttcaccggccagattgccgcggcgctggcggcaggcaacagcgtgctggccaaaccggccgagcagacgccgcttatcgccgcgcaaggcgtagcgattctgctggaagccggcgtaccgccgggggtgattcaactgctgccgggccgcggggaaaccgtcggcgccgcgctaacctcagatgaacgcgttcgcggcgtaatgtttaccggttcgaccgaagtagcgacgctgctgcagcgcaacatcgctaaccgccttgatgcgcagggccgtccgacgccgcttatcgcggaaaccggcggcatgaacgcgatgatcgtcgactcgtcggcgctcaccgagcaggtggtgatcgacgtactggcctcggctttcgacagcgccggccagcgctgttccgccctgcgcgtgctttgcctgcaggaagaagtcgccgaccatacgttaaccatgctgcgcggcgcgatgagcgaatgccggatggggaacccgggtcgtctgaccaccgatatcggcccggtaatcgacgcggaagccaaagagaatatcgagcgccatattcaggcgctgcgcgcgaaaggccgcaatgtcttccaggcggtacgtgaaaatagcgaagatgcccgcgaatggaatcacggtacgttcgtggcgccaacgcttatcgaactcgagagcttcgacgaactgaaaaaagaggtcttcggcccggttctgcacgtggtgcgctataaccgtaacgaactggataagctggtcgagcagattaacgcctccggctacggtctgaccctcggcgtgcatacccgcatcgacgaaaccatcgctcaggtcaccggcagcgcgaaagtcggcaacctgtacgtcaaccgcaatatggttggcgcggtggtcggcgtacagccgttcggcggcgaagggttatcgggtaccggtccgaaagccggcggcccgctgtacctgtatcgtctgctatccagtcgcccacaggacgcggtcggcgtcactttcgcccgccaggatgcggagcgtccgctggacgcccagttgaaaacgctgctggaaaaaccgctgcaggcactgcagcagtgggcggctggccgtcctgaactgcaggcgctgtgtcagcaatacagcgatctggcgcaaagcggcacccaacgtctgctgccagggccaaccggcgagcgcaataccctgacgctgatgccgcgcgagcgcgtattgtgcgtggcggataacgagcaggacgcgctgattcaactggctgcggcaatggcggttggctgtgaagtgctgtggccggatagcgccctgcagcgcgaactggcgaagaaactgccgcgtgaggtcagcgagcgcattcattttgcgaaagcggatcagttgaccagccaggctttcgacgcggtcatttatcacggtgattccgatcagttgcgcgagctgtgtgagcaggtggcggcgcgcgacggggcgattgtatcggtgcagggctttgcccgcggcgaaaccaatctgctgctggagcgcctgtatatcgagcgttcgctgagcgtcaacaccgccgcggcaggcggtaacgccagcctgatgaccatcggctaa

SEQ ID NO: 88243 - DNA, 1509 bp, Enterobacter aerogenes
atggctattagcacacccatgttggtgacgtttattgtttatatttttggcatggtactgataggttttattgcctggcgctcaaccaagaactttgatgattatattctcggcgggcgtagcctcgggccgtttgttaccgcgctctctgccggtgcatcggatatgagcggctggctgctgatggggcttccgggagcaattttcctctccgggatttccgaaagctggatcgccatcggcctgacgctgggggcgtggattaactggaaactggtggccgggcgtctgcgcgtgcataccgaagtcaacaacaatgccctgacgctgccggactattttaccggtcgtttcgaagataaaagccgcgtgctgcgtattatctccgcgctggttatcctgctgttcttcactatttattgtgcttccgggattgttgccggcgcgcgtctgttcgaaagcactttcggtatgagctatgaaaccgcgctgtgggccggcgctgctgcgacgatcgtttataccttcgtgggcggtttcctggcggtgagctggaccgataccgtgcaggccagcctgatgatcttcgcgctgattttaacgccggtgatggtgattatctcggtcggcggtttcggcgattcgctggaggtgattaagcaaaaaagcatcgaaaatatcgacatgcttaagggactgaacttcgtggcgattatttcgctgatgggttggggtctgggttatttcggtcagccgcatattctggcgcgctttatggcggcggattcgcaccacagtatcgttcatgcccgtcgtattagtatgacctggatgatcctctgtctggcgggcgcggtatcggtcggtttcttcggtatcgcctactttaataacaacccgagcctggcgggcgcggttaatcagaacgccgaacgggtattcatcgagctggcgcaaatcctgtttaacccgtggattgccgggatcctgctgtcggccattctggcggcggtcatgtcgaccctgagctgccagctgctggtctgctccagcgctattaccgaagatctgtataaagccttcctgcgtaaaaacgccggtcagaaagagttggtctggatcggccgcttcatggtgctggtggtagcgctgattgcgattgcgctcgccgctaacccggaaaaccgcgtactgggtctggtcagctacgcatgggcaggctttggcgccgcctttggcccggtagtgctgttctcggtgatgtggtcgcgtatgacccgtaacggcgcgctggccgggatgatcattggcgcggtcacggttatcgtctggaaacagttcggctggctgggactgtatgaaatcatccctggcttcctgttcggcagtatcgggattgtggtcttcagcctgctgggcaaggcgccatcggcggccatgcagcagcgttttgctgaagcggacgcgcattaccactctgcgccgccggtacgcgccaccgctgaataa

SEQ ID NO: 88244 - DNA, 1089 bp, Enterobacter aerogenes
atgatagaaaataatgagttagctaatattgagaaaagaattgtcacccgctttctcgatatgtttattaagttcggcttgatactggcgctggcctccttctgctttaccgtcttctcgccgttcctgaacatgatgctgtgggcgctgattctggccgtcacgctgtatcctttacatcagcacatcgcgcgacgtataggcgggcgacaaggactggcatcgaccatattagtgttattcggcctgctgattatcgtcatcccgaccattttcatggtgacctcgcttggcgaaagcgccggtagcctgattgataaagtcagcggaagcgatctgacgctgccgccgccatcggctaacgtcgcctctattcccctcgtcggcggtaagctgtatgcgttctggctgaaggcctcggcggacctgccggcggtactgagcagttatcacgcgcaaattggcgaggcggcgaaactggtgctcggcgtgctggcgagtatgggcggcgggctgctgggctttgtcctctcctttattgttgccggcgccatcatgacctggggcgcggcgggcgccagcagcgctaaacgtatcgctatccgtatcactgatgaaaataaaggtcttgccctgagccgcctgtgcaccggcactattcgcgccgtggcgcagggggtcattggcgtggcgctgattcaggccttgctgacgggaattatcattgcgttggcggggatcccggccgccgggatcttctttgtgctggcgctggtgctcggcatcgcgcagattccggtaatactagtcaccgccccggcgattgccattatgtggatgacaggcgaccacggcaccgcggtgaatgtcgtgtttaccgtcctgctgattgtcgcgggaatggttgataacgtcctcaaaccgctgatgttgggccgcggcgtagatgcgccgatgccgatcgttctgctcggcgcgttgggcggcatggccaccgatggcattctcgggatgtttattggcgcgaccctgctctccatcgggtatctgatcttcatgaactgggtaaacgaaggcgcggcgaagtaa

SEQ ID NO: 88245 - DNA, 435 bp, Enterobacter aerogenes
atgaaattaccccagggcgctgcggcgctgatcgttgccgcactattggcaggatgcgtggcgccatccgagaaaagcgccgcgcacgttgattataacggctgtcaggcggataacaggatgatgcaaaccaccctttatttcggccttagccgcccggcggggaaagatattaccgcccaggagtggcagcagtttgtcgaccgcgatgtgacgccgcgttttcgcgatggcctgacggtatttgacgcccgcggccagtggctaggcaacaatggcgcagtcgcccgcgaatccagcaaggcgctaatgctgattcatagcaacgatgcgaaaagcgagcaggggattgaagcgttgcgtaatacgtataagacgcgctttgcccaggagtccgttatgcgcgttgatcagccggtctgcgtacacttctga

SEQ ID NO: 88246 - DNA, 1185 bp, Enterobacter aerogenes
atgactcaaattttgcacttcctgctggcgctggcggttattctcgccctcgcctggcttgccagctatgaccgacaaaaaatccgcattcgctacattctgcagttaattattattgaaatcgccctggctttctttttccttcacgctgaaagcggtttatgggtagtgaaaaatatttctggattttttgcttcgttactcgggttcgccgctgaagggaccaatttcgtatttggcgggatgggtgaaaaaggactggcctttattttcctcggcgtactgtgtccgattgtctttatttccgcgctgataggtattctgcaacactggcgtattctgccgatctttattcgtctgatcggcaccctgctgtcgaaggtgaacggcatgggcaagctggaatcattcaatgccgtcagctcgctgatcctcggccagtcggaaaactttattgcttacaaaggcgtactcggggacctctcctcacgtcgcctgttcacgatggcggcgaccgccatgtcaacggtatcactgtcgatcgtcggcgcgtatatgaccatgcttgatgcgaaattcgtggtggcggcgttgattcttaatatgttcagcacctttattgtgctgtcgattattaatcctacgcgccccggtagcgaagcagaaataaagctagagaagatgcatgaatcgcagagcttctttgaaatgcttggcgaatatatcctggcaggttttaaggtagcgatgattattctggcgatgctaatcggctttatcgccctgattagtgccattaatgcgctatttgcgaccgtcttcggcttaagcttccagcaaatcctcggttacgtattttatccgctggcgtggctggtgggtattccattaagcgacgcgctaaatgccggtagtattatggccactaagctggtcgctaacgaattcgtggcgatgatcgagctgcagaaaattgccgccagcatgacgccgcgcgggcttgggatcctttccgtattcctcgtctcgtttgccaacttcgcctccattggcattattgccggggcgattaaagggcttaacgagcagcaaggcaataccgtttcccgcttcggcctgcgtctggtctatggcgcgacgctggtgagcctgctgtccgccagttttgccggactggtgctgtaa

SEQ ID NO: 88247 - DNA, 831 bp, Enterobacter aerogenes
atgtttgttccatttctcatcatgttacgcgaagggctggaagccgcgctgattgtcagcctgattgccagctatttaaaacgaacccagcgcggcaactggatcggcgtcatgtggattggcgtattcttcgcggcggcgctctgtctcgggttaggggtttttatcaacgagaccaccggagaatttccgcagcgcgagcaggagctgtttgaaggcatcgtggcggtgatagcggtatttattctcacctggatggtgttctggatgcgtaaagtgtcgcgcaacgtcaaacaacagctggagcaggcggtggataacgcgctgcagcgcgggaataaccacggctgggcgctggtgatgatggtgttttttgcggttgcccgcgaaggcctggagtcggtttttttcctgctggcggcattccagcaggatgtgggcatctggccgccgctgggggcgatgctcggcctggcgacggcggtggtattaggcttcctgctttactggggcggtgtccgccttaatctcggcgtgttcttcaaatggaccagtctgtttatcctgctggtggcggccggtctggcagccggggcgattcgcgccttccatgaggcgggactgtggaattatttccagaatgtcgcctttgatcttagcaacgtggtatcgacgcatacgctgttcggcacgctgctggaaggcatctttggttatcaggagacgcccaccgtcagcgaagtggcggtttatcttctctatttgatcccggcgctggtgtgttttgccttgccgccgggcagcaaaacgacagcatcgcgggccgcgtaa

SEQ ID NO: 88248 - DNA, 1128 bp, Enterobacter aerogenes
atgataattcaatttcgccgtactgcgctgcagttaaccgtcgccgcgctgttcagttccgcatgctacgctcaggctgcggatattccgcaagtaaaagttaccgtcaacgacaagcagtgcgaaccgatgaatgtgacggtgaaggcgggtaaaacccagttcatcattcagaaccacagccagaaagcgctggagtgggagatcctgaaaggggtaatggtggtcgaggagcgtgaaaatatcgcgccgggattcacgcaaaaattaacggctaaccttcagccgggcgaatacgatatgacctgtggcctgctgactaatccgaaaggaaagctgattgtcaccggtgaaaccagcaaagatgcggcgaaagccgatgcggtgctaagtcttggcgaggcgattactgcgtataaagcctacgtcaccgcggaaaccacgcagctggttagcggtactaaagcctttaccgatgccgtaaaagccggagatatcgagaaagcgaaggcgctgtatgccccgacccgtcagcactacgagcgcatcgaaccgattgcggaactcttctctgacctcgacggcagcattgacgcccgtgaagatgatttcgagaaaaaagccgaagatccgaaatttaccggctttcaccgtctggaaaaagcgctgtttggcgataacagcgttaaagggatggaaaactatgctgaacagttgaacagcgatgtgctggaactgcaaaaacgcattagcgagctggccttcccgccgtcgaaagtggtaggcggcgcggcggggctgattgaagaagtggcggccagcaaaattagcggtgaagaagatcgctatagccataccgacctgtgggatttccaggccaatatcgacggcgcacagaaaatcgtcgacctgctgcgcccgcagctgcaaaaggataatagcgcgctgctggccaaagttgacgccaacttcaaaaaagttgatgtcatccttgctaaataccgcacgaaagacggtttcgagacctatgacaaacttaccaccgctgaccgtaatgcgctgaaagggccgatcacgacgctggcagaagatctggcgcaactacgcggaattttgggcctggattaa

SEQ ID NO: 88249 - DNA, 1284 bp, Enterobacter aerogenes
atgacgcaaccaaaaccatgcgacgtgaatgaaccgtcacgtcgccgcttactgaaggggatcggcgcgcttggcggcgcgctggccatcagcggcggttgcccgatggcgcaggcggcgaaagcggaaagctcccccggcacgctcgcccccgatgcgcgtcaggaaaaacagccattttatggcccgcatcaggcgggcatcctgacgccacagcaggcctcgatgatgctggtggcgtttgatgtgctggcggcggataaagctgacctcgaacgcctgttccgcttgctgactcagcggatcgcctttttaaccgcaggcggtccggcaccggataccccgaatccccgattgccgccgatggattccgggattttagggccgtggattgcgccggataacctgactatcaccgtctcagtcggccattcgctgttcgatgagcgctttggattagcggacaaagcgcctaaaaaactgcaggcaatgacgcgtttcccgaatgattcgctggatgctgcactgtgccatggcgatttgctactgcagatttgcgccaatacccaggatacggtgattcacgcactacgtgacattatcaagcacacgcccgatctgctgagcgtgcgctggaagcgggaagggtttatttctgatagcgcggcccgtagcaaaggcaaagagacgccaattaacctgctgggctttaaagacggtaccgctaacccgtcgagccaggataaagcgctaatggataacgtggtgtgggttactgccgaccagggcgaaccggcctgggcgatcggcggcagttaccaggcagcacgtatcattcagttccacgttgagttctgggatcgtacgccgctgaaagagcagcagacgatttttggtcgcgataaacattctggcgcgccgttggggatgaaacatgaacatgatgttccggattatagtcgcgatccgaatggtgaagtgatcgcccttgatagccatattcgtcttgcgaacccgcgtacgcctgagacgcaatctagcctgatgatgcgccgcggttacagctattcgttgggggtcaccaactccggacaactggatatggggttattgttcgtttgctatcagcacgatctggaaaagggattcctgacggtgcagaaacggctgaacggcgaggccctggaggagtacgttaaaccgattggtggtggatacttctttgtgttgcccggcgtgatgaacgaccagcattatcttggacaatctcttttgcaagcctga

SEQ ID NO: 88250 - DNA, 789 bp, Enterobacter aerogenes
atgggaagacaaaaagcagtgatcaaagctcgtcgtgaggcaaaacgtgtgctgagacgggattcgcgtagccataaacaacgtgaagaagaatcggtcacatcgcttgtgcaaatgagtggcgtagaagcaatcggcatggcgcgggatagccgcgatctttcgccgattgaagcgcgtaatgaagctcaggcgcattatttgaatgccatcgacaataaacagctgattttcgccaccggcgaagccgggtgcgggaagacctggatcagcgcggctaaagcagctgaagccctgatccataaggatgtggacagaattattgttacccgtcccgttctgcaggccgacgaagatctcggcttcttaccgggagatatcgccgaaaagttcgctccttatttccgaccagtatatgacgtactggtgaagcggttgggcgcttcctttatgcaatactgcctgcgtccggaaatcggcaaggtagaaatcgcgccgttcgcctatatgcgcggacgcacctttgaaaacgcggtggtgattctggacgaggcccagaacgtgaccgcggcgcaaatgaagatgtttttgacccgcctcggggagaacgtcacggtgatcgtcaacggcgatattacccagtgtgatttgccctctggcgtaaaatcaggcctgagtgacgcgctgtcgcgttttgaagaagacgacatgattggcatcgtgcgttttaccaccgatgactgcgtgcgttcaacgctttgccagcgaacgttgaaagcctattactaa

SEQ ID NO: 88251 - DNA, 678 bp, Enterobacter aerogenes
atgtctactccagctaactttaacggttctcgtccggtgattgatgttaacgataccgcgatgctgttgattgaccaccaaagcggcctgttccagaccgtcggcgatatgccgatgccggaactgcgcgctcgcgccgccgcgctggcgaaaatggcatcgcttgccgggatcccggtgataaccaccgcttccgtgccgcagggtccgaacggcccgttgattccggaaattcatgagaatgcgccgcatgcgaagtatattgcgcgtaaaggcgagatcaacgcctgggacaacccggagtttgtcgccgcggtgaaagcgaccggacgtaaaaccttaatcatcgccggtaccattaccagcgtgtgcatggctttcccggcaattgccgccgtcgccgacggttataaggtgtttgccgttatcgacgcctcgggtacttacagcaaaatggcgcaggagatcaccctggcccgcgtagtccaggccggcgtagtaccaatggataccgccgcggtagcctctgaactgcagcgcacctggaaccgtccggatgccgccgagtgggctgaggtgtataccaaagtcttcccggcgtatcagttgctgattgaaagctacagcaaggcgcaggacgtcgtgaagaacaacgaaaagctggattcccagcgttaa

SEQ ID NO: 88252 - DNA, 861 bp, Enterobacter aerogenes
atgaaacagattactggcgtttacaccgccccttcgcagcactgggtgggcgacggtttcccggttcgctcaatgttttcttaccagacccacggcgaacaactgagcccgttcttactgcttgactacgccggcccgcacacgtttccggcgggaagcggtaaacgcggcgtcggcgagcatccgcatcgcggattcgaaaccgtcaccattgtctactccggtgaagtcgagcatcgcgactcaaccggtagaggcggcgttatcggccctggcgacgtgcagtggatgacggccggcgccgggatcctgcatgaagagttccactccgaagcgttcacccgctccggcggtgaactgaaaatgatgcagctgtgggtcaacctgccggcgaaagacaaaatgacgaccccgggctatcagagcattaccgcagacgtcattccgcaagcaacgctggaagacgacgccgggaccgtcagagtgattgccgggcgttacggcgatgtcgtcggcccagcgcacacattctcaccgttaaacgtgtgggatatgcagctcaaacaaagtcacgatgtgacattgcgtcagccggaaggctggagctccgcgttggtcgtgctcgaaggcgaagtcatcgtcaacggtacggaaaacgcacgggaaggacagctggtagtgctgagccaaaaaggtgaagccttccatctggaagcgagctccaacgcgaaggttctgctgatggccggcgaaccgctacaggagccgatcgtgggctacggcccgtttgtgatgaataccaaaacgcaaattgccgaagcaattcgcgattttaacagcggccgttttggccaaatctaa

SEQ ID NO: 88253 - DNA, 906 bp, Enterobacter aerogenes
atgcaggatctcaacgacctggcctggtttgttcaggtggtcgaccatggcggttttgccgctgccggtcgggcgctcgaccagcccaaatccaaactcagccgccgcattgcgcaactggaagagcgcctgggcgtgcgtctgattcaacgaaccacccgacagttcgccgtcacggaagtcggccaaactttctatcaacactgcaaggcgatgttgatagaagccgaagcggcgcatcaggcggtagaaacgctgcagtctgaaccgcgcggcagcgtcaagctcacctgtccggtaaccctgttgcatgcccatgttggcccgatgctggcgcgctttatggtgcgatatcctggggtgacgctacatctggaagccaccaatcggcgggtggatgtggtgggcgagggggttgatgtggccattcgcgtgcgaccaaggccatttgaagatagcgacctggtcatgcgggtgttggccgatcgcggccatcgcctggtggcgagtccggcgctgatagccaggcttgggcgcccgcaggcgccggcggaattgagcacctggccggggctaagtattggcgccggaaaacatcagcataaatggcaacttaccgggccagagggggcgcgggccgaggtttatttcacgccgcggatggtgaccagcgatatgctggcgctgcgcgaggcggctatggcgggcgttggcgtggttcaacttcctttattaatggtgcgcgaacagttggcatcaggggagttggaaatcgtgcttgatgagtggcagccgcggcgggaagtcattcatgcggtgtttgcttcgcggcgcggtttattaccttctgtcagagcgctggtggattatctcagcgaagagtatcagcggatggaagaggattag

SEQ ID NO: 88254 - DNA, 939 bp, Enterobacter aerogenes
atggagattattttttaccacccgacgttcgataccccctactggatcgcagagctggaaaaacatctgccgggagcgcgagttcgtgagtggaaacctggcgacaatcaaccagccgactatgcgctggtctggcatccaccggtagaaatgttgcaaggccgcaaattgaaggcggtttttgccctcggcgcaggcgtggattctattcttagcaagctgcgggagcatccggaaatgctgccgctttcgatcccgctgttccgcctcgaagataccggtatgggcctgcagatgcaggaatatgcggtaagccaggtactgcactggttccgccgctttgatgattatcaggcgctgaagctgcaatcccgctggcagccgttgccggaataccgtcgcgaagatttcactatcggcattatgggggcaggggtgttgggcggcaaagtcgcggaaagcctgttgcgctggggtttcccagtgcgctgctggagccgtagccacaaatcctggccgcaagttgagagttttgccggtcaggaagaactgggcgcatttttacggcaaacccgcgtgctgatcaacctgttgccaaatacggctgaaaccgtcggcatcattaatgaaactttactctctcaacttccggataacagctatgttctgaatctcgcccgcggcgtacatattgttgagccggatttactggccgcgcttgacagcggtaaggtgaaaggggcgatgctggatgtctttagccgcgaaccgctgccgaaagagagcccgctgtgggcgcatccgcgtgtggccatgacgccgcatattgccgccgttacccgtccacaggaagcgatcgcttatattgccagtaccattagccgcctggagcgtggtgaaacggtcagcgggcaggtcgatcgccaacgcggctactaa

SEQ ID NO: 88255 - DNA, 738 bp, Enterobacter aerogenes
atgtatcctgttgacctgcacatgcataccgtcgccagcacccacgcctatagtaccctgcatgactatattgccgaggccaaacgtaaaggcattaaactttttgccatcaccgatcacggcccggatatggccgatgcgccgcactactggcatttcgtcaatatgcgtatctggccgcgtctggtagatggcgtcggcattctgcgcggcattgaagcgaatattaaaaatacccagggtgaaattgactgtaccggaccaatgctgacctcgctggatctgattattgccggttttcatgagccggtattcccgcctcaggataaagccatccacactgaagcgatgattgccgcgattgccagtggcgcagtccacatgattagccatccaggcaatccgaaattcccgatcgatattccggcagtagccgaagcagcggcaaagcatcatgtggcgctggaaattaataattcctctttcctttcatcgcgtatcggtagtgaagataattgccgggcaatcgccgccgccgtgcgtgatgcgggtggttgggtggcgctgggttcggactcccataccgcctttacgcttggcgaatttaccgaatgtcgcaaaatcctcgacgcggtgaatttcccggaagagcggatccttaacgtcagtccgcgtcgactactgaatttcctcgaatcacgcggaatgccggcgattgcggaatttgcagacctttaa

SEQ ID NO: 88256 - DNA, 555 bp, Enterobacter aerogenes
atgaatgaattttcaatcctctgtcgcgtgctgggctcgctgtactatcgtcagccgcaggacccgctgttggtgccgctgttcacgctgattcgcgatggcaagctggccgccagttggccgctggaacaggatgaattactggagcgtctgcagaagagttgtgatacccagccgttaaccgctgattacaacgccctgttcgttggtgacgaatgtgcggtctcgccttatcgcagcgcgtgggttgaaggcgccacggaagcggaagtccgcggttttctcactcaacacggtattcctactggcgacgggccaaccgatcatattggatccctactgctggccgcatcctggcttgaagatcatgcctctgatgacgaaagcgaaacgttggaaacgttgtttgccgattacctcttaccgtggtgcggcaccttcctcggtaaagtcgaggcgcatgcgcaaaccgcattctggcgtaccatggcgctactcacgcgtgaagctatatccgccatgtgggatgagctgcaggaagaaaacgacgaataa

SEQ ID NO: 88257 - DNA, 495 bp, Enterobacter aerogenes
atgatacgcggcatgaacatactcttcgcaatcgcactcacgacgggcattctctccggtatttggggatgggtggcggtctcacttggcctgctgagctgggccggtttcctcggctgtacggcctatttcgcttgcccacagggcggcctgaaagggctgttgatttccgcctgcacggtcatgagcggcgtgatatgggcgctggtgattatttacggtagcgcgctggcgccgcagttggaaatcctcagctatgtgatgaccggaatagtcgccttcctgatgtgtattcaggcgcgtcagctgctgctctcttttgttcccggaacctttatcggcgcctgcgcgacctttgccgcgagcggcgactggcgcattgtcgtgccatcgctggcgctgggattggtctttggctatgccatgaaaaacagcgggctgtggctggcggcgcgagcggcaaagaataagtctctggctaacgataacgtctga

SEQ ID NO: 88258 - DNA, 306 bp, Enterobacter aerogenes
gtgaaaaaaatgactggcgtactacttgctacagtttgtttccttcccgctttattgactttttcaactacctctaacgccgcaagcggcgtgattcgtttccacggcggcgttgtcgaaccgccttgtaaaattcgttcttcagaagatcaggtctcgatggcttgcgctaagcagaagtcagtcactttttctgcccagcaggtagcccggggagatctgcaacatgccaatatcaaatctacacagttcacctttatcaatccccagcacaccaacgctattctcgaagtgagttatcggtaa

SEQ ID NO: 88259 - DNA, 303 bp, Enterobacter aerogenes
gtgataaaaaaaatccacaccttcgcgatgccatgtctgatgttgtcgtgcttgtttggagcagtgcacgccgcgccgaccgacggcgttgtcgccatttatgggcaggtcgtcgatccctcctgcgaagccaatagtgtgggcgaaaagattgaaatggcctgccagcagctgcctacccgggcgctttcgccgcaggtgctgacgacgggaaattacagcaatgacgccgtccgttcagcacaattaaagtatattgatccgcaacatacccgcgctatcctcgaagtgaattatcgctaa

SEQ ID NO: 88260 - DNA, 525 bp, Enterobacter aerogenes
atggttgttcaacctgaggtggttctcggcgatattacgacgttgcaggtagatgttattgtcaacgcggcaaacccatcgttactgggcggcggcggtgttgatggcgccattcatcgcgcagcgggcccggaactactggcagcctgcaaaatagtccgccagcagcagggcgaatgtccgcccgggcatgcggttatcaccagcgccggtaatctaccggccagcgcggtgattcatgcagtcggccccgtctggcacggcggtgacgagcaagaggccgaattactgacggatgcctatcgcaatagtctgttgctggcggcagccaataattatcgatctattgcttttccggctatcagcaccggcgtatatggctatccgaaacaggcggcggcggaaattgcggtgaaaacggtgaaggctttcctcacccgatataatccactggaacgagtgtgctttgtctgctttgataacgaaacggcggagatctatcagcgattattgcaggcagaatga

SEQ ID NO: 88261 - DNA, 1161 bp, Enterobacter aerogenes
atgaataaaacaccagtagagcgtgaatatttcttcgacagcatccgcgcctggctgatgctgctggggataccctttcacatttcgcttatctactccagccacagctggcatgtgaatagcctggaaccctcctgggggttaacgctgttcaacgactttatccatgctttccgcatgcaggtcttctttgttatttccggctacttctcttacatgctgtttctacgctatcccctaaagaaatggtggaaagtacgcgtagagcgcgttggcattccgatgctcaccgcgattccacttctgactttgccgcaattcttgatgctgcaatacgttaatggtaaagcgcaaaactggcacacgctctccggctatgacaaattcaacaccctggcatgggagcttatctctcatctgtggttcctgctggtgctggtcgtgctgaccactctcggcgtggtgctgtttaagtggctggccaatcgagggaaaacgcagaccgtcagctttggtgacactgtcacatttggtcaattatcgcttattttccttggtcttggcgtgttgtatgcggtaattcgtcgcactatttttatcgtttacccgccgattctcagcaacggactgtttaacttcatcgttatgcagaccctgttctatctgccgttctttgttctcggcgcgcagacgttcatcaacccgcggctaaaagcgatgttcaccacctcatcaccttggtgttttgtcggcgcactgctgggctttatcgcctatcgtcttaaccagcagtatggttccggcgatggctggatgtatgaaaccgaatcgatgattaccatggtgcttgggctgtggatggtgaacgtggtattctcgctgggccaccgcctgctcaacttccagtccgctcgggtgacttacttcgtcaacgcctcgctgtttatctacctggtgcatcatcccctcaccctgctgtacggggcgtggattacgccaataatcaaatcgaatctgttaggttttatcgccggactggtgtttgtggtgggtattgcgctggtgctgtacgaaatccatctacgtattcctctgctgcgcttcctgttctcaggcaaaccgcagcaaaaaccggcgaaagcgccggtgtcggttaactaa

SEQ ID NO: 88262 - DNA, 1554 bp, Enterobacter aerogenes
atgaaacataaaccacagatgatgaaaatgcgttggttaagcgcagccgtaatgttgtccctgtgtacttcatctgcatgggcattcagcattgatgacgtagcaaaacaggcgaaaacgttagccgggaaaggctatgaagcgccgaaaagtaacctgccctccgccttccgcgatatgaaatacgcggattaccagcaaatccagttcaatcacgacaaagcgtactggaataacctgaaaaccccgttcaagctggaattttaccaccagggcatgtatttcgacacgccggttactattaatgaagtgaccagcaccagcgtacgtaaaattaaatatagcccggattattttaattttggcaatgtgcaacacgataaagacacggtgaaagaccttggtttcgccggttttaaagtactgtatccgatcaatagcaaagacaagaatgacgaaatcgtcagcatgctcggagccagctacttccgcgttcttggccagggtcaggtatacgggctttccgcccgcggcctggctatcgataccgcgctgccgtcaggcgaagagtttcctcgtttccgcgagttctggattgagcgcccgaaagcgaccgataagcgcttaactatctatgcgctgttggattccccgcgtgcgaccggcgcctatcgttttgtggttatgcctgggcgcgacaccgtggttgatgtgcagtcgaaggtttatctgcgcgacaaagtcggtaaactcggcgtggcgccgttgaccagtatgttcctgtttgggccgaatcaaccgtcgccgacgactaactatcgtccggaactacatgattccaacggtctgtcgattcttgccggtaacggcgagtggatctggcgtccgctgaataatccgaaacatctggccgtcagcagctatgcgatggagaacccgcaagggtttggtctgctgcagcgtggccgccagttctcccgctttgaagatctcgacgatcgttacgaccagcgcccgagcgcgtggatcaccccgaaaggcgactggggtaagggtaaagtcgaattggttgaaatcccgaccaacgatgaaaccaacgacaatatcgtcacctactggaccccggatcagctgccggaaccaggcaaagagatgaacttcaaatactctattaccttcagccgcgatgaagacaaactgcatgcgccagatagcgcttatgtggtgcagactcgccgctcaaccggtgatgtgaagcagtctaacctcattcgccagccagatggcactatcgctttcatcgttgatttcaccggcgctgacatgaaaaaaatggcggcggacacgccggtaacggcgcaggcgagcatcggcgataatgccgaaatcgtggaaaactccgtgcgctataacccggttatcaaaggttggcgtatgaccctgcgcgtgaaagtgaaagatccgaagaaaaccacggaaatgcgtgcggcgctggtcaatggcgatcagacgctgagcgaaacctggagctatcagctgcctgccaatgaataa

SEQ ID NO: 88263 - DNA, 2529 bp, Enterobacter aerogenes
atgaataagataacgaattatatcgacgcattgccgctgtcggatgctgaaaaggccgcattacctgatgcgagcctgcaagccgtacatgaagcgcttgacgcagagcatcatcattttccgcgcgatgaagattccccgttaggatcggttaaagcgcggctggagcatagctggccggactctctggccggcgatcagctggtgaaagatgatgaagggcgcacgcagcttcatgcgatgccgaaagcgaaacgttcctcgatgatccccgacccgtggcgcaccaacccggtaggccgcttctgggatcgcctgcgtggccgtgacgtgactccgcgctatctctctcgcctcacgcaagaagagcgtgaaagcgagcagaaatggcgtaccgtcggcaccattcgtcgctacattttgctgctgctgacgctggcgcaaacggtagtggccacctggtatatgaagaccatcctcccttatcagggctgggcgctgatcaatccatccgatatggttggccaggatctgtgggtctccttcatgcagctacttccttacgtgttgcagaccggcatcctgatcctctttgcggtacttttctgctgggtctcggccggtttctggaccgcgctgatgggcttcctgcaattgctgatcgggcgtgataagtacagtatttcggcatccaccgtaggcgacgagccgctgaacccggaacaccggactgcgcttatcatgcctatctgtaacgaagatgttgatcgcgtgtttgccggtctgcgcgccacctgggaatcggtgaaagcgacgggtaacgctgcgcattttgacgtttacgtgctcagcgacagctacgacccggatatttgcgttgccgagcaaaaagcgtggatggaattgattgccgaagtgcagggtgaaggccagatcttctatcgtcgccgtcgtcgtcgtgtgaagcgtaaaagcggcaacatcgatgatttctgccgtcgctggggtagccagtatagctacatggtggtgctcgacgctgactcagtaatgaccggcgagtgcctgagcgggctggtgcgcctgatggaagcgaatccgaatgctgggatcatccagtcttcgccgcgcgcttccggtatggataccctttatgcgcgctgccagcagttcgccacccgcgtgtacggcccgctgtttaccgccgggctgcacttctggcagttaggtgaatcgcactactggggtcacaacgccattatccgcgtgaagccgttcatcgaacactgcgcgctggcgccgctgccgggcgaaggtaactttgccggctcgattctttcgcacgacttcgtggaagctgctctgatgcgccgtgcggggtggggcgtttggatcgcctacgatctgcctggctcctatgaagagctgccgccgaacctgctggatgaactgaagcgtgaccgacgctggtgtcagggtaacctgatgaacttccgcctgttcctggtgaaagggatgcacccggtacaccgtgcggtgttcctgaccggcgtcatgtcctatctgtcggcgccgctgtggtttatgttcctcgcgctgtcgacggcgctacaggtcgtgcacgccctgaccgagccgcaatacttcctgcagccgcgtcagctattcccggtatggccacagtggcgtccggaactggctatcgcgctgtttgcttcgaccatggtactgctgttcctgccaaaactgctgagtatcattctggtgtggtgcaaggggccgaaagagtacggcggcttcttccgcgtgacgctctccctgttgctggaggtactgttctcggtgctgctggctccggtgcgcatgctgttccataccgtgttcgtggtcagcgcgttcctcggttgggaggtagtgtggaactcaccgcagcgcgatgatgactcaacaccgtggggcgaggcctttatgcgtcacggttcgcagctactgctggggctggtatgggcggttggcatggcgtggctggatctgcgtttcctgttctggctggcgcctatcgtcgtgtcgctgatcctctctccgtttgtctcggcgatttccagccgcgcgacggtaggtctgcgcactaaacgctggaaattgttcctgatcccggaagagtattcgccgccgcaggtactgaaagataccgatgcttacctgactttgaaccgtcagcgttcgctgggcgatggctttatgcacgcggtgtttaacccatcgttcaacgctctggcgacggcaatggctacggcgcgtcaccgccacggccatattctggatatcgcccgtgaacgccacgttgagcaggcgctgaatgaaacgcctgataaactcaaccgcgatcgtcggttggtgctgttaagcgatccggtaacgatgtcgcgtctgcactatcgcgtgtggaacgctccggagaaatactcctcctgggtgggggcgtatcagcagctcacgctgaacccgctggcgttgaaaacgaagtaa

SEQ ID NO: 88264 - DNA, 228 bp, Enterobacter aerogenes
atgagaatatttgtgcttatcgccatgacgctggtactcagcggctgcggcagcattattagccgtacggtaccggggcagggccatggcaaccaatattaccccggtgtacagtgggatgttcgtgattcagcctggcgctatctgaccattctcgatctgccattctcgctggtatttgatacgctgttgctaccgctagacgccagccacggcccctatgagtaa

SEQ ID NO: 88265 - DNA, 387 bp, Enterobacter aerogenes
atgtcaacggaatcagttttctacgccacgctcgaagaggccatcgacgccgcccgggaagagtttttggccgataatcccgacagcgatgaagaaactgccaacatcgaacagttcaatatgcagaagtatattctccaggatggcgatatcgcctggcgggctgaattcttcgccagcgaagatgaagaaggcgagtgcctggccatgctcagtggcgaagcggcacagagcgtatttgacggcgattatgacgaaatcgagctacgccaggaatgggtggaagaaaatacgctacacgaatgggatgaaggcgagtttcagctggagccttccctggataccgaagaggggcagaccgcagccgatgagtgggacgagcgttaa

SEQ ID NO: 88266 - DNA, 1251 bp, Enterobacter aerogenes
atgtcgtctgctgatacacctattaactggaaacgaaatcttaccgtcacctggcttggctgctttttaaccggcgccgcctttagcctcgtgatgccttttttgccgctctacgtcgaacagttgggcgtcaccggccatagcgcgctgaatatgtggtcagggctggtctttagcataaccttcctcttttccgccgttgcctcgccgttctggggcggattagccgaccgtaaagggcgtaagattatgctgctgcgttcggcgctggggatggctatcgtcatgatgctgatgggcatggcgcagaacatttggcaattcctgatcctgcgcgcgctgctgggtttactgggcgggtttattcccaatgccaatgcgctgatcgccacccagatcccccgtcagaaaagcggctgggcgctaggaacgctttcaaccggcgcggtaagcggcgccctgctcggcccgctggctggcggtttccttgccgaccactgggggttgcgcaccgtcttctttatgaccgccacggtgctgtttatctgcttcctgttcaccctgtttttaatccgcgaaaactttgttccggtgaacaaaaaagagatgctcaatgccagggacgttttcggttcgcttaagaatcctaaactggtgctgagcttgttcgtcacctcattgattatccaggtcgctaccggctccattgcgccgatcctgacgctctacgtgcgcgacctggctggtaacgtcagtaatatcgcctttattagcggcatgattgcttccgtacccggcattgccgccctattgagcgcgccacgtttaggcaagctcggcgatcgcattgggccggaaaagatcctgatagttgctctggttatctctgtgctattactgatcccgatgtcattcgttcagacgccgctacagctaggcattctgcgctttttgcttggcgccgccgacggcgcgctgttacccgccgtacaaaccctgctggtgtacaactccaccagccagatttcgggacgtatcttcagctataaccagtcgtttcgcgatatcggcaacgtcaccggcccgttaatcggcgcctcggtctcggccaactacggcttccgcgccgtgttcctcgtcaccgcctgtgtcgtcctgtttaacgctttttactcgaccatcagtctgcgccgcccacggcacgacgcttcagcggatgacgggggctcgggtaaacgttcggtaaattaa

SEQ ID NO: 88267 - DNA, 921 bp, Enterobacter aerogenes
atgacccatttaccgaaattttccgccgcgctgctccacccgcgctactggctgctttggctgggcataggcctgttgtggttagttgtccaactcccttatccggttatctaccgtctcggtaatgccattggtcgtctggcgatgcgttttatgaaacgccgcgcaaaaatcgcttatcgtaatcttgagctctgctttcctgagaagagcgaacaagagcgtcatcaactggtagtacaaaactttgagtccgtcggcatgggcctgatggaaaccgggatggcatggttctggccaacccgacgcattgcgcgctggacagacaccatcggctttgaacatgtccgcgacgtgcaggcacaaaaccgcggtatcctgctgattggcattcatttcctgacgctggaaatgggtgcgcgcatgttcggcatgaaccaacccggtatcggcgtctatcgcccgaatgacaacccggttatcgactggctgcagacctggggccgcctgcgttccaacaaagatatgattgaccgtaaagatctcaaaggcatgatccgcgcgctgaaaaaaggcgaagtggtctggtatgccccggaccatgactacggcccgaccgccagcgtcttcgcccccctgttcgccgtcgagcaggccgccaccacttccgggacctggatgctggcgaaaatgtctaaagcgtgcattgtgccattcgtcccacggcgcaaaccgaatggcaaaggctatgagctcatcatgctgccgccggaatgcgatccgcctctggaaaacgcagaaaccaccgccgcgtggatgaacaaaatcgtcgaacagtgcattttgatggcgccagagcaatatatgtggctgcatcgccgctttaaaacccgtccggaaggcgtgccttcgcgctactga

SEQ ID NO: 88268 - DNA, 1065 bp, Enterobacter aerogenes
atgccagtgttacacaaccgcatttcaaatgagacgttaaaggcgcagatgctggctgagaccgagccgcgcacgacgatctcgttctataaatatttcactatcgttgacccgaaagcgacccgcgacgctctgtggctggcgttgactaagctgaacgtctttggccgcatctatctggcccatgaaggtatcaatgcgcagatcagcgtgccggaaagcaaggtcgcagcgctgcgtgaatttctcgatagcttcgatccggcgctaaaggggttacgtctgaacatcgcgctggatgatgacggtaaatccttttgggtcctgcgcctcaaggtccgcgaccgcattgtggccgacggtattgatgacccaacctttgatccctctgatgtgggcgagtatctgaaagcggcggaagtgaacgcgatgctggacgatccggacgcggtattcatcgatatgcgtaaccattatgagtacgaagtcggtcattttgagaacgcgatggaaattccggcggataccttccgcgatcaattgccgaaagcggttgagatgatgcaggagtacaaagacaagaagattgtcatgtactgtaccggcggtattcgctgtgagaaagccagcgcctggatgaagcatagcggtttcaataaggtgtggcacatcgaaggcgggattatcgagtatgcgcgccgcgcccgtgaacagggattgccggtacgctttattggtaagaactttgtctttgacgaaagaatgggcgagcgtatttctgatgatgtgattgcccactgccatcaatgcggcgcaccgtgcgacagccacaccaattgcctgaacgacggctgccatttgctgtttattcagtgcccggcctgtgccgagaaatttgccggttgctgcagcgaagcctgtatggaagagcataaactaccggaagaggagcagcgcaaactgcgggcggggcgagagaatggcaataagatttttaataaatcccgtggtcgtcttaataccaaattaggtatcccggatcccgacccgtcagtaaaaccataa

SEQ ID NO: 88269 - DNA, 1119 bp, Enterobacter aerogenes
atgcaatacgacctcatcattatcggtagcggctccgttggcgctgccgctggctattacgcccgccgcgccggtctgaatgtcctgatgaccgatgcccacaaaccgccgcatcaggaaggcagccaccatggcaacacgcgtctgattcgtcacgcttatggcgagggcgaaaaatacgtaccgttggtgctacgtgcccagcagctatgggacgaattcgcgcaagacagcggcgaggccgtattcgaaaaaaccggcgtcattaacctgggcccggccagctccgattttctcaataacgtggcccacagcgcgcgtcagtttaagcttaacgtagaggaactggacgctgaagctgtcatgaagcgttggccggagattcgtatcccacaagattatcgggcaatttttgaaccggcttccggcgtgttacgcagcgaactggcggttgaaacctggatccggctggcgcgtgaggcgggttgtgcccagctcttcaactgtccggtgaccgcgatccatcatcatgccgatggcgtgaccatcgataccgctgacggcagttacaatggcaaaaaactgctgatcagcgccggaacctgggtaacgaaattattgccggaactgcccattcaaccggtacgtaaagtcttcgcctggttccaggccgatggtcgctatagcacgaaaaataacttccctgctttcaccggcgaactaccgaatggcgatcagtattatggcttcccggcggaagacaacgaattaaagatcggcaaacacaatggcggccagctgatttccgaaccgggcgagcggaaaccgtttggcgctgtcgccagcgatgggtctgagtcgttcaacttcctgcgcaacgtgctgcccggaattggcggctgcctgcacggcgcctcctgtacgtacgataatacggtagatgaagatttcattattgatacccttcccgatcatgacagcacattactcattaccggattaagcggtcacggtttcaagtttgctccagtacttggcgaaattgcgacgcaatttgcgcaaggtgaaacgacggagtttgatttgactcccttctcgctggcgcgattttcacaataa

SEQ ID NO: 88270 - DNA, 255 bp, Enterobacter aerogenes
atggaaaagaataatgaagtcatccagacccatcccctcgtcggatgggacatcagcaccgttgatagctacgatgcgctgatgttgcgcctgcactaccaaaaccccacccaagaaagcgataaagaagcagaaattggccagacgctatggctaacgacggacgtcgcacgtcagtttatttctattctggaagcaggaatagcgaagatagaatctggcgattaccaggcaaatgagtatcgcagacattag

SEQ ID NO: 88271 - DNA, 297 bp, Enterobacter aerogenes
atgtgcaagcgttactgtataaataaccagtatattacccagggggccattatgcgcatcgaagtgtcaattgccaaaaccacagccttacccaacggcgcgctggaagcgctgaataacgaactcgctaagcgtatcgctcactattacccggaacgtgaaaaccaggtcacggtacgttatgccgctggcaataatttatctgtcatcggtggcctgaaagaagacaaagaccggattagcgaaatcctgcaggaaacctgggaaagcgccgacgactggtttatccacgactaa

SEQ ID NO: 88272 - DNA, 1047 bp, Enterobacter aerogenes
atgacagcacaaccccaggtattgaaaatccgccgccctgacgactggcatatccatttacgcgatgatgatatgttgcaaaccgtcgtgccttacaccagtgagttttatggccgggcgatcgtgatgccgaatctggtaccgccggtaacgaccgtcgctgctgccattgcttaccgccagcgcatcatcgatgcgattcccgccgggcatgatttcactccgctgatgacctgctacctgaccgacacgctcgatccggacgaactggagcgcggattccgtgaaggcgtatttaccgcagccaaactctacccggcaaacgccaccaccaactccagtcacggcgtgaccagcaccgatgccattatgccggtgctggaacggatggaaaaactgggcatgccgctactggtacacggcgaagttacccatgctgatatcgatatcttcgatcgcgaagcgcgctttatcgagacggtgatggaaccgctgcgcaaacggctgcaggggttaaaagtggtcttcgaacatatcaccaccaaagatgccgctgaatacgtgcgcgacggcaacgaactgctggccgccaccatcacgccgcagcatctgatgtttaaccgcaaccatatgctggttggcggtattcgcccacatctatattgcctgccgatcctcaagcgcaatatccaccagcaggcgctgcgtgaactggtcgccagcggattcagccgcgcgttcctcggcaccgactccgctccgcatgcacgccaccgtaaagaggccagttgcggctgcgcgggctgtttcaatgccccgaccgcgcttggtagttacgccaccgtctttgaagagatgaatgcgctggaacattttgaggctttctgctcgttgaatggcccgcgtttctacggcctgccggtgaatgaaagctacgttgaactgttacgcgaagagagtaccgtcgccgaaagcatcgcccttcctggcgatacgctgataccgttcctggccggcgaaaccgtgcgctggacaatgaaaaaataa

SEQ ID NO: 88273 - DNA, 561 bp, Enterobacter aerogenes
atgaaaaagatgttgatcgcggccgcgctgattgtcagcggccttctgagcggatgtaaccagcttacgcaatactccgttagcgagcaggagattaaccaggcgctgcagaaacgtaatcacttcgctaaagatatcggcctgcctggcgtagcggatgcgcacattgagctgcaaaacctgaccagcgccattggtcgtgaagagccgaacaaggtgtcgttgagcggaaccgctaatctggatctgaattcgctgtttggcaatcagaaagcgaccatcgacctgaagctcaaagcgctgccggtgttcaataaagagcaaggcgcgatttatctgcgtgaaatggaagtcgtcgatgcgaaagttaagccggaaaagctcacctccgtggtacagacgctgatcccttatctgaatcagtcgctgcgcagctatttcaatcagcaaccagcctacgttctgcgtgaagatgccagcaccggcgaagccctggctaagaaatacgctaaaggcattgaagtgaaaccgggcgagataatcatccccttcactgattaa

SEQ ID NO: 88274 - DNA, 1209 bp, Enterobacter aerogenes
atgtcccgcgtatcgcaggcaaggagcctgggtaaatatttcctgttagtcgataacatgctggttgtgctcggcttttttgtcgtattcccactgatatcgatccgttttgtcgaccaaatgggttgggcggcgctgatggtcggtattgccctcggtctacgtcagctggtgcaacaaggattaggcatcttcggtggggcgattgccgatcgtttcggcgccaaaccgatgatcgtcaccggcatgctgatgcgcgccggcggtttcgcggcgatggccgtcgctcatgagccctgggtgctctggctctcatgcattttgtctggtctcggcggcaccctgttcgacccgccgcgagcggcgctggtggtcaaactggtgcgcccgcatcaacgtggtcgtttcttctctatcctgatgatgcaagatagcgccggcgcggtcatcggcgccctgctcggcagttggctattacagtacgatttccgtctggtgtgcagcgcaggggcagcgctctttattgcctgtgccgcatttaacgcctggtatctgccggcatggaaactctcgacggtcaaaacgccaatccgcgaaggactggggctggtgttacgcgataagcgctttgtcacttacgtgttgaccctgaccggttactacatgctggccgtgcaggtgatgctcatgctgccgattatggttaacgatattgcgggttctccggcggcggtgaaatggatgtatgccatcgaggcgacaatctccctgacgctgctgtatcccatcgcccgttggagcgagaaacgttttcgcctcgagcatcgtctgatggcgggtttgctggtgatgacggcggcgttgctgccgattggcttaaccagcacgctacagcagctgtttaccttaatctgtattttctatatcggctcgatcattgccgaacctgcgcgcgaaacgctgggcgcttcactggctgatgcccgcgctcgcggcagctatatgggtttcagccgccttggtctggcatttggcggcgcgctggggtatgccggcggcggctggctgtttgatgcaggtaaagtgcttaatcaacctgaactaccgtggctgatgctgggcattatcggctttgcaactttcattgcgctatggtggcagtttagccagaaacggtcggcttccggcatgctggaaccgcgcacctga

SEQ ID NO: 88275 - DNA, 585 bp, Enterobacter aerogenes
atgtttggctatcgcagtaacgtacccaaggtgcgtttgacgacggaccggctggtggtgcggctggttcacgatcgtgacgcctggcgtctggccgattattacgcggaaaacaaggggttcctgaaaccctgggagccggtgcgcgatgaaagccactgttatccttccggctggcaggcgcgattatcgatgattacggagtttcataaacagggttcggccttttatttcgcgctactcgatcctgatgagaaagagattattggcgtagcgaatttctcaaatgtggtgcgtggttcatttcatgcctgttatctcggctattccattggtgaaaagtggcaagggcaggggctgatgtttgaagcgctgaccgcggcgattcgctatatgcaacgtacgcagcatattcaccgtatcatggccaactatatgccgcataacaaacgcagcggcgatctgcttgcccggctcgggttcgaaaaagagggttacgcaaaggactacctcctcattgatgggcaatggcgagaccacgtattgacggcgttaacggccactgactggacaccagggcgctaa

SEQ ID NO: 88276 - DNA, 648 bp, Enterobacter aerogenes
atgaaatatcagctaaccgcgcatgaagcgcgcatcattggttgcctgctggagaagcaggtgaccacgccggaacaatatccgctatcagtgaatgctgtggttaccgcctgtaaccagaaaaccaaccgtgagccggtaatgtcgctggcggaaagcgacgttcaggatttgctggatgagttggtcaaacgccactacctgcgtacggtaagcggttttggcaaccgggtgaccaaatatgaacagcgcttctgcaattcggaatttggcgatctcaaattaacggcggcggaagtcgccattgtcacgacgctgctgctgcgcggtgcgcaaacgccaggcgagctgcgtagccgcgcgcagcggatgtatgaattccgcgacatggccgaggtggaaagcacgctcaacaatttggccagtcgtgaagacggtccttacgtcgcgcgccttccgcgcgaaccgggtaaacgcgaaagccgctatatgcacctgttttgtgatgacatggattcgctcatcaccgtggtcgaggcggtgtcgccgccgaatgacgatttgcaggcgcgcgttgaggcgctggaaagtgaagtcgctgagctcaaagtacgccttgattcactactggctcatttaggagagtaa

SEQ ID NO: 88277 - DNA, 924 bp, Enterobacter aerogenes
gtgacggcgaaattacgtgttggcgtggtgggacttggcggcattgcgcaaaaggcatggctgccggtgctgggcgccgcggatggctggacgctgcaggccgcctggtcgccaggaaaagagaaagcgttacgcatctgcgaaacctggcgtctgccctatgccgagtctctggatgcgctggcggcgcaatgtgatgcagtatttgtccatacctcaaccgcttcacattatgaagtggttcatcatctgctgaatgcaggcgttcatgtttgcgtggataaaccgctggcggacaagctcagcgaagccgaatcattggttgaactggcggcacgtcggcgtttaacgttaatggtgggcttcaatcgccgctttgcgccgttgtatcgtgaattgaaagcgcatctcaatgacgcggcgtcattgcgcatggataagcaccgtagcgatagcgtgggcaaagagctgcgctttaccctgctggatgattatctgcatgttgtcgataccgcgctgtggctggcgggagataaaacgcgggtggacggcggggtcctgcaaaccacttctcaaggggaaatgctctacgccgagcatcacttcagcgcggggcaactgcagatcaccaccagtatgcatcgtcgcgcgggaagccagcgtgagtgggtgcaggcggtgaccgatggcggactgtatgaggtgtgcgatatgcgcgagtggcgtgaagagaggggcagcggtatcctgcagcgcccggcgcccggctggcaaacgacgcttgaacagcgcggattcgacggctgcgctcgccactttatcgaatgtgtgcaaaatcagacggttccggaaaccgccggcgagcaggcgcttttagcccagcggatcgtggaaaagctctggcgcgaggcgatgagcgaataa

SEQ ID NO: 88278 - DNA, 1536 bp, Enterobacter aerogenes
atgaatctattaaaatcattagcggcagtcagctcgatgaccatgttctcgcgcgtactggggttcgcccgcgatgctatcgtcgcgcgtatttttggcgccgggatggcgaccgacgccttttttgtggccttcaaactgccaaacctcttgcggcgtatttttgccgaaggcgccttttctcaggcctttgtgccgattctcgctgaatataaaagcaagcagggcgaagacgcgacgcgggtgttcgtctcctatgtttccgggctgttgacgctggttctggcgctggtcacggtggcagggatgctggctgcgccgtgggtgattaccgttaccgctccgggctttgccgatacgccggataaatttgccttaaccacccagctgctgcgcatcaccttcccctacattttattgatctcgctggcgtcgctagtgggggcgatccttaacacctggaaccgcttctcggttcccgcgttcgcgccgaccttccttaacgtcagcatgattggttttgccctgtttgccgcgccttattttcatccgccaatgctggcgatggcctgggcggtcacggttggcggtatcctgcaactggcgtatcaactgccgcatctgaaaaaaataggtatgctggttctgccgcgggttaacctgaaagatgccggggcgattcgcgtggttaagcagatggggccggcgatcctcggcgtctctgtcagccagatctcgctgattatcaataccatatttgcctccttcctggtttcaggttcggtctcctggatgtattatgccgaccgtctgatggagttcccctccggcgtgctgggcgtggcgctgggcaccatcctgttgccatcgttatcaaaaagtttcgccagcggcaatcacgatgagtactgccgactgatggattgggggctgcgtctgtgcttcctgctggccttgccaagcgcggttgccttaggcattctcgccaaaccgctgacggtatcgctattccagtacggtaaatttaacgctttcgatgcggcgatgacgcagcgcgcgctggtggcttattcggttggtctgatggggcttatcgtcgtgaaggtgctggcgccgggcttttactcgcgccaggatatcaagacgccggttaaaatcgccattgttactctgataatgacccaggtgatgaacctggcgtttattggcccgttgaagcatgccggcttgtcgctgtctattggtctggctgcctgtctgaacgccgcgctgctttactggcaactgcgtaagcagaaaatcttcacgccgcagccgggctggttcgtcttcctgctgcgtctggtcatcgcggtgctggtcatggccgcagcgctcgtcggcgtgatgtatctgatgccggaatggtcgcaggggacgatgccgttccgcctgatgcgtctgatggtggtggtggtggctggcgtagtcgcctatttcgcgacattgctgctgctcggctttcgcctgaaagagtttgcccgccgcacgatttaa

SEQ ID NO: 88279 - DNA, 1215 bp, Enterobacter aerogenes
atgacaccgcttcctttatccccccgccaggccggctgggttatttttattctcgcgctcggcgctggcttcagcgtcgcatccatctactacgcccagccgctgctgccgttaatcggcgccaacctgcatctcagcgttgagggaatggggctggtgcccacgttgacacaggctggctatgcattgggaatattatttctgctgccgctcggcgatcgccacgatcgccgaacgcttatcctgctgaaaagcgccgtgctggcggtactgttgctactctgcagcctgaccggtcagcttacctcgctactggtcgtcagcctgctgattggcatggcggcgaccatggcgcaggatattgtcccggcggcggcgattctggcgccggcgggcaaacaggggaagatggtcggtacggtgatgaccggcctgctactggggatcctgctttcacgtaccgtcagcgggctggtcggcgcgctatttggctggcgggtcatgtaccaggctgcggcagtcagtatcgcctttatcggcctgttaatgtggcgtgttgtgccgcgttttgagatccactctaccctcagttatccgcagttgctgaagtcaatggcccatttgtggcagcgctatcccgcgctgcgccgcgcggcattcgcccagggctttttgtctatcgcctttagcgcgttctggtcgacgctggcggtgatgctcgccgaacattaccagatgggtagcgcggtcgccggcggcttcggtatcgctggcgcagcaggcgccctggcggcaccgctggcaggcggtttggcggataaagttggcgcagggagagtcacccagctcggcgcggcgttagtcaccgtctcctttgccctgatgttgctactgcccgcgctgccggtacacggccaactggcgctgattgcgttatcggctatcggttttgaccttggtctgcagtcgagcctggtggcgcatcaaaacctggtttacagcctggagccccaggcccgcggcaggcttaacgccttgctatttaccgtggtcttcatcggaatggctctgggatcggtgctgggaagtaaactgtacgtgctggctggctggaacggtgtggtgattctggcggtgagcagcggcgcgattgctctgattatccgcctgctggaaaatgcccgtctacaggccgcagaacgcgccgtgagataa

SEQ ID NO: 88280 - DNA, 939 bp, Enterobacter aerogenes
atgaagaaacaagagcgtatagatcggattgagctgatgcgaacctttattcgcatcgtcgaagcgggttcgctctcggcggcggctctgcagatgagtacgactcaggcgacggtcagccgacgtttgcagtcgctggagacgttactcggcgcaaggcttattctgcgcacgacccatgcgatgaaactaaccgatgacggcgagcgctgttatcaacatgcgcggcgactggtggacagctggctggcgctggaagatgatttgcgcatcgaggaggaccggccggttggcgtgctgcgggtgcgagcgccgcacgcttttggccaacagcagttgctgggtccgctggtgagttttctgcagcgatatcctgagctctccgttgagtggatgctgaatgataaaaccgtcgactttcttagcgataatattgattgcgcgatccgcgttggcgcggaagtcgatccatcaacggtatcggtactgttggctgtggttccccgcagcctggtggttgcgcctgagctattggcgcgtcatccggaactcagcgaaccgcaggcgctctccgcgctgccctgggtcgctatcagcaccttttatcagcatgaagtcacgctacagcatcaggtggacgggcagttgatgagtttcccgattgtcccttgtctgagtaccgatagcgtctacgttgcgcgtaacaccgccctggcggggttgggggcggcaattgtttccagttgggcggtggaggaggatattgcggcaggcaggttgattgagccgtttgcgcagtggcgggcttcgccgctaccggtgcatctggtttatccctgggcgcgctattatccgacgcggctacgcaagtttctcgatttgatgcgcgaagtgatgccacaggtggcggggatgcagcgcccggacgagaagaaataa

SEQ ID NO: 88281 - DNA, 3225 bp, Enterobacter aerogenes
atgaaaagaatgttaatcaacgcaactcagcaggaagagttgcgcgtcgctcttgttgatgggcagcgcctgtacgacctggatatcgaaagccccgggcacgagcagaaaaaagcgaacatctacaaaggcaaaatcacgcgtattgaacctagccttgaagccgcgtttgtcgattacggcgctgagcgtcatggtttcctccccctcaaagaaattgcccgcgaatacttcccagccaattacagcgctcatggccgccctaacattaaggacgttctgcgcgaaggtcaggaagtcattgttcagattgataaagaagagcgcggtaataaaggcgccgcgctgaccacctttatcagcctggcaggcagctacctggtactgatgccgaacaaccctcgcgccggcggcatttcgcgccgtatcgaaggtgacgatcgtaccgagctgaaagaagcgctggcgagccttcagctgccggacggcatgggtcttatcgtgcgtaccgcgggcgttggcaaatccgctgaagcgctgcagtgggatctgagcttccgcctgaagcactgggaagcgattcagaaagccgctgagagccgccctgctccgttcctgatccaccaggaaagtaacgttatcgtgcgtgccttccgcgactatctgcgccaggacatcggcgaaatcctgatcgataatccgaaagtgcttgagctggcgcgccagcatatcgccgccctcggtcgtccggatttcagcagcaaaatcaaactgtacaccggtgaaatcccgctgttcagccactaccaaattgaatcccagattgaatccgcgttccagcgtgaagtgcgtctgccgtccggtggttctatcgttatcgatagcaccgaagcgctgaccgctatcgacatcaactccgctcgcgcgacccgcggcggcgatatcgaagaaacggcgttcaacactaacctcgaagcggctgacgaaatcgcacgccagttgcgtctgcgcgaccttggcggcctgatcgttatcgacttcatcgatatgaccccggttcgccaccagcgtgcggttgaaaaccgcctgcgtgaagccgtccgccaggaccgcgcgcgtatccagatcagccatatctcgcgcttcggcctgctggagatgtcccgccagcgtctgagcccgtcgctgggcgaatccagccaccacgtgtgcccacgctgtagcggcaccggtaccgtgcgtgacaacgaatcgctgtcgctctctatcctgcgcctgattgaagaagaagcgctgaaagagaacaccaaagaagtccacgcgatcgttccggtacctatcgcttcttacctgcttaacgaaaaacgtgccgcagtcagcgcgattgaaacccgccagagcgacattcgcgtcatcatcgtccctaacgatgagatgcaaaccccgcactactccgtactgcgcgtgcgtaaaggcgaagaaacctccacgctgagctatttgctgccgaaactgcacgaagaagagatggcgatgccgtctgacgaagaaccggctgaacgcaaacgccgcgaagagccagcgctggctgctttcgtgatgccggatgcgccgcctgcgccggtacaggaagaaaccgcagccgcgccgaccgcagcgaaagccgccgctgctccggcagcgaaggtagcaacgcctgcccagcctggtctgctgtcccgcttcttcggcgcgttgaaaaacatcttctccggcgcagaagaagctaaaccggccgaagtcaaagccgagcaaaaaactgaagagaaacctgagcgtcagcaagagcgccgtaaaccgcgttctaataatcgccgcgaccgtaacgaccgtcgtgataaccgcgataatcgtgacaaccgtgataatcgtgataatcgcggagaaaacacagaaggtcgcgaacctcgtgaatcacgcgaggagaaccgccgtaatcgtcgtgacaaacaatcacagaacgctgaactgcgcgaatctcgccaaaacgcgggcgatgagtctgataaaggcaaatcacgcgatgagcaacagcaaccgcgccgtgaacgcaaccgccgtcgtaatgatgacaagcgtcaggcacagcaggaagcgaaaactcagacccgcgaagaaccggtagtacagcaggaaaccgagcaggaagagcgcgttcagagcatgccgcgtcgtaagccgcgtcagctggcgcagaaagtccgctttgaatccgcagaaaccgagcaggttgtcgaagccgttgctgagcagcaggcggaatccactacgccgcgtacggaactggcaaaagtcgatctgccggccgtcgttgaaactgccgctgagcaggatgaaaacggcgacgctcgtgaatctaacggtatgccgcgtcgctctcgtcgttctccgcgccacctgcgcgtaagcggccaacgtcgccgtcgttaccgcgatgagcgttatccgacccagtcgccgatgccgctggccatcgcctgcgcgtcgcctgagctggcgtcaggtaaagcgtggatccgctatccgattgcccgtacgcatgatcagcagcaggaagagttaccggtacaggaaaccgccaacgttgagcctatcattacaccagtcgtcgcggagactatcgctccggttgtcgttgcggaaaccgtcgcagctgaaactgtcgcaccggcagtggccagcgaaccgaccgcagaagcaaccgtcgttgaagccccggtcgtcgaagaaacggcggtggttgaagagaccgcagttgttgcagaaaacgttgtgccgcaggcagaagtcagtgagccagcagagccggtagtcgaagaaactgagaccgcacctgctccagctactgaagaaaccgtcactgcgcagccaacgattgccgaagaagaaaccgctgttgtcgaagaaacgaccgttgccgccgttgaagaagccgcaccggttgttgaaccgacgccggtcgtcagcgccgcgccagtggtgaaagcacaaccggtaaccgccgcgactcgccacgcgaccgcgccaatgacccgcgcgccggctccggaatacgtgccggaagcgccgcgccaaagcgattgggttcgcccaccgtttgcctttgagggtaaagggtccgcaggcggccatagcgccactcaccaggccgcggcggaagcaacccgtccgcaacctgtagagtaa

SEQ ID NO: 88282 - DNA, 996 bp, Enterobacter aerogenes
atgagtggcgctaatgccctcggctatttagaatcgccgaccatgaaaactgagactccaaccgtaaaaatggttgccatttccgccgatgaagcggggcaacgtatcgacaactttttgcgtacgcaacttaaaggcgtaccgaagagcatgatttatcgcatcctgcgtaaaggcgaggtgcgggtgaacaaaaaacgcgtcaagccggaatataaactggaagatggcgatgaagtgcgtatcccgccggtgagggtcgccgagcgcgaagaagaggccgtttcgccgcatctgcaaaaagtggcggcgctgtcggatgttatcctctatgaagacgatcatatcctggtgctgaataaaccttccggtaccgcggtgcacggtggtagcggtctgagcttcggcgtgattgaagggctgcgggcgctacgccctgaggcccgtttcctggaactggtccaccgtctcgatcgtgatacctcaggcgttctgctggtagcgaaaaaacgttcggcgcttcgctcgcttcatgagcaactgcgtgagaaagggatgcagaaggattatctggcgctggtccgcggtcagtggcagtcgcacacgaaggtggtacaagcgccgctgctgaaaaatattctgcagagcggcgagcgcatcgtgcgcgtgagccaggaaggtaagccttccgaaacgcgctttaaagtggaagagcgttacgcgtttgccacgttggtacgctgtagcccggttaccgggcgtacgcatcagattcgcgttcacacgcagtatgcgggacatcctattgcttttgacgatcgttatggcgatcgcgagtttgacaagcagctttcagggacaggtttaaaccgtctgtttttgcatgcggcagcgctgaagttcactcatccaggcaccggtgaagtgatgcgtattgaagcgccgttggataaccaactgaaacactgcttgcaggttttgcgcaatagcaaataa

SEQ ID NO: 88283 - DNA, 585 bp, Enterobacter aerogenes
atgtctaatcttctcctggcctcaacctcgccgtggcggcggatgctgctggaaaaactcacgctgccgttcgaatgcgcggcgccggaggttgacgaaacgcctcagcccggcgaatccgcccgccagttggttgtgcgtctggcgcaagccaaagcccaggcgctggcatcccgcttccctcagcaccttattataggttccgatcaggtttgcgtcttagacggcgaaatcaccggtaaaccgcacactgaagaaaacgctcaccgtcagctacgcaaagccagcggcacgattgtcactttttataccgggcttgcgctctacaattccgccaacggacacctgcaaacggaatgcgaacccttcgatgtccattttcgtcatttaagcgatcaggagatcgaggcctatatccgtaaagagaaccctctgcagtgtgccggcagttttaaaagcgaaggcttaggcatcacgctatttgagcgactggaaggacgcgatcctaattcgctggttggattaccgctgatagcgctatgccagatgttgcgccgggaaggctttaacccgctgcttagctag

SEQ ID NO: 88284 - DNA, 522 bp, Enterobacter aerogenes
atgcaaaaggtaaaattacccctgactctcgatccggttcgcacggctcaaaaacgccttgattacgagggtatctacgcccgtgatcaggttggccgtgtcgccgattcagtcgtcagcgtggacagtgatgtggaatgcagtatgtcgttcgctatcgataaccagcgtctcgccgttattaccggtgatgcgaaggtgtcggtaaccctcgaatgtcagcgttgcgggaaaccgttccctcatcatgttcacacaacgtattgtttcagccctgtcagaaatgacgaacaggcagaagcactaccggaagcgtatgagccgattgaggttaacgaattcggtgaaatcgatctgcaggcgatggttgaggatgaaatcattctttccttgccggtagttccggtgcatgattctgaacactgtgaagtgtccgacgcggacatggtctttggcgaactgcctgaagaggcacaaaaaccaaacccatttgccgtattagccagcttaaagcataagtaa

SEQ ID NO: 88285 - DNA, 174 bp, Enterobacter aerogenes
atggccgtacaacagaataaaccaacccgttccaaacgtggcatgcgtcgttcccatgacgctctgaccgcagtcaccagcctgtctgtagacaaaacttctggtgagaaacacctgcgtcaccacatcactgccgacggtttctaccgcggtcgcaaggtaatcgctaagtaa

SEQ ID NO: 88286 - DNA, 843 bp, Enterobacter aerogenes
atgcgcctggcgctggagctggtgaaagaagggcgagccgaagcctgcgttagcgcgggaaataccggcgcgctgatggggctggcgaaattattgcttaagcccattgaggggattgagcgcccggcgctggtgacggttctgccgcatcagcaaaagggcaaaacggtagtgctggatttaggcgctaacgtcgattgcgacagtacaatgctggtgcagttcgccgtaatgggcgcagtgttagctgaagaagtggtggggattaaaaacccacgcattgcgttgttgaatatcggtgaagaagagatgaaaggtctcaccagcattcgcgatgcgtcggcaatgctcaaaaaactgccgtccttcaactatattggttaccttgaagctaacgaactgttgacggggaaaacggatgttctggtttgtgacggattcacaggcaacgtcacattaaagacgatggaaggtgttgtcaggatgttcctttcgctgctgaaatcacagggagagggaaaaaaacggtcgtggtggctgattttattaaagcgttggttacaaaaaagcctgagcaggcgattcagtcacctcaaccccgaccagtataatggcgcctgtctgttaggattgcgcggttctgtgatcaaaagtcatggcgctgccaaccagcgcgcattttgcgtcgcaatagagcaggcagtgcaggcggtgcagcggcaggttccacagcggatcgccgctcgcctggaatcgttatacccagcaggctttgaactgccagggagcagcagcggtaacgggaatgcccgacagcacaccgggaccaacggatacgactga

SEQ ID NO: 88287 - DNA, 954 bp, Enterobacter aerogenes
atgtatacaaagattattggcaccggcagctacctgcctgagcaagtgcgtactaacgccgacctggaaaaaatggttgaaacgactgacgagtggattgtcacacgtacaggtattcgtgaacgccgtattgccgcagcgaacgagacagttgctacgatgggcttcgaagccgcaaagaaagcgctggaaatggcgaatgtcaacccggaacaaattggtctgatcgttgttgcgaccacctcgggtactcatgccttcccgagctctgcgtgccagattcaatctatgctgggtgtcaaaggctgtccggcgtttgacgtcgcagctgcctgcgcgggcttcacctacgcgttgagcatcgccgaccagtatgtgaaaaacggcgccgtagattacgcgctggtgattggcgccgacgtgctggcgcgcacctgcgatccaaccgatcgcggcacgatcattatcttcggcgacggcgcgggcgcagtggtgcttggcgcttctgaagagccaggcattatttccacgcatctgcatgccgatggccgctacggtgagctgttaacgctgccgaacgccgatcgcgtagagccggaaaatccgatttatctgacgatggccggcaacgaagtgtttaaagttgcggtcaccgaactggcgcatatcgttgacgagacgctggcggccaataatcttgagcgctcggcgctggattggctggtgccgcaccaggctaacctgcggatcatcagcgcgacggcgaaaaagctgggaatgtcgatggataatgtggtggtcacgctcgatcgtcacggtaacacttctgccgcctcggtcccttgcgcgctcgatgaagccgttcgcgatggccgtattcaacgcggccagttgattctgctggaagccttcggtggtggtttcacctggggttccgcgctggttcgtttttag

SEQ ID NO: 88288 - DNA, 930 bp, Enterobacter aerogenes
atgacgcaatttgcttttgtgttccccggacagggctctcaggctgtcggtatgctggcagatatggccgcgacctggccagttattgaagagactttcggcgaagcttccgcagcgttgggttacgatctgtgggcgcttgcccaacagggcccggcagaagaactgaacaaaacctggcaaacgcagccggcgctgctgaccgcttccgtcgcgttatatcgcgtatggcaacagcagggcggtaaagcgccggcgctgttagccggtcatagccttggcgaatactctgcgctggtctgcgcgggcgtgattaatttcgctgatgccgttcgtctggttgaactgcgtggcaaattcatgcaggaagcggtaccagaaggtaccggcgcgatgtctgcaattattggcctcgacgacgcgtccatcgctaaagcctgtgaagaatctgcacaagggcaggtggtttcgccagtgaactacaattcaccgggtcaggtggttatcgccgggcacaaagaagccgttgagcgtgcaggcgctgcgtgtaaagccgcaggcgccaaacgtgcgctgccgttgccggtcagcgtaccgtctcactgcgcgctgatgaaacctgccgctgaaaaactggcggtagagctgcagaaaatcacttttaatgcgccgaccgttccggttgtgaacaacgtcgacgtgaagtgtgaaaccgcgcctgatgctatccgcgacgcgctgattcgccaactgtacagcccggttcagtggactaagaccgttgagtttatggcatctcagggcgtcgagcacctgtatgaaatgggcccgggtaaagtcctcaccggcctgaccaaacgtattgttgacaccctgactgcttctgcgctcaacgagccggctgcgatgtctgcggcgcttgagcaataa

SEQ ID NO: 88289 - DNA, 735 bp, Enterobacter aerogenes
atgagttttgaaggaaaaatcgcgctggttaccggtgcgagccgcggtatcggccgcgcaatcgctgaaaccctcgccgcgcgcggtgcgaaagttatcggtactgccaccagcgaaagcggtgcgcaggcaatcagcgactatttaggcgccaacggtaaaggtctgatgttgaatgtgaccgacccggcatctattgaatctgttctggaaaatgttcgcgcagagtttggcgaagttgatatcctggtcaataatgccggaattactcgtgataacctgttaatgcgaatgaaagatgatgagtggaacgatattatcgaaaccaacctgtcatctgtattccgtctgtcaaaagcggtaatgcgcgctatgatgaaaaagcgtcatgggcgtattatcactatcggttctgtggttggtaccatgggaaatgctggtcaggctaactacgctgcggcgaaagcgggtctgattggtttcagtaagtcactggcacgtgaagttgcgtctcgcggtattactgtaaacgttgttgctccgggctttattgaaacggacatgacgcgtgcgctgaccgatgagcagcgtgcgggtacgctggctgcagttcctgcggggcgccttggctccccaaatgaaatcgccagcgcggttgcattcttagcctctgacgaagcgggttacatcactggtgaaaccctgcacgtcaatggcgggatgtatatggtctga

SEQ ID NO: 88290 - DNA, 237 bp, Enterobacter aerogenes
atgagcactatcgaagaacgcgttaagaaaattatcggcgaacagctgggcgttaagcaggaagaagttaccaacaatgcttccttcgttgaagacctgggcgctgattctcttgacaccgttgagctggtaatggctctggaagaagagtttgatactgagattccggacgaagaagctgagaaaatcaccaccgttcaggctgccattgattacatcaacggtcaccaggcgtaa

SEQ ID NO: 88291 - DNA, 1242 bp, Enterobacter aerogenes
gtgtctaagcgtcgtgtagttgtgaccggactgggcatgttgtctcctgtcggcaataccgtagagtctacctggaaagctctccttgccggtcagagtggcatcagcctgatcgaccatttcgatactagcgcctatgcaacgaaatttgctggcttagtaaaggattttaactgtgatgatatcatctcgcgcaaagaacagcgcaagatggatgccttcattcaatatggaattgtcgctggcgttcaggccatgcaggattctggccttgaagtgacggaagaaaacgcaacccgcatcggcgccgctatcggttccggtatcgggggcctcggcctgatcgaagaaaaccatagttcgctggtaaatggcggaccgcggaagatcagcccgttcttcgttccgtccacaattgttaacatggtggccggtcatctgaccatcatgtttggtctgcgtggaccgagtatctccatcgcgaccgcgtgtacttcaggcgtacacaacatcggccacgcggcgcgtatcatcgcttacggtgatgctgacgcgatggttgccggtggtgcagagaaggcgagtactccgctcggcgtaggtggctttggcgctgcgcgcgcactgtctacccgcaatgacaacccgcaggcggcaagccgtccgtgggataaagagcgtgatggcttcgtgctgggcgacggcgcgggtatggtcgtgctggaagagtacgagcatgcgaaaaaacgcggcgcgaaaatctacgcagagatcgttggttttggtatgagcagcgatgcgtaccatatgacgtctccaccggaagatggcgctggcgctgcgctggcgatggttaacgccattcgcgacgcggcgattgaaccgggccagattggctatgtcaacgcccacggtacttcgacgccagccggtgataaagcagaagcccaggcggtgaaatccgtgtttggcgatgcggcaagccgcgtgatggtgagctccaccaaatcaatgaccggccacctgttaggcgcggctggcgcagtagagtctatctactctattctggcgctgcgcgatcaggcggttccgccgaccatcaacctggataacccggatgaaggttgcgacctcgacttcgttcctcatgaagcgcgtcaggtttccggtatggaatacaccttgtgtaactccttcggctttggcggtactaacggttcgattatcttcaaaaaagtatga

SEQ ID NO: 88292 - DNA, 810 bp, Enterobacter aerogenes
atgttcttgataaatggtgtcgagcaggatgtgctggcagcaaacgaccgtgcaattcaattcggtgatgggtgttttaccacctcgcgaatcatcgacggccagatagccttcttcaatgcccatttgggccgcttgcaagatacttgcgaaaaactcttgatacctttttctgaatgggaaacgttggccgcagaaatgcaagaactggcaaagccacatcgagaaggcgtactcaaagtggtcataacgcgtggttcaggaggtcggggatatagcgcgagcggatgcattcaacctacccgcatgatgagtgtgtcgtctttccccgcgcattatgcgcgttggcgagaagagggaataaccctggcgttaagcccgatccgcctggggcgcaatccttcgctggcggggctcaaacatcttaatcgcctcgaacaagtcttaattcgttctcatcttgagcagacggacgccgatgaggcgctggttcttgacagcgacgggtggcttacggaatgctgtgccgcgaatgtgttctggcgtaaaggaagccaggtgttcacgccgcgcctcgatcaggcgggcgttaatggcattatgcgccagcactgtatggctatgttggcacgttcttcttttgatgttgtcgaagtatccatgcgccctgatgtactgcgcgatgccgatgaagtgctgatttgcaatgcgcttatgccgctggtaccggtttgtcgttgggatgacgtctgttggtctgaacgcgatctttaccattttttagccccattgtgtgagctgcctggttag

SEQ ID NO: 88293 - DNA, 1023 bp, Enterobacter aerogenes
atgaagaaaatgttacgttttgtcctgctgttagtcgtggtgttcggtattgccgcagcggcaggtatgtggaaagtccgccaactggcagatagtaagttgcttattaaagaagagaccatcttcacccttgagccaggaaccgggcgagtggtgcttggccagcagctgtatggcgataaaatcattaatcgtccacgcgtattccagtggctgctgcgcgtcgaacctgaactttctcatttcaaagcgggtacctatcgcttcacaccgcaaatgacggtgcgcgagatgctgcagcttttagcgagcggtaaagaagcgcagttcccgctacggtttgttgaagggatgcgcgttagcgactatttgcgtcagctgcgcgatgcgccgtatgtgaagcacactttagaagacgacagttacgaaacggtcgccaaagcgctgggtcttgagcacgccgattgggttgaaggttggttatggccggatacctggatgtacaccgccaataccagcgatatcgccattcttaaacgcgcgcaccagaaaatggtcgctgcggtagcgaaagcctgggaagggcgggcggataatctaccctataaagatcaaaaccagttactgaccatggcctctatcgttgagaaagagaccgcggttcctgccgagcgcgatcgcgtggcgtcggtctttatcaaccgtctacgcattggcatgcgtttgcagaccgaccctaccgtaatttacggcatgggagagcgctataatggtaaactgtcgcgtaaagatctggagacgccgaccgcctataacacctatgtgattagcggtatgccgcctggacccatagcggttcctggtgaagcgtctctcaatgcggcagcccatccggctaaaacgccgtacctctattttgttgccgacggaaaaggcggccatacgttcaataccaatctggccagccataaccgttcggttcaggactatttaaaagtacttaaggaaaaaaatgcgcagtaa

SEQ ID NO: 88294 - DNA, 642 bp, Enterobacter aerogenes
atgcgcagtaactatatcgtcatcgaaggcctggaaggggcggggaaaaccaccgcacgcaatctggtcgttgagacactcgaacagctgggtatccgcgatatggtgtttacccgtgaaccgggcggtaccatcctggctgaaaaactgcgcagcctggtgctggatatccagtctaccggcgatgaagtcattaacgataaagcggaagtgctgatgttttacgccgcccgcgtacagctggtggaaacggtgattaagcctgctctggctcgcggtcaatgggtcattggcgaccgtcacgatctctcaactcaggcctaccagggcggggggcgcggtatcgatcaggggatgctggcgacgctacgcgatgcggtgctcggtgattttcgccctgatttaacactttatcttgacgtgacgccggaagttggccttaagcgcgcccgcgcccgaggcgatctggatcggattgagcaggagtcgatgaatttcttcaatcgtacccgcgcgcgctaccttgaactggcggctcaggatccgactatccgcacggtggatgcgacgcagcctctggaagcggttgagcgcgacattcgcgccgttatcactcaatgggttgcggagcaacgcgcatga

SEQ ID NO: 88295 - DNA, 1005 bp, Enterobacter aerogenes
atgaaatggtatccgtggttacgcccgtccttcgagcagctagtggctggctatcaggcaggacggggtcaccatgcgttattactccaggcattaccggggatggggggcgatgcgcttatctacgcgttatgccgtttcctgatgtgccgccagccggaagggcataaaagctgtggccattgtcatagctgccagcttatgcaggcggggacccatcctgattactacactctggttccggagaagggcaagagcgcgctaggcatcgatgcggtgcgcggcatcactgaaaaactctatgagcgtgcgcgtcttggcggcgcgaaggtggtgtggatcaacgatgcgacgttgttaaccgatgccgccgccaatgctttgctgaagacgctggaagagccgccggaaaatacctggtttttcctggcctgcccggagccggcgcgtctgctcgccaccttgcgcagccggtgcttctcatatcaccttactccgccttctgaagcctgggcgttagggtggttagcacgtgaagtgacaatgtcacaagaagctttattggccgcgttgcgcctcagcgctaacgcacccgcggcagcgctggagttactgcaagaggctaactgggctccgcgacaacagctttgccaggcgttagccagcgcgttaaccagcggtgactggctgtcattattgccggttctgaatcacgaacaggccccggtgcgtctgcactggctggcatcgctgttgctggatgcgcagaagcggcaacaggggattacgcttctgagtaatccagatgcctggacgctggttaaccaactggcgcaaacactttcgggcccacgtcttgaagctatcacgtgcgatgttagcgcctgtcgcgagcagttgctgagcgtggtcggcgtcaaccgcgaactactactcaccgagcgcctcctgcgctgggaacattacctgcaacccggggcggttctgcccgtctcacatctctga

SEQ ID NO: 88296 - DNA, 795 bp, Enterobacter aerogenes
atgtttttagtcgattcccactgccatcttgatggcctggattatcaaacgctgcataaagatgtcgatgatgtgctggcgaaagccgccgcgcgtgatgttaagttttgcctggcagtcgccaccacgctgccgggatatcgcgggatgcgcgagttagtcggccagcgagaaaatgtcgtcttttcctgcggtgttcatccattgaaccaggatgaagcgtatgacttcgaagagctgcgttcgctggcggcggaagagggcgtagtggcgatgggggaaaccgggctcgattatttttataccccggaaacgaaactccgccagcaggagtctttccgccagcatatccgcattggccgcgaattgaataagccggtgattgtgcatacccgcgatgcgcgcgccgatacgctggcgattttacaggaagaaaaggtgacggattgcggtggcgtactacactgtttcactgaagacagggagacagcgggtaaattgctggacatggggttttatatttcgttttccggtatcgtcacgttccgtaacgcggagcagctacgagatgccgcgcgctatgttccgctcgatcgcttgctggtagagaccgattcgccttatctggcgccggtaccacatcgcggtaaagagaaccagccggcgatggtgcgcgatgtcgctgaatacatggcggtgctgaagggcgtgtcgctggagcagctcgcgcaacaaaccaccgataactttgccagcttgtttcacatcgaccctgccagactgcaacccgcctga

SEQ ID NO: 88297 - DNA, 1434 bp, Enterobacter aerogenes
atgtttaagaatgcatttgctaacctgcagaaggtcggtaaatcgctgatgctgccagtatccgtactgcctattgcaggtatcctgctgggcgtcggttctgccaacttcagctggctgccagccgtggtctcccacgtcatggcggaagcaggcggttcagttttcgccaatatgccgctgatcttcgcaatcggtgttgcgcttggcttcaccaataacgacggtgtatccgcactggctgcagtcgtagcttacggcatcatggtgaaaaccatggcggtagtcgcgccgctggttctgcatttacctgctgaggaaatcgcagccaaacacctggctgatactggcgtgcttggcggtattatctccggtgcgattgcagcctacatgttcaaccgcttctaccgtatcaagctgcctgaatatctgggcttcttcgcgggcaagcgttttgtgccgattatctctggtctcgccgctatcttcaccggcgtgatcctgtccttcatctggccgccgattggctccgccatccagaccttctctcagtgggctgcttaccagaacccggttgtggcgttcggtatctacggtttcatcgagcgttgcctggtaccgtttggtctgcaccatatctggaacgtacctttccagatgcaaattggtgaatacaccaacgctgcaggtcaggtgttccatggcgacatccctcgttacatggcaggcgacccgactgctggtaaactgtctggcggcttcctgttcaaaatgtacggcctgccggctgcagctatcgcgatttggcactctgctaaaccagaaaaccgtgccaaagtcggcggtattatgatctccgcggcgctgacctcgttcctgaccggtattaccgagccgatcgagttctccttcatgttcgttgcgccgatcctgtatatcatccacgcgattcttgcaggcctggcattcccgatctgtatcctgttgggtatgcgtgacgggacgtcgttctctcacggtctgatcgactttatcgttctttccggcaacagcagcaagctgtggctgttcccgattgtcggtatttgctatgcgatcgtgtactacgtggtcttccgcgtgctgattaaagcgctgaacctgaaaactccaggccgtgaagatgcaactgaagacagcaaatccgctgcgaccagtgaaatggcgccggcgctgattgccgccttcggtggtaaagagaacatcacaaacctcgacgcatgtattactcgtctgcgcgtaagcgtggctgacgtagcgaaagttgatcaggctggcctgaaaaaactgggtgctgctggcgtagttgttgcaggttccggcgttcaggctattttcggcaccaagtccgataacctgaaaaccgagatggatgagtacatccgcaatagctaa

SEQ ID NO: 88298 - DNA, 357 bp, Enterobacter aerogenes
atggcagaagaaacgattttcagcaaaatcattcgccgggaaatcccgtcggatattgtgtatcaggatgaactggtcaccgcttttcgcgatatctctccgcaggcgccgacccatattctgattatcccgaatatcctgattccaaccgtaaatgacgtcaccgccgaacacgaacaggcgctaggccgaatgatgaccgtcgcggcgaagattgcccgtgatgaaggtctggctgacgacggctaccgtcttatcgttaactgcaaccgccatggcgggcaggaagtttaccatattcatatgcacctgttgggcggccgtccgttgggcccgatgctggcgcataaaggctaa

SEQ ID NO: 88299 - DNA, 375 bp, Enterobacter aerogenes
atgcgtgctgcttattcaggcgtcctggttctggcggcgctgttggccggatgtagctcgcacccggaaattccggttggcgagcagcagacgttggtgatggaatccagcgttctggcggctggcatcagcgccgatccgccgtcggtgaccgcttcggaaattcaggccaccgctacctcaagattatttaatgaacggcaagagcccattaccgtgcactaccgttttttctggtatgacgcccatgggcttgagatgcatccgctggaccctgcgcgtagcgtgacggttccagcacgctcgtccgtcgtgctctacggcagtgccaatattctcggggcgcacaaagcccgcctttatctttatctctaa

SEQ ID NO: 88300 - DNA, 648 bp, Enterobacter aerogenes
atgattaaaatgtgtcgctatgcgttaatcacagcactggcgatattcctggctggctgtgtggggcaacgtaatgaacctgcgccggtcgaggaggcgaagccgaagccggaacaacctgcgcagccccagccgacggtgcctgccgtgccgacggtgccaacgcagccggggccgatcgaacacggcggcgaacagccatcgcagccgtctcagcctgctccgcgcgttcgtcactacaactgggacgccgccgtacaaccaatggtcggccagatgctgcaggccggcggagtgaatgctggcagcattctgttggtggatagcgtcaataaccgcaccaacggatcgctgaacgcggccgaagcgacctccgcgctgcgcaacgcgctggcgggcaacggcaagtttacgctggtatcgactcagcagcttgcggtggctaaacaacagctgggcctgtcgccgcaggatagtctcggcagccgcagcaaagcgatggggattgcgcgcaccgttggcgcacagtacgtgctgtattccaacgccaccggcaacgtgaatgcgccggagctgaaaatgcagctgatgctggtgcagtccggcgagattatctggtcaggcaaaggtgcggttcagcaacaataa

SEQ ID NO: 88301 - DNA, 828 bp, Enterobacter aerogenes
gtgcggttcagcaacaataagcttacgcgcgacgagctcttgtcgcgcttctttcctcgctattcacctgtcgccgcgttgactgaaaacggtcttagcggtggcagttgcgttatcagcgatggcgtccgccggctggtgttgcgccagcctcacgatccgctggcgccgctcagccattttctgcgccagtaccgcgcgcttcagcaccttccggcgtcgctttcgccggcgccggtgttcttttcgccacgctggatggtggtggagtattgcgcaggagaagtgaaaagcgcgctgccggagtgcccttcgcttgccgggttattgtatcatctgcaccaacagccgcgttttggctggcgcatcgagctggcaccgttgcttgagttgtactggcagcagtgcgatccgaccaggcgcaccgttttctggctgcgctggcataaacggttattgcgccagcgtgaaccgcggccgttgcgtttagcgcctctgcatatggacgtccacgctggtaatattattcatagccgcgacggtctgcgcttgattgactgggagtatgcgggagacggcgatatcgcgcttgaactggcggcggtatggtgcgatgcccatacgcgttgccagctgctcaatgagtattcgcgctttgcccgaattgataagcagcaactgcggcggcaaatacagcgttggcggccgtgggtacttatattgatggcgggctggtatgagcggcgctggcagcagagcggcgaccggcaatttattgcactggcggatgcgacatggcgtcagttaaaaacagaaaataaaggataa

SEQ ID NO: 88302 - DNA, 1023 bp, Enterobacter aerogenes
gtgggtccggtaatgttggatgtcgaaggttttgaactggatgcggaagagcgtgagattctggctcatcctttggtcggcggcttaattttgtttacccgcaactaccacgatccggcgcagttgcgcgaactggtacgccaaatccgcgaggcctcgcgtaatcatctcgtggtggcggtggatcaggaaggtgggcgtgtgcagcgctttcgcgaaggttttacccgtctgccggccgcgcagtcttttgccgcgctgctgggggtggaagagggcggtaagctcgccgcagaagccggttggctgatggccagcgaaatgattgccatggatattgatatcagcttcgcgccggtgctggatgtggggcacatcagcgctgcgatcggcgaacgctcatggcatgaagacccgcaaaaggcgctggtgatggcgcgtcatttcattgacggtatgcatgccgccggtatgaaaaccaccggtaaacacttcccgggccacggcgcggtgacggcggattcacacaaagagacaccgtttgatccgcgtccggcagcggaaatccgtgctaaagatatggcggtgttcaagagcctgaccgatgaacaacgcctggatgcgattatgccggcgcatgtgatttactctgacatcgatccgcgcccggcgagtggttcagaatactggctgaaaacggtgctgcgcggcgagctgggctttgatggcgtcatcttctcagacgacctgtcgatggaaggggcggcgatcatgggcagctatgctgaacgtgggcaggcatcgctcgatgccggttgcgatatgatcctggtctgcaataatcgtaaaggcgcggtgagcgtattggataacctgtccccgatcaaagcagagcgtgttacaaaattgtatcataaaggttcatttacccgtcaggaactgcgagattccgctcgttggcaaacggtaagcgcacagctggaacagctccatgcgcgctggcaagaagcgaagtctgcgtag

SEQ ID NO: 88303 - DNA, 543 bp, Enterobacter aerogenes
atgattatctatttacacggttttgactctaacagccccggtaaccatgaaaaggtgctgcagctgcagtttatcgaccctgacgtgcggttgattagctacagtacgctccatccaaaacatgatatgcagcatttgttgaaggaagtcgacaaaatgctgcagctcactgccgacgatcggccgctcatatgcggcgtcgggttaggcggttactgggcggaaaggatcggtttcctctgcgatattcggcaggccgtgttcaacccgaacctgttcccctacgagaacatggaagggaaaatcgacaggccggaagagtatcaggatatcgccaccaagtgcgtgaacaacttccgcgaaaaaaatcgcgaccgctgcctggtgatgctatcacgccatgatgaggcgctggatagccaacgctcggctgaagtgctgcatcattattacgaaatcatctgggatgaagaacagacgcacaaatttaaaagtctttcaccgcatctgcagcgaataaaggcttttaagaccctcggctaa

SEQ ID NO: 88304 - DNA, 1305 bp, Enterobacter aerogenes
gtgactacgccattgaaaagaatcgttattgtaggtggtggtgccggcggactggaactggctactcagttgggtagaaagctgggccgcaacaaaaaagcgaaaattacgctggtggatcgcaaccatagccacctgtggaagccgctactgcatgaagtggcgaccggttctctggatgagggcgttgatgcgctgagctacctggcgcatgcgcgtaaccacggtttccagttccagttaggatcggtggtggatatcaatcgcgaaggaaagaccattactctcgcggaactgcgcaacgagaaaggcgagctgttggttgccgagcgtaagctgccgtacgacacgctggtgatggcgctgggtagtacctccaatgactttaacacgccaggggtgaaggaaaactgcattttccttgataacccgcaccaggcgcgccgtttccatcaggaaatgcttaacctgttcctcaagtattctgcaaacctcggcgccaacggtaaggtcaatatcgccatcgttggcggcggggctaccggggttgagctgtccgccgagctacataatgcggtgaaacagctgcatagctatggttacaaagggttgaccaacgaagcgctgaacgtgacgctggttgaagccggcgaacgtattcttccggcgctgccgccgcgcatttccggcgccgcgcacaatgaactgactaagcttggcgtacgtgtcctgacgcagaccatggtgaccagcgcagacgttaacggcctgcacactaaagatggtcaatttattgatgccgacctgatggtgtgggcggcgggcatcaaagcgcctgatttcatgaaagagattggcggcctggagaccaaccgcattaaccaactggtggtggagccgacgctgcagacaacgcgtgatccggatatctacgctatcggcgattgtgcctcatgcgctcgtccggaaggcggctttgtacctccacgcgcccaggcggcgcaccagatggcgacctgcgcgctgaataacattctggcgcagatgaaaggtaaagcgctgaaaccgtatgtctataaagatcacggttcactggtctccctgtcgaactactccaccgttggcagcctgatgggtaacctgatgcgtggctcgatgatggttgaagggcgaattgcgcgcttcgtgtatatctcgctgtaccgcatgcatcagattgcgttacacggctatttcaagaccggcctgatgatgttggtaggacgtattaaccgcatcattcgtccgcgtctcaagctgcactaa

SEQ ID NO: 88305 - DNA, 540 bp, Enterobacter aerogenes
gtgaataaatcaatgttggcgggtattgggattggcgttgccgccgcgttgggcgtcgccgccgttgccggtctcaatgtattagatcgtggcccgcaatatgcgcaagtggtgtccagtacgccgataaaagaaagcataaaaacgccgcgccaggaatgccgtaacgtgaccgttacccatcgtcgtccggtgcaggatgaaaaccgtattgccggttccgttctcggcgcggtcgccgggggcgtgattggccaccagtttggcggcgggcgagggcgtgatgtcgctaccgtggttggcgcgctgggcggcggctatgccggtaaccaaattcagggctcgatgcaggataacgacacctataccaccacccagcagcgctgtaagacggtttacgacaagtcggaaaaaatgctcggttatgatgtcacctataaaatcggcgaccagcagggcaaaatccgcatggaccaccagccgggggcgcaaatcccgctggacagcaacggtcagctgattctgaataacaaagcgtaa

SEQ ID NO: 88306 - DNA, 2190 bp, Enterobacter aerogenes
atgaacaagcgcctctggctgctcaatcctctgctgctggccaccgccctgccagcctttaccgcgcaggccgccgatgaagatgatattatcgtcagcgccaaccgtaaccaccgtaccgtcgccgagatggcgcaaaccacctgggtgattgaaggccaggagattgagcaacaggttcagggtggtaaagagtttaaagatgtcctcgcgcagctgatccccgggatagatgtcagcagccaggggcgtactaactacggcatgaacatgcgcggacgcgccatcgtcgtgctcatcgacggcgtgcgtctcaattcatcgcgtaccgatagccgccagcttgatgccatcgatccgtttaacatcgaacatattgaagttatttccggcgccacgtcgttatacggcggcggcagtaccggcggtctgattaatatcgtcacgaaaaaaggccagcaggaacgccaggtggatctagagctgggtggtaaaaccggctttgccaatagcaacgatcatgatgaacgagtagcggcggccgtcagcgggggtaccgatcatgcttccggccgattgtcggtggcctatcagcgcttcggcggctggtatgacggcaacaatgacgcgctgatcctcgataatacgcaaaccggcttacagcattcggaccgactcgacgtgatgggtaccggaaccatcgaaattgatgaccagcgccagctccagcttgtcacgcagtactataaaagccagggcgatgattatggtctgaatttgggcaaagatatgtctgcggtacttggcgaaagtaaagcctggacctctaacgggcttaactccgatcgcgtgcctggtaccgagcgtcatttgatcagtctgcaatactccgacgccgacttcttcggccagaatctggtcagccagatttattaccgcgacgaatcactgaccttctaccccttcccggccctgagcaaagggcaaatcagcagtttttccgcttcacagcaggataccgatcagtacggcgctaagatcaccttcaacagccagccgctgacgggatgggatctgacctggggcgttgatgccgaccatgaaaccttcaactccaaccaaatgttcttcgacctggataaagcaatggcttccggcggcctgaataatcagtcagcctacaccaccggccgctatccaggctacagcatcaccaatctcgcgccgttcctgcaaaccagctatgacctgaacgacatcttcacccttagcggcggcgtgcgctatcaatggacggaaaaccgcgtcgatgattttgtcggctacgcgcagcagcaggatgtcgctaaaggcaaatatcagtcggcggatgccattcctggcggtaagaccgattatgataacttcctctttaatgccgggatcgtcgcccacattaccgaacgccagcagacctggtttaacttctctcagggcgtcgaactaccggatccgggcaaatattacggtatcggcagctacggcgccgcggtcgacggccatctgccgctggtctcgagcgttaacgtcggcgactcgccgctacaggggatcaaagttaactcctgggagctgggctggcgttacaccggcgacaacctgcgcacccagcttgccgcttattactcgacatcagacaaaaccatcgtagttaaccgcagcgatatgaccattgatgtgcaatcggataaacgacgcatttacggcgtggaaggcgcggtggactacttcgtgcctgatagcgactggagcctgggcgctaacttcaacgtgctgaaatcgcaagtaaaaaccgatggcagttggcagaagtgggacgtcaccctggcctcgccgtcgaaagccaccgcctgggtcggctgggcgccggacccgtggtcgctacgcgtgcaaagccagcaggtatttgatttaagcgatgccagcggcaataagcttgatgggtacaataccgtcgattttatcggtagctatttgctgccggtgggtaaactgacctttagcatcgaaaacttgctgaacgaagattacgtcaccatctggggacagcgcgcgccgctattgtacagtccaacctatggcagcgccgggctgtacgaatataaaggccgtggccggaccttcggcctgaactacgcgttaacgttctaa

SEQ ID NO: 88307 - DNA, 636 bp, Enterobacter aerogenes
atgacaactgacgttcaaagttgcgcaaaaaaaagccgtggccgacctaaagtgttcgacagggacgcggcgctggacaaggccatgacacttttctggcagcacggctatgaagcaacttcgctggccgatctcgtcgaagcgaccggtgcgaaagccccgacgctatacgccgagttcgtgaacaaagaaggcttattccgcgcggtgctggatcgctacatttcccgcttcgccgccaaacacgaagccctgctattcgatgaccacaaaaccgtcgatcaggcgctgcgcgactatttcaccgctgtcgccacctgctttaccagcaaagataccccggcaggctgttttatgattaacacctccgcggcgctggccgcctcttcaaccgatatcgccaacaccattaagtcgcggcacgcggtgcaggaacaaacgttgacgcaatttttacagcagcgtcagcaacgcggcgaactccctgcgcagggcaatgtcttgcagctggcgcagtttttaaactgcatgctgcaaggaatgtcgatcagtgcgcgcgaaggcgctgattttgccaccctgaaacagattagtgacacgacgctgcgcctgtggccgcaaatcctgcaaccttaa

SEQ ID NO: 88308 - DNA, 258 bp, Enterobacter aerogenes
atgaaaaacgtccaaaaactggcacttgctgccgtactgagctcactctcattcgcaagtttcgccgctgttgaggtgcaatccaccccagcaggtcaacataaaatcggtaccgtttccgcatccgccggcaccaatctgggttcgcttgaagagcagctggcgcagaaagccgacgagatgggggcgacctcttaccgtattacctcggtaaccggtcctaataccctgcacggtaccgcagttatctataaataa

SEQ ID NO: 88309 - DNA, 960 bp, Enterobacter aerogenes
atgataaatatctcgcgtgtttcaacctggcttacggcattcgctctcgcggtgacgctggcccttcccgcccgcgccaatacctggccgttaccgccgagtggtagccgtctggtcgggcagaatcagtttcatgtagtgcaggataacggcggatcgctggaagcgattgccaaaaaatacaacgttggttttctcgcgctgctgcaggctaatccaggggtcgatccttatgtgccgcgcgccggtagcgtactgaccatcccgctgcagacgctgctgcctgacgccccccgtgaaggtctggtgctcaatatcgccgagctgcgcctgtactactatccacctggacagaatagcgtgaccgtttatccgatcggtatcggccagcttggcggcgataccctgaccccgacgatggtcactaccgtttccgataagcgcgccaaccccacctggacaccaaccgccaacatccgcgcgcgatataaagcgatggggatcgatttgccagccgtagtccctgccgggccgaataacccgatgggacatcacgcgattcgtctcgcggcctatggcggcgtctatctactgcacggcaccaacgccgattttggtatcgggatgcgcgtcagttcaggctgtatccgcctgcgcgatgctgatataaagtctctgtataacaaaatcacgccgggcaccagggtgaatatcatcaacgaacctatcaaagtttcggtagagccaaacggtacccgtctggtggaagtccaccagccgctgtccgaacatatcaatgacgatccgcagacgctgccaatcgtcctgaatgccggcatgaagaattttaaacaggcaccgcagaccaatcagcaggtgatggaatacgcgatggagctacgctccggaatgccggtcgatgtgacccgccatcagcttcccgctgagcaagccatgtag

SEQ ID NO: 88310 - DNA, 3447 bp, Enterobacter aerogenes
atgcctgaacaatatcgctatactctgccggtcaaagccggcgatcagcgccagcttggcgaactcaccggcgccgcctgcgccacactggtagccgaaatggccgaacgccatcatggcccggtggtgctggtggcgcctgacatgcaaaacgccctgcgtttgaatgatgaaatcaagcaatttaccgatagcatggtgatcggcctcgctgactgggaaaccctgccctacgatagcttttcgccacatcaggatattatctcttcgcgccttgcgactttataccagttgccaaccatgcagcgcggcgtgcttatcgttccggtcagcactctgatgcagaaggtctgcccgcataattatctgcacggtcacgcgctggtaatgaaaaaagggcagcgtctgtcgcgcgatgcgctacgcacgcagttggacagcgccggttaccgccatgtcgatcaggtaatggaacacggcgaatacgcgacccgcggcgccctgctcgacctcttcccgatgggcagcgagcagccctatcgcctcgatttctttgatgacgaaatagacagcctgcggttattcgatgttgatagccagcgtactctggaagaagtcgaggccatcaatttgctgccggcgcatgagttcccaaccgaccaggcggcgatcgaactgttccgcagccagtggcgcgatcgctttgacgtgaagcgcgatccggaacatatctaccagcaggtaagcaaaggtaccctgcccgccgggatcgaatactggcaaccgctgttcttcaacgagccgctgccgccgctgtttagctatttcccctccagtacgctgattgtgaataccggcgatctggagcacagcgccgagcgtttccagaatgaaacccgcgcccgctttgaaaaccgcggcgtcgatccgatgcgcccgctgctaccgccggaacaactgtggctgcgcagcgacgaactttttagcgagctgaaaaaatggccgcgggtccagttaaaaaccgagcgtctggcggagaaagccgctcatactaatctcggctatcaacccctgcccgagttggcgattcaggcgcagaataaagcgccgctggacaacctgcgacgcttccttgaatccttcagcggcccggtgattttctccgttgaaagcgaaggccgccgcgaggcgctgggcgagatgctggcgcgcatcaaagttgcgccaaaacatatattgcgcctgcaggaagccagcggaaatggtcgtttcctgatgatcggcgccgccgagcacggatttatcgacagccaggctaatctggcgctgatttgcgaaagcgatctgctgggcgaacgcgtcgcccgccgtcgtcaggattcccgccgtaccattaaccccgatacgctcattcgcaacctggcggaactacatatcggacagccggtggtgcaccttgaacatggggtgggtcgttatgcggggatgaccaccctcgaagccgggggcatcaaaggcgaatatctgatgctgacctacgccaacgacgccaaactgtacgtcccggtatcgtcactgcatttgattagccgctacgccggcggggcggaagaaaatgcgccgctacataaactgggcggcgatgcctgggcgcgggcaaggcaaaaagcggcggagaaagtgcgcgacgtcgccgccgaactgctggatatctacgcccagcgcgcggccaaagaaggcttcgcctttaagcatgaccgcgagcagtatcaattattctgcgatggtttcccgttcgaaaccacgccggatcaggcgcaggcgatcaacgccgttctcagcgatatgtgccagccgctggcaatggaccgcctggtctgcggcgacgttggcttcgggaaaaccgaagtggcgatgcgcgccgccttcctcgccgtcgaaaaccacaaacaggtggccgtgctggtgccgaccaccctgctcgcccagcagcactacgataacttccgcgaccgcttcgccaactggccggtacgcattgagatgctatcgcgtttccgcagcgccaaagagcaggcgcagatcctcgaactggcggcagaaggtaaaatcgatattctgatcggcacccataagctgctgcaaaatgaagtcaagctgcgcgacctggggttattaatcgtcgatgaagagcaccgcttcggggtgcgtcataaagaacgcatcaaggcgatgcgcgcggacgtcgatatcctgacgctgaccgccacgcctattccgcgtacgcttaatatggcgatgagcggaatgcgcgatctgtccattatcgccaccccgccagctcgccgtctggcggtaaaaacctttgtccgcgaatatgacgcgctggtggttcgcgaggcgatcctgcgtgaagtcctgcgcggcggtcaggtttactatctgtataacgatgttgaaaatattcagaaagcggcggatcgtctggcggaactggtgccggaggcgcgaattgccatcggtcacggccagatgcgcgaacgcgaactggaacgggtgatgaatgatttccatcaccagcgttttaacgtgctggtctgtacgacaattattgaaaccggcatcgatatcccgaccgccaataccatcatcattgagcgcgccgatcacttcggccttgcccagctgcaccagctgcgcggccgcgtgggtcgttcgcaccatcaggcctacgcctggctgctcaccccgcatccgaaagccatgaccaccgacgcgcagaaacgcctggaagctatcgcttcgctggaagacctcggcgccggctttgccctcgcgacccacgatcttgaaattcgcggcgccggcgaactgctgggagaaggtcagagcggacagatggaaactatcggcttctcgctgtatatggaactgctggagaacgccgtcgatgccctgaaagagggtcgcgagccgtcgctggaagatctcaccagccagcagacggaagtggagctgcgcatgccggcgttgctgccggatgactttattcccgacgtgaacacccgtctgtcgttctataagcgtatcgccagcaccaaaaacgaacacgatctcgatgaaatcaaagtcgagctgatcgatcgctttggcacattgccggatgcggcgcgtaatttgctggatatcacgcgcctacgccagcaggcgcaaaagctggggatccgtaagctggagtgcaatgaaaaaggcggcgtgatcgagtttaacgagaaaaataatgtgaacccggtctggcttatcggtttgctgcagaagcagccgcagcattaccggctggatgggccaactcgtcttaaattcttccaggagctggatgagcgtaaaacacgtatggactgggtacgccagtttatgcgtcagttggaagaaaacgccaccgcttga

SEQ ID NO: 88311 - DNA, 1200 bp, Enterobacter aerogenes
atgtaccaacctgccgcactatttatcggccttcgctacatgcgcgggcgcgcagccgaccgcttcggccgtttcgtttcctggctttcgaccatcggcattacgcttggcgtgatggcgctggtgaccgtcctgtcggtgatgaacggttttgagcgcgagctgcaaaacaacatcctggggctgatgccgcaggctatcattagcgcccagcagggctctatcaacccgcaaaaaatgccggaaagcgccgttaagctgcagggcgtgacgcgcgtcgcgccgatcaccaccggtgatgtggtgctgcaaagcgcccgcagcgtcgccgtcggcgtgatgctgggtatcgacccggcgcaaaaagatccgctgacgccttacctggtgaacgtgaaacaaagcgatttgcaggccggcaaatataacgtcattctcggcgaacagctggcgggtcagttgggggttaaccgcggcgatcaaattcgcatcatggtgccttccgccagccagtttaccccgatgggccgtgtcccgagccagcgtttgtttaacgtcatcggcaccttcgccgccaacagcgaagtcgacggctatcaaatgctgaccaatatcgatgatgcctctcgtctgatgcgctatccactgggcaatattaccggctggcgactgtggcttagccagccgctgcaggttgacaccctcagccaacagacgctgccggaaggtaccaaatggcaggactggcgtgagcgtaaaggcgagctgttccaggccgtgcggatggaaaaaaatatgatggggctgctgctgagcctgatcgtcgccgttgccgcttttaacattattacctcgcttggcatgatggtgatggagaagcagggcgaggtggctattctgcagacccaggggctgacgccgcggcagatcatggccgtctttatggtacagggcgccagcgccgggatagtgggcgcgctgcttggcgcgctgctcggcgtgctgttggccagccagctgaataatttaatgccgattatcggcgcgtttttggacggcgcggccctgccggtggcgattgagccgctgcaggtgattattatcgctctggtggcgatggcgctggccctgctgtctacgttgtatccttcctggcgcgccgccgccacccaacccgctgaggctttacgttatgaataa

SEQ ID NO: 88312 - DNA, 702 bp, Enterobacter aerogenes
atgaataagatcctgctgcaatgcgacaacctgtgcaaacgctatcaggaaggcaacgtgcaaaccgatgtgctgcacgatgtcagcttcagcattcaagagggtgaaatgatggcgattgtcggctcttcaggctccggcaaaagtacgctactgcacctgcttggcgggctggatacgccgacttccggcgatgttattttctccggtcagccgatgagctcgctctccgccgcggctcgcgccgatctgcgtaaccgcgaactcggctttatctatcagttccaccatctgctgccggattttaccgcgctggaaaacgtggcgatgccgctgctgattggcaagaaaaaagcggcggatatcgaacgccaggcgaaagcgatgctgcaggcggtcggcctggaacaccgtagccatcatcgtccgtcggagctttccggcggcgagcgccagcgcgtggcgattgctcgcgcgctggtgaacaaaccgcggctggtactggcggatgaaccgaccggcaacctcgacgcccgcaatgccgacagtatttttgagctgctgggcgagctcaacgtggcgcagcgtaccgctttcctggtggtgacccatgacctgcagctggcgaaacgcatgaaccgccagttggagatgcgcgatggccgcctgacggctgacctgaccctgatgggggcccagtaa

SEQ ID NO: 88313 - DNA, 1245 bp, Enterobacter aerogenes
atggcttcaccgttatcgttactgattgcgctgcgttttagccgcggcagacgccgcggcggtatggtctcgctgatttccgtcatctctactatcggcatcgcattaggggtggcggtactgatcgtcggcctgagcgcgatgaacggtttcgagcgcgagctcaacaaccgcattctggcggtggtgccgcacggcgaaatcgagccggttaaccagccgtggaataactggaacgaagcgctgacgaaagttgaaaaagtgaaaggcatcgtcgccgctgcgccttatatcaactttaccgggttggtggagagcggcagcaatatgcgcgccattcaggtcaagggcgtcgatccgcagcaggagagccgcctgagttcgctaccaaactttgtgcagaacaacgcatgggccaactttaaggccggcgagcaacaggtaattctgggtaaaggcgtcgccgatgcgctgcacgtgaagcagggcgattgggtgtcgatcatgatccccaattcagattccgagcaccagctgttgcagccgaaacgcgtcaggctacacgtgaccgggattctgcaactgagcggccaactggaccatagcttcgcgatgatcccaatggcggacgcccagcagtatctggatatgggcagcagcgtgaccggcatcgccattaaagtcaccgacgtgtttcacgcgaatacgctggtacgcgacgccggcgaagtgaccaacagctacgtctatatcaagagctggatcggcacttatggctatatgtaccgtgatattcagatgatccgcgccattatgtatctcgccatggtactggttatcggcgtcgcctgtttcaacattgtctcgacgctggtgatggcggtgaaagataaaagcggcgatattgcggtgctgcgcacgcttggcgcgaaagacggcttaatccgcgcgattttcgtatggtatggtttattggccggttcggtcgggagtctgatcggggtagtgatcggtgtgatagccgcgctgaagctgacatcgattatcaacggtatcgaagcgttgatcgggcataaattcctttccggcgacatctattttattgacttcctgccgtctgaattgcactggctggatgtcgtttatgtgctggtgacagcactgttgctgagtttgctggccagctggtatcccgcccgccgcgccagtcgtattgacccggcgagggtgctgagtggccagtaa

SEQ ID NO: 88314 - DNA, 912 bp, Enterobacter aerogenes
atgtactacggatttgacattggcggcagcaagatagcattgggcgtatttgataacgcccggcaactgcagtgggaaaaacgtgtccccactccaacggaaagctatgaggctttcctgcaggctattgaagcgctggttcgcgaagccgatcggcgctttggcgtggagggcgcggtcggtatcggtatccccggcatgccggaaaccgcggagggcaagctgtatgccgccaacgtacccgccgccagcggccaaccgctgcgcgttgatctcagcgcgcgcctggggcgtgaagtgcgtcttgataatgacgccaactgctttgcgttatctgaagcgtgggatgatgaatttactcaatatccgctggtgatgggattaatcctcggcaccggcgtgggcggcgggatcgtgcttaacggcaaatcgataaccggccacagctacatcaccggcgagttcggccatattcgtctaccggtagacgccctggaagtggtggggcgcgattttccgctgacccgttgcggctgcggtcagctcggctgcatcgagaactatctttccggccgcggattcgcctggctgtatcagcatttttatcaccaatccttaacttctccgcagatcgtcgatctgtggctgcagggtgatgcgcaggcgcgggagcacgtcgagcgttatctcgatctactggccgtttgtctgggcaatatcctcaccattgtcgatccggatctgctggtgttgggtggcggattatctaattttactgctataaccgaagggctggcgcagcgcctgccgcgtcatttgcttccggtcgcccgggtgccgcgcattgagcgcgcgcgtcatggcgacgccggaggtatgcgcggtgcggccttccttcatttgactcattaa

SEQ ID NO: 88315 - DNA, 825 bp, Enterobacter aerogenes
atgctgtcgcgccgcttacatcgcttaagccgtttccgccgtaaaaaacgccagttacgcgatcgcttacggcaacgtgtcttctttggcgaagacaaaacgccgccgcaggcaatagacaaaccgcgggtggtggtgttaaccggcgccggtatttcggcagagtcggggattaaaaccttccgcgccgccgacggcctgtgggaagaacaccgggtggaggacgtggcgacaccggaaggttttgcccgcgacccggcgctggtgcaggcgttttataacgcccgccgccgccagttgcagagcgcggaaatcgcgcctaatgccgcgcatctggcgctggcgaagctggaagaggcgcttggcgatcgttttctgctggtgacgcagaatattgataatctgcacgagcgcgcgggtaaccgccgggttatccatatgcatggcgagttgctgaaagtacgctgttcgtggagcgggcaggtgctggaatggaccggcgacgtgacggtggatgacaaatgccactgctgccagttcccggcggcgctgcgcccgcacgtggtgtggtttggcgagatgccgctggggatggatgagatctacagcgggttggccgaggccgatatctttattgctattggaacctctggtcacgtttatccggcggcgggtttcgtccatgaagcccgtctgcacggcgcgcataccgtcgagctaaaccttgaacccagccaggtcggcagcgaattcgctgagaaacattacgggctggcaagcgaagtggtgcccgagttcattgataagctgctgaaagggctgtaa

SEQ ID NO: 88316 - DNA, 963 bp, Enterobacter aerogenes
atgaatgaacaagactcagattacgcgctgctcactgaaatcgcagtcgcctattacgatcgggaacagacgcaggaagagatagccaaacgtttcgggatctcgcgcatcaaagtggggcgactactgaaaaaagcgcgtcaggaaggcatcgttgagataagcgttaagtaccacccggtctttagttcgcagattgaacagcagtttatttcgcacttcgggattaaacgcgcgctgattgccctcgatcatcatgatgaagatgagcagcgccagcaggtggcggcgttggtaagcaactatcttgccggcgtgttaaagaatgatatgaccgtcaccgtcggtcaggggcggaacgtggcggccgtcgctaatcacgttggcgtattcccggagcgcaactgccgcttcatctgcggcatcggcggcaccaagcgcgataatcagctcattgacgccgaccatatcagccggaatctggcgcgcaaatttaacggctttagtgaaacgctgtatgcgccagcctatgtcgaaaccccggagctacgttcggcgtttatgcaaaaccgcctgatcaaagccacgctggagcaggccagcaaagccgacgtcgccatcattggccttggcgatatgaacgagaacagctttatggtccaactcggatggttcacaccgcaggaaatcgcttccgcgcggcaggatcagggcgtggttggcgaccttgcagggtatagctttttcaatattcagggtaagccggttgatacagtaatgaatgaccgggtgatcggcctgagcctcgagcaactgcgttccattccttgcgttatcgccattgcttcggaaagcactaaagcgacggccatcctcggcgcgctccgtaccggggttatagatgtgctggcgaccagcgcctcaaatgcccgctcggttatcaatatgcaaaaagcgctataa

SEQ ID NO: 88317 - DNA, 795 bp, Enterobacter aerogenes
atgaaaccgatatggttaggaaccagctggaagatgaacaaaccgctatcgcaggcgctagcctggtgcgaaaccctggcgcaacgtttaccgcaggtgacgcatcctgatattcaatcctttgttattcccccctttaccgccattcatcccgtcagccgctttatccagcagcaccatctgccgtgtctgaccggcgcacaaaatatgcatgaagcggagaacggcgcgtggacaggcgagatttccgccgccatgttgcaggaaaccggggcgacactggtcgaacttggccactcagaacgacgcggcgcgttcaatgagtgcgacgcggccattaaccaaaaggtgcatagcgccctgcgccatggattacgcccactgatctgcatcggcgatagcgctgatgaaaagcgctggcaggtgtctcaagaaagcgtagtgcggcagatgaaaatcgccctctatggcctgagcgatagtcaggtgttgcaaacgctggtggcctatgaacccatctgggctatcggcgaacagggtacgccggcgacgccggaacaggccgcggcggtgcatcaggcgttgcgtcaggcgctatgcgcgactttcggcgatgagaccgggcaacgtattcccctgctctacggcggcagcgtcaatctgcaaaatgcggtagaactactgcgccagccggatatcgacggcctgtttatcggccgcgcggcatgggacgccaacggctattgtgaaattgttcaacgcgttacacaggaatttattcttcaggcgcagtag

SEQ ID NO: 88318 - DNA, 1008 bp, Enterobacter aerogenes
atgtcacaagagaaaaaacccgttgttgcaatcaccatcggcgatccggcagggatcggcccggagatcaccgttgccaccatgatggacaaaggcgtctatgacgagtgcaacccttttctgataggctcggttgctatcgtcgagcgggcgatgaagatcatgggctgcgattttgccatcaaccgcattacgcatccggaacaggcccgtttccgttggggcacgctggatatcatggagactggcgaatacgactgcgacagcatcgaatggggtaaagtgcaaaaactggcgggcgagatgtcgctggattatgtgatgaaatctatcgagctggggatggcagggcttatcgatgtggtatctaccgcgcctatccataaagaggcgatcaagctggcgggctgtaaattgccgggccataccgaaatctatcaggttgagaccaaatccgactacgggctgactatgttccatgtgcataatctgcgcgtgttcttcgtcagccgtcatatggcgctgaaagccgcctgtgattacgccaacaaagagcgtgtgctggcctgtgtgcaacaaatccaccatgaatttagcgaactgaatattcgcaacccgcgcattgccgttgccgcgctgaacccgcatggctctgataacggtctgtttggtcatgaagaggccgataacctgattccggcggtgaaagcggcgcaagagctaggtatcaatgccattggcccggtaccggcggattcggtgttccatcttggtaaacagggccgctacgacgccattctctccctgtatcacgatcaggggcatatcgcctgtaagacgctcgattttgaacgttcgatcaccattaccttcggtctgccgtttatgcgcagctccgtggatcacggtacggccttcgatatcgccggtaccggcaaggcgggcaccgtcagtatgctggagtcgacgctggtggccgcgcgttactggaaaatgaagcatcaataa

SEQ ID NO: 88319 - DNA, 1719 bp, Enterobacter aerogenes
atggaaaagcatctgttgattagcaaaggcagtaaaggctggggcgggccgctgacggtaaatatcggtcaggcgaaaaagattgcgtatatcaccggtgggatgtgtcccccggtagttgagcgcctgtgtgagctgaccggctggccagccgttgatgtatttaaaaatggcgagccgccggaagcggaaattggcctgatggtgattgactgcggcggcaccctgcgctgcggcctgtatccgaaacgcgggatcccgaccatcaatttacaccccaccggaaagagcggaccgctggcggaatatatccacgaggaaatatatgtctccggggtcacgcctgccggtattgaggtggtgtggccgcagggagaaggcggcacgctgggtatcgtcgcagacgatctcaccggcgcgacgacccttggcgtcctgctggcgcgtagcggcctgaagacggcggctttctttgatacggagtccttctcgcgcaatgaggtggaatatccggccatggtggttagtagcgacagtcggccgctgccgaaagccgaagcccaataccaggtgagcgcggcggtacagcagttacaggcgcgcggcgcgcactattttaccaagcgcatcgataccaccttgcgcggcggcatcggttttgaaattgacgccatgctcgaacaactgccgctggaaacggtggcggtcgtggtgccggcgatgccgcagtcgcggcggatccttgtgggcggctattcggttattgattcagtcgcgctgtcgcgtaccgacgttgcccgcgatgtccgcacgccggtaacggaatcctgggtgccggggctgttggcggcgcaaacgcatcatcaggttggccatatttctctctcttcggtaatgaagggcgagtcgcagattgaaattgatctgcaggagcaacagcaacgcggagtacgagttatcgtcgttgacgcgatcaccgtcgaggatgttgatgcgattgccggtgcggtggtggcgctgaactggaacgtactggccgtcgacccagggccctttactgaacggctggcggtgcgccgcggcctgatgcgtgaagcccgcgtcgcggcgctggctccgcagaccgcagagcagcagcgtggttcgattctggtggtggcgggcagcgccacgccggtgaccaaaaaacaattacagtatttgatcgccaacgatccgcgggtatgccacatcccggtggatgcggaactgctggtggataaaaagaatgccgcggaaattgaagtacagcgggtggtgcagcatgcccgccagtgcattccgcagcagcaaaacgccttattcgtttttgagtcggcgttgaccggtcggcttctggatctccaggaagaggagcagcgtttcgggctctctcacggccaggcggctgagaatatcaaccagggactgggcagcatcgtgcgtgaggtgctgaactgcgccggtggggaaataaaagggctttatatgaccggcggcgacacgatggtcaacgtcctgaaagagcttggcgcaaccggtattgaaatgattgactacgtgatcccgcaaaccgatatggtgcggattattggcggtgattatgccgggttgatttgcgtcggcaagggcggattaaccggcccggaagacattattagcaccattgtcgaacggatttataaagaagcacaaaattaa

SEQ ID NO: 88320 - DNA, 1017 bp, Enterobacter aerogenes
atgaatataaatatcctggataaaatgaataaggtacccggtggattaattattattccactgcttgccgccattcttattaatacttttgtgccgcaggtgttggcgattggcggcccgacaacggcactgtttaaagttggctccagcgccatgatggggattttcctgttaatttgcggaacctcgattaatattcgccaggctggtttgccattgtataaaggcgcggtgctgctgttccttaaatgtcttgccggggcgctggcggtatgggcggcaggggcgatgtttggtccggctggtttcctcggtatttcgaccctggcgctgattgcctgtttaaccagctctaacagttcactgtatatcgcgctgtgtagcaactatggcgacgccagcgatgccggagcgatatcggtgttttgcattaaagacggtcccttcgtcaccatggtggtgctgggcgtcagcggtctggctaatatcccctttgccgcgctgctatcgatgctgatcccgctgctgatcggcatgctgtgggggaatctcgatgagcgcttcaaacagctttgcgccgcgtcgcagccgttggtaatcattattatgtcgtttgccattggcgctaactcaagcattgataccgtgtttaccgccgggctgtcaggtattctgttgggcgttatctcggccatcaccggcattattttctacttcctgtacaacctgtttcttaagaaaaagaccgcattgggcgcggcgctcggcaccacggccgccagttccgcactgacgccagctctggtggcgcaggcggatccgtcgctggcgatgtacgttgatgccgccaccgcgcagctggctaccgccagtatcattaccatgctcaccgcgccggttctggtggcctggtttgacaaacgtctgaaaaagcgcgccccgcaggtagaggatacgccagtaaaagatgacaaaccggtgtcgctaccatcgcatgcgccacgggggaataaataa

SEQ ID NO: 88321 - DNA, 369 bp, Enterobacter aerogenes
atgccatcgccgttgtattcgttgtcaattaccgccgtgggagaatacgtcgcaaattatctgacggagaataaattaattctctttgccgaaccggcgcctgcggatattgccatgtattgtgcgctgcaccgcgccagtgatttatcggcggaattagctcccgggcagatactatcgctaaataatacgcagtatcgcattaccgcggtgggcagcgtggcaacggcgaatttaaaacagcttggccatattaccttgaattttgataacgccgtgcgggctgaattaccaggaatggttcacctggccggcattacacccaaaataataaacgtgggtgaccacatttcaatttatacactttaa

SEQ ID NO: 88322 - DNA, 459 bp, Enterobacter aerogenes
atgaaaacgatcgctattggtgcggatgatgccgcctatgcatttcgcgatgtcatcgtcgcttatttgcaggagtcaggaataaacgtcgcggattacagcagcgataaacgccagggcagtacggtatatccggatgtcgctcacgcggtagcgatgtcgattaagcagggtgaacacgatcgtgggatcttaatttgcggtaccggcattggcatgagcatagtggcgaataaagttccggggattcgcgccgcgcagtgtcacgacacattctccgccgagcgggcgcgcaaaagcaataatgcgcagattatcacccttggcgcacgggtcatcggcacggaattaggcaaaaaaatcctccaggcgtggctggcggcagaatacgagggcggcggttcagcgccgaaagttgaacgaatcgattattacgaacaccagcatgccagagattaa

SEQ ID NO: 88323 - DNA, 954 bp, Enterobacter aerogenes
atgaaccagcttgataccctgaaatcctataccgtggtcgttgccgataccggcgatattgaatcgattaaaaagttttcgccgcaggatgctacgaccaatccgtcattggtgctgaaggcagcccaacttccgcagtaccaggcgctgatcgccgacgccatcggtaaagcgcgccgccagggcggcagcgaacaaacccaactgattaacgcctgcgatcaggtggcggtggatatcggcagcgaagtactgcgccacgtacccgggcgtatctcaaccgaagtcgacgcgcgttacgcctgggatcgcggcatgtgcgtcgcgcaggcgcgcaagctaatccagatgtatgaaaagaacggtatcggcgccgaacggatcctgattaagctggcggcgacctgggaagggatccgcgcggcggaggagctggagaaaagcggcattaactgtaacctgacgctgctcttttcctttgcccaggcacgcgcctgcgccgaagcgggggtctatctgatttcgccgttcgtcgggcggatctacgactggtatcaaaagcatcaacctcaggagacggaatatcaggccgaccgcgatccgggcgtcgtttccgtacgccagatttatcagtactacaaatcccacggctacgacactgtagtgatgggcgccagctttcgccgtattgagcaaattcaggctctggcgggctgcgaccggttgacgatttccccggcgctgctcgatgagctggcggctaacgacgcgccgctcagtcgtcagctcaagccaggttacgtcagcgaaacccgaccgtcgccgatgagccaggctgagtttctctggcagcatcatcaggatccgatggcggtggagaaactgtcggaaggcattcggctgtttgccgccgatcaactgaagcttgaaaaccaaattcgtcagatgctgtaa

SEQ ID NO: 88324 - DNA, 1455 bp, Enterobacter aerogenes
atgggtaaaaaaataatgcaaagtcgcaatgatgaatatcataagttaactcgtggggaacgtattggctacgggatgggcgattttgcgcaaaacctggttttcggcacaataggcggctttcttgctctacatatgttgacggtgaatacgatcagtacggccactgcggggttcatttttcttttcgtacgaataatcaatgtgttttgggatccgatggttggaacctatgtagacaaaaggacgtcagtcgcgggcaaataccgtccctggctgttaagagccggcgtgccgctggtgatcctttccgctttgctttttgctcccattcctggcgtgagaggttccgtaccgttcgcctttatcatttatttagcgctggatttagtctactccctggtgaatatcccttatggttctcttaatgcctcactgacaagagatccggaatctattgataaattaaccagtacgcgaatgatgctggctaatagcgccaatcttctggtgtatacccttttcccgatgttcgtgcaaatggcctcaccaaaagaccgtagcctgaaggatactggtttttttggcatagaactcaatctgggaaactataccgatccatcagcgaattacgcctggttcggcgtctactccgtgtatatgttgttaggtgcggtggcacttttcatttgctataaattcactaaagaacgcgttgttgcgaccgcggaacagaccgccaacgttaaaacaaccgatctgttccttgaacttaaaaataatcgtccactcgtcattcttggattgtttttcatgctggcctttaccttcatgttctttatgaacacggttaacggctttttcaatcagtatgttgttggtcactccgaatggatgggcgccgttggactggtcgcctccatacccggtattgcgttccccatattttggccaaaactaaaaaagatttttggtaaaaaaggcttcttccacattttcctgggaatgtttattgccggtgaattattaacttacgtctggtcgcgtgaaggcatgcacgatgcgctgtggcttgcttacatcgccacattcattaaacagtggggcttaacctcagccaccggatttatgtgggcgctggttcctgaagttattgcttatggtgaattaaagtctggtaagagaaatgcagcaattattaatgccattatgggactgtttttcaagattggctttaccattggcggcgccattcctctgtggctgctggccgcctatggatttaatgaaaccggcgcgcagcaaagcgcgagcgctatcgatgggatcatgatgacagcggtctggatccctatcgccttagcgattgtagcaatgatcgtcatgcaaatttatcccatctcagacaaacacgtcagcgacattaaccgccagcttgatgagattcgggtgtaa

SEQ ID NO: 88325 - DNA, 1680 bp, Enterobacter aerogenes
atgtcccttatccaaaaccctatattacgtggttttaatgccgaccctagtattatccgtgttgaggacacctactatatcgccaactcgacatttgagtggtttcctggcgttcgtttacatgaatcaaaagatctgcaacactggaatcttctgccgtcgccattgtcgaccactaccctcttagatatgaaggggaatccgtcttcaggcggtatttgggctccggcgctctcttatgcggatggtaaattctggttagtgtataccgatgtgaaagtcaccgaaggtgcctttaaagacatgacaaactacctgaccaccgcaacagatattcgcggcccgtggagtgcgccgataaaactgaatggcgtgggtttcgatgcttcacttttccatgacgatgatggccgtaaatatattgtgcaacagacgtgggatcatcgggagtaccaccatccttttgatgggattaccttaacagagcttgatacaacaactttaaaattaatgccagaaaccgcacggaccatctatcgcggtaccgcagtagcgctcgttgagggacctcatctctataaactgaacggttattactatctctttgccgctcaaggggggacggtatttactcatcaggaggtggtggcccgttccaccactttaaatgccgacagctttgaaactgaaccaggagaagtattcttaactaacgttgatacccctgacagctatatccagaagcaaggacacggcgctttggtttcgacgcccgaaggcgaatggtattatgcttcgctgtgcgctcgtccgtggaatcgtcccggagaatcaatctatgatcctcgcggctggtccacgcttggccgggaaacggctatccaaaaagtgtactgggatgacgatggttggccgcgcattgtgggcggtcacggcggtaaaacgtttgttgagggcccaaaagacgccatttataccgaaagcgcgaaagataatagccagcacgatgaatttactacgccaacgcttaatctcaactggaataccctgcgggtaccgtttaccgaaaagatgggtaccacaggcgacggaaagcttaccttaatcggccagggatcattagcgaatacgcatgatttgtcgcttattgcccgccgctggcaagccttttactttaatgctgaagttaaagtcgcttttaatcctttcagctaccaacaaatggccggattaaccaattactacaacgaccgtcactggagttttgcttttgtaacctggaatgaaataaacggcagagtcatcgaggttgccgaaaacaatcgtggaaaatatacttcgtacctgaaagataacgcgattaatattcctgacgacatcgaattcgtgtggttacggacaaaagtcaggaagcagacctatagctatgagtatagttttgacggcgccgagtttattgaaattccggtagttttcgatgccgcagtcctttccgatgactatgttctgcaaagctatggcgggttctttaccggtgcatttgtcggtcttgcggcagtagactactcaggctacggcgccagcgctgaattttatgatttcgattatcaagagtttggcgactcgttaattggcacggatgtttatagttgggaggctggcgagctacgtgctgattag

SEQ ID NO: 88326 - DNA, 867 bp, Enterobacter aerogenes
gtgaaatattcagtattaagtaacaacctcagaatgccgatggtcggctttggcgtgtttaaggttaccgataaagaagagtgtaagcagtcggtgttaagcgctattcgtaccggttatcgccttattgataccgcagccatttacaacaatgaagatgccgtgggtgatgcggttcgcgaggctatcgccgaagggctgtgtacccgcgaggagttatttatcacgtcgaagctgtgggttcaggacatggccaacggcgctgtggctaaagccggtattgaggcgtcgctgaaaaaatcgggcctggagtattttgatctctatttattgcatcaggccatgggcgattatttcagcgcctggcgcgcgctggtagaggcttatgaagccggtaaactgaaagccatcggcgtgtccaacttctacgctcacgtgttagttaatttctgtgaaaccgtcagaattaagcccatggtgaaccaggtcgaattacatccttactttgcgcaacccgccgcgctggaaaccatgaagcgctataacgttcagccagaagcctgggcgccgttaggcggtgggagacataaaccgtatgaagatgaaatgatgcaggggattgccgctgcccatcaaaaaaccattgcccaggttattttgcgctggaacgtgcagcgcggcgtcacggtaattcctaaatctacccggcaggaacgtattgcagaaaactttgatctctgggatttctccctaaccgatagcgaaatggcgctaattagtgcactggatttaggctatgtgggtgaagcggtgaaacattttaatccggaatttgtacgtggttgtctgggcgttaaaaagcagtaa

SEQ ID NO: 88327 - DNA, 1107 bp, Enterobacter aerogenes
atgaatataaaagaaatatggaaagcagcaaaccctaaaggtcatctgctgactgccatctcattcttgattccgattgtctgtggtgctgggtttattattgccatcggtatgggttttggcgggacggttcaggacactttagtatcgggtcaatttgatctgtggcaggctttcgctaccatgggagctaaggcgctcggactattgcccgttgttattgctatcggaatttccggttcgatcgcaggtaagcccggtattgcccctggttttgttgtcggtctggccgctaatgctattggtgcgggttttatcgggggcatgatcggtggctacatttccgggtatattgctcttgctatcattaaaaatgtgaaggttcctggctgggcccggggtttaatgccgacattgattgtgccattttttgcatccattttcagtgctctgctcatggtctatatcatcggcacgcctattggtatttttaccgatgcactcacatcgttcctgagaagtatgggaacttcatctaatttagtattaggtgctgttattggggcgttgtgtatcgttgactttggtgggccgatcaataaaacgtgctttgcattcgtcttaactctccaagcacagggtataaatgagccagttacggcccttcagttagtcaacacggcaacacctatcggttttgggcttgcattttttatcgccaaactgcttcgcaaaaatatctataataacgaagaaatcgaaatgttaaagtcggcggttcctatgggggtagtgaatattgttgaagggtctatccctatagtgatgaatgatatcgttcgcggtattgcagcagcggcaatcggcggtgcttgtggtggtgcaatcaccatggtgtatggtgcggatgcaactgtaccttttggcggggtattgatgctcccaacaatgtcaaatcccatggcaggtattatggcattgatagttaatatattagtaacagcaaccatttatgctgtcatcaaaaaagatgttcctcgcgatgttgttatcaataacgatcaagaagaggaagatatcaacttcgatgatattaagattagttag

SEQ ID NO: 88328 - DNA, 312 bp, Enterobacter aerogenes
atgaatattgttggaattacagcctgcactgtaggtattgcacacacttatattgcgcaaaagaaaattgaaatagcagcaaaaaaggccggtcacaatgtcaaaatcgaaacgcaaggcactataggtatcgagaatgccttgaccgctgaagaaattgcacaagccgacattgttctgttagccgccgatgttaaagtttcaggtgaagaaaggtttgccggaaagaaagtcgtcaaagtaccaacggaaatggcagttaaatcaccaaataagcttattgaaaagcttggtgaattagtcaattcataa

SEQ ID NO: 88329 - DNA, 465 bp, Enterobacter aerogenes
atggacatttcgagtgtactgaacgtaaaaaatattaaattaaacatgatggctaagagtaaggaagaagcaattgaagaattagccgacttattagtacgtgatggagctgttattaataaagatatttttctgcaagatgtttggttacgcgaagaacagggctccactggattcgaaaatcatatagcgatccctcatggtaaatcctcaggcgtagcccgtacagcattggccattggacgaacccaacatcatatcccttgggaaactatggatggtagtgacgttcgttgtattattttatttgctgtatgcctggaggatcaaaataccacccacatccgattattatcccaggtttcaggttcacttgccgatgaagagatagtaggaaaattactgatggaagattccccgcagaaaatcattgatcttttaaatgctgaaggtgtcagcgcttaa

SEQ ID NO: 88330 - DNA, 678 bp, Enterobacter aerogenes
atggcagctaaattttcgccctcgttaatgtgtatggatttaacgcaattcagagagcaaattacggcaatgaacggtcgggctgatttttatcacgtcgatattatggacggtaactatgtgaagaatattacgctatcaccgttttttatcgaaaacctgaaaaaaattaccgatgtgccgatcgacgtacatctgatggtgaatcacccggaagatataattccaatgtgtattaatgccggggccgatattatcagcttccaccctgagacggcgaataacaaaatattccggctgttgaaccagattaaagacgctggtcgtcgctgcggcgtagtgttgaacccagctactccggcggatgctattaaagagtacgcgcacctgctggataaagtgaccgtcatgtcggttgacccgggctacgcaggtcagaaatttatcccagaatcgctcaataaaattaaacagctgatcgcgatgcgcgaagtgcatggttaccactatctgaccgaaattgatggctcctgtaacgagaaaacttttaatgttatctcccaatcgggcgttgacgtctttattgtgggaacctcgggcctgttctccctggcggataatgtcagcgatgcatgggataaaatggtcgatatctatcaacgcgaaatcgctgcctga

SEQ ID NO: 88331 - DNA, 1263 bp, Enterobacter aerogenes
atgctgcagtttattattcatgatgtgttgggcacaccagcaatactggtcggtttgttttccctgatcggcttattattgcagaaaaaagcagtttccgacgttatttccggaaccctcaaaaccattatggggtttgtgatattaacatccggggcggcgattgtcgccacgacgttaacgacgtttagccagctgtttgagcactccttccatattcagggtgttgtccccaatactgacgccatggcggcgctggcgcagaaaaactacggtactgcgacagccatgatcatggtgctggggatgttgtttaacattgttcttgcccgcattacgccgctgaaatacatcttcctgacaggccaccacacgctgtatatgtcggcgatgctggctgtcattctctctgtcggcggtctgtcgccgttctgggtggtactggtgggggcggtaatcctcggcatcatgatggtggtctctccggctattctgcagccatttacccgcaaaattaccggcactgatgacctggcgctgggccactttggttcaacagggtatctgctgtcggcgctggtgggaaaagcgatcggtaaaggcagcccgtcgattgaagagctgaaggtgccgaaaacgctgaacttcctgcgtgactcctcggtggctatctcgctgacgatgatgattctgttcctgattctggtactggtcgcaggtaaagagtttgttgagaccagcatcagtggtggtcagaactttatcatctttgccattatccagtcgctgaccttcgcggcaggcgtgtggatcatccttgcgggtgttcgcatgattattgccgaaattgttccggcctttaaaggcatcgccgacaagctggtgaaagacgcgaaaccggcactcgactgtccaaccgtctttccgttcgccccgaacgcggtgatcgtcggcttcctgtcaagttttgccgctggtctggtgagtatgttcctgtgtccgctgcttggcctgagcgtcattgttcccggcctggtgccgcacttcttctgcggcgcgacggcgggcgtttacggcaacatctgcggcggtcgtcgcggcgcggtggtgggggcattcgctcacggtctgttgatttcttttttgcccgcgattttgctgcccctgatgggcgaccttggctttgcatccaccacctttggcgatgcggactttggcgttgttggcatcattcttgggcatgtcgtgtcactgtttaactaa

SEQ ID NO: 88332 - DNA, 267 bp, Enterobacter aerogenes
atgaaaaaggttctgattgtttgcggtaacggtttaggtagtagctttatcgttgaaatgaacgtgaaaaaaatcattacagagttaaataaagaagcagaggtttcccataccgatctgacttcagcaaaaagcgaaactgccgatattattcttagcgccagggatatagctgaacatctgtccagccattctgcccaggtttttggtttatctaacctgctggataacaataaaatcaaagaaattctttccgagaatctctga

SEQ ID NO: 88333 - DNA, 441 bp, Enterobacter aerogenes
atgatcacgacctggttaccaacggaaaatatccagattgtggattcagtcagtgactggaaacaggcaattacgttatcggctcaacccttattggcgaaagaggcgattactgaagattatattcaggccatttgtaacagccatgaaaaacttggtccttattatgttttagcgcctggtctggcgatgcctcatgctcgcccggagcaaggtgcaattaaaaatggtttatctcttttgcatattaaaaaaggcgtttcttttggctcggaagagaatgaccctatttacgtcgtgattatgctgtgtgcgctttcgggagatgaacacatcaatatgattacagccctggcagacatttttagcgatgatgaacgactctcagcactgctgaaagcctcatcagtgacgaaaattcaagccgttatcaatggatag

SEQ ID NO: 88334 - DNA, 1053 bp, Enterobacter aerogenes
gtgcagacgttagaagcggacgatagcgcgagagaaaaacgcaggaaaaacaccggtaaaattacgcttgctgaagtggcaaaactggtcggcgtgagcacgatgaccgtgtcacgcgcgttacgcatgcctgaaaaagtgaatcctgaactgcgtacacgcattgaagccgcagtaagcgagctgggctatgtgccaaatctgcaggcccgcaaccttgcctctgctgactccagtctggtgatgggcgtggttccctctttttcctccccgggctttcttgccgtctccgaaacactacagaccgtgctcacgacccagggctatagcatgatgtttatcgagtccggtcagggtggacagagtgaagaaaaagcttttgcgcaaatgctcgcttacaacccggctgcgattgttcaattcaatattgataacatcagcagttgttcgcaaatgataagtaacaccggcgtgccggtggttgagattggcgccatcaatcgcgatgcgagctgggtcagcattggcgttgactatgccgcagccatcaaaaagttggtcacatcgcttgtacagaccggatataaaaatatcggcctgctttgcacggcttccaataacattatgtttcgccaggtactaagcggttggaacagcgcgatgctctccgttaaccactctccgcatcgcgtggtgacctctcacctgccggcaggcattacgaccggcctgaacctgctcggcgatattcgtatcacctggcctgagcttgatgcgctgatttgcacatccgatgaaatcgcctgcggttgcattatggcctgccatggcgcggggcaaaaagtgcccgactctctggcactggcaagcctgagcggggggactcttgccgccgtttgctcaccggcgctgactgccgtcgaattcccctggagtgaaacgggaaccctcgcaggacaaacattgcttgagctactggcgggtaattcgacggataaattcattgaattaccctcagcgttacaagttcgcgccagcaccaggaagcagtag

SEQ ID NO: 88335 - DNA, 1617 bp, Enterobacter aerogenes
atgaagtatcctgtcacattgacatgcggcgcgctgtggttagccagcgtttcttctcttgcctgggcggcggacgtgcctccgggaaccgtattagctgaaaaacagcagctggtacgccatataaaagacgagcccgcttcattagatcccgctaaagccgtcggcctgccggaaattcaggttatccgcgatctgttcgaagggctggtgaaccaggacgcgaagggcaatatcatccctggcgtggcgacccgctggcagagcaacgataaccgcgtctggacctttaccctgcgtgataacgcgcgctggtccgacggcaccccggtgacggcgcaggatttcgtctatagctggcagcggctggtggatccgaaaaccacctcgccatttgcctggttcgccgccttgacgggtatcagtaatgcgcaaaatattattgatggtaaagcagcgccggacacccttggggtgacggcggtcgatgcccacacgctgcgcgtgcagctggataaaccgctgccgtggttcagcaacctgaccgccagctttgcgttctacccggtgcagaaagctaacgtcgaaagcggcgctaactggacgcgcccgggcagccttatcggcaacggtgcctatgtgctgaaagaccgggtggtgaatgagaagctggttgtcgtgccgaatacacaatactgggataacgccaaaacggtgattaagcaggtgactttcgtgccgattaaccaggaatcttcggcgaccaaacgttatctggcgggtgatattgatatcaccgaatccttcccgaaaaatatgtatcagaagctactgaaggatattcccggacaggtctacacgccgccgcagttaggtacctattattacgctttcaatacccagaaagggccaaccgccgatgagcgcgtgcgtctggcgttaagcatgaccatcgaccggcggattatggcggagaaaatcctcggcaccggtgagaaaccggcctggcggttcacccctgacgtcaccgcaggctttactccgcagccttcgcagtttgaaagcatgagccaggccgagcttaatgcccaggctaaagcgctgctatcggcggcaggatatggcccggaccgtccgctgaagctgacgctgctgtacaacacgtcggaaaatcaccagaagatcgccatcgccgtggcgtcgatgtggaagaaaaacctcggtgtcgacgtgaaactgcaaaaccaggagtggaagacctacatcgatagtcgtaataccggtaatttcgacgttatccgcgcatcgtgggtaggggattacaacgagccgtcgactttcctgtcactgctcacatcgacccatagcggtaatatttcgcgctttaacgatccggcatacgataagatcctcacccaggcggcgcaggaaacctcggaaaaagcgcgtaacgatgattacaatgcggcagagaaaatcatcatggccaaagcgcctattgcgccgatatatcagtataccaacggccgcctgatcaagccgtggttaaaaggatacccgatcaccaatccggaagacgtggcctacagccgcacgatgtatattgtgaagcattaa

SEQ ID NO: 88336 - DNA, 714 bp, Enterobacter aerogenes
atgcccgtttcacgccctcgtcccctgcgcggcgctttcccgccaggcacgcaacgttatggccagtcgcatctcggcgcgccgctgctgtggttccccgctccgctggcagatagccgcagcggtctgattatcgccggcacgcacggcgacgaaaactcgtcgatcgtcaccctctcctgcgcgttgcgcacgcttaaaccggagttgcgtcgccatcacgtggtattaacggtcaaccctgacggctgtcagctagggttacgcgccaacgcccgcggtatcgatctcaaccgtaatttcccggccgctaactggaaggcgggagaaacggtgtatcgctggaatagtgcagccgaagagcgtgatgtggttctgctgaccggtgaaaaacccggttcggagcccgaaacccaggcgctgtgccagctgatccaccagatccatccggcgtgggtagtctccttccacgatccgctggcctgcattgaggaccccggccacagcgagctgggagaatggctcgccggggcctttaatttaccgctggtgggcagcgtcggttacgaaacgccgggctcttttggcagttggtgcgccgatatcggcctgccgtgcattaccgccgaatttccgccggtctccgccgacgaagcgacagaaaagtacctcgcggcgatgaccgatttactacactggcacactcacagatga

SEQ ID NO: 88337 - DNA, 966 bp, Enterobacter aerogenes
atgcgcaaccttcgagtttttgaagaatcatggccgcttcacacgccgtttgttatctctcgcggcagccgcagcgaggccaaagtcgtggtggtggaaatagaagaggatggggtaaaaggggccggagaatgtacgccttatccgcgctacggggaaagcatcgcctcggtgatggcgcagattatggcgatcggcgagcagcttgagcgcggcgctacccgcgagcaagtgcaacagctactgccggctggggccgcgcgcaacgccgtcgactgcgcgttgtgggatctggaggcgcgccgcgcggggaaaacgttgccgcagctgcttggcgtcaatctgccgcgcgaagtcgtgacggcgcaaaccgtggtaatcggcacgccggaacagatggcggccagcgccgccgcgctgtgggagaaaggcgcgcggctgctgaaggtcaagctcgacgatcatttgattagcgagcggctggttgctattcgcgacgcggtgccgcaggcgacgttgatcgttgatgctaacgaagcgtggcgtggcgaaggtctggcggcgcgctgtcagcttttggccgatctcggcgtggcgatgctggagcagccgttaccggccggcgcggatgaggcgttggaaaacttcattcatccgctgccgatctgcgccgatgagagctgtcatacgcgggaaagcctaccggcgctgcagggtcgctacgaaatggtcaacattaagttggataaaaccggtggtctgaccgaggcattgctgttggcgcaggaggctgaacggctgggttataagaggatgctgggctgtatgctttgtacttcacgggccatttccgccgcgctgccgctggcgccgctggcccgttttgcggatctcgatggcccgacctggctggcggtagatgtggaaccggcgctgcagttcagcaccggcatgcttcatctgtga

SEQ ID NO: 88338 - DNA, 507 bp, Enterobacter aerogenes
atgtcgcaaaccgtacatttccagggtaacccagtgtccgttcagggctccattccgcaggctggcgcgaaggcgcagccgtttacgctggtcgccaaagatctctctgacgtcacgctgagccaatacgctggtaaacgtaaagtactgaatattttcccaagcatcgataccggcgtctgcgcggcatcggttcgcaaattcaaccaactggcttctgagctgaacaacaccgtggtgctgtgcatctccgctgacctgccgttcgcgcagtcccgtttctgcggcgcagagggcctgagcaatgtggtcaccctgtccaccctgcgcgcgccgcagttcctggcagattatggcgttgctatctccgcaggcccgctggctggtctggctgcacgcgcagtcgttgttatcgatgaaaacgaccaggtggtatacagccagctggttaacgaaatcaccgaagagccggattacgatgcggcactggctgcgctgaaagcgtaa

SEQ ID NO: 88339 - DNA, 1068 bp, Enterobacter aerogenes
ttggcgaagcaacgggattggcctcagtggatgatattactggcactctccgccgtgctctcctttgtgctgttccggctccatcttcccgctgcgccgctgcttggcccgcttatcgccggaattacccttagtctgcgcggcgccacgattcgtctccctcgtccattctttatctccgctcaggctatcatcggctgtatgatcgcccgcgcgctaaccccgtctattttcggcgttctggccgccaactgggcgctggtgttgattatcctcctttccacgctggctatcagcgcgctgaccggctggctgctggtgcgttacagttcgctacccggggcaaccggcgcgtggggaagctcaccgggcggcgcttcggcgatggtggtgatggcgcaagagtatggcgccgacgttcgtctggtggccctgatgcagtatctgcgggtactgttcgtggttggcgcggcggtaatggtggtgcgtttcgcgctcggcggcgaggcgcaggagatgacccagcagatcgtctggttcccgccgctgacttttaatctaccgttaacgttgctattgactgcggtcgccggttggttagggttacgtttacgcatcccttccggggcaatgttgttaccgatgctggcaggtgcgctggcgcagggtgaaggcatgctattgctggagctaccggaatggttactggtgctggcgtataccgcgcttggctggacggttggcctgcagtttaatcgcgagatttttatgctggcgctgaagacgctaccgcaaatcattgccgccatcgtcggcttgatcgcgctgtgcgcgctgatggctttagcgttaacgcatctgctgccgctggattttctcaccgcctatctggcgaccagccccggcggtctggatacggtggcgataatcgccgtcggtacccgggcggatatgtcttttatcatggcgatgcaaacgctgcgcctgtttaccatattgctcaccggcccggccaccgcgcggttaatttcgcgctatgcgccgcgcaaagaaaaaagcccccgttga

SEQ ID NO: 88340 - DNA, 1542 bp, Enterobacter aerogenes
atgcgtctggaagtcttttgtcaggaccgtcttggtctgacccgtgaattactcgatttgctggtgctgcgcggtattgacctgcgcggtatcgatatcgacccgattggccgaatctaccttaatttcgccgagctggagttcgccagtttcagcagtttaatggcggaaatccgccgtatctccggcgtaaccgatgttcgaactgtggcgtggatgccgtcagagcgggagcatctggcgctgagcgcgctgctggtggcaatgccggaaccggtgctgtcgctcgatgccaaaggcaaagtagagcttgccaacccggccagctgccaactgtttggtcaaactcaggcacgcttacgcagccatccggtggcgcaactcattactgatttcaacctgcagcgctggctggaaggcaacccgctggagtcgcataccgagcatgtggtcgtaaatggccaaaactttatgctggaagtaacgccggtgtatctggaaggcgaacacgcagagcgtgtgctgaccggcgccgtggtgatgttgcgctccaccatacgtatggggcgtcaactgcaaacgctgacgattcaggataccagcgcctttagccagatcctcgccgttgggccgaaaatgcgccacgttgttgaacaggcccgcaagctggcgatgctcagcgccccgttgctgattgtcggcgatacgggtaccggtaaagatctgctggcccatgcctgccatctggccagcccgcgcgccagcaaaccttatctggcgctgaactgcggttcgattccggaaaacgcggtggagagcgagctgttcggcgatgcgtcgcaggggaaaaaaggtttctttgagcaggccaacggcggctctgtgctgctggatgagataggcgaaatgtcgcctggcatgcaaacgaagctgttgcgctttctcaacgatggtactttccgtcgcgtcggtgaatatcacgaagtgcatgtcgatgtccgggttatctgcgcgacgcaaaaaaatctcgtcgagctggtgcaaaaaggactcttccgcgaagatctttattatcgtctgaatgtgctgacgctgaacctgccgccgctgcgcgattgtccgcaggacatcatgccgttgaccgaactgttcgtcgcgcgctttgccgatgagcagggtatcccgcggccaaaactctctgccgaccttaataccgtgttgacccgctatagctggccgggcaacgtgcgtcagttgaaaaacgcagtgtaccgcgcgttaacccagctcgagggcttcgaactgcgcccgcaggatattctgctgccagatcacgatgtgtcgtcgctgccggtaggtgaagaggcgatggaaggatcgctcgacgatattacccgccgctttgagcgttcggtattgacccagttgtatcgcagcttccccagcacgcgtaaattagccaaacgtctcggcgtttcgcataccgcgattgctaacaagctgcgcgagtatggtctgagccagaagaaaggcgaagaataa

SEQ ID NO: 88341 - DNA, 192 bp, Enterobacter aerogenes
atgggcttacgggaagatagctgtcaacaattattgacagtatggcggaaaaatgggctttatgccgtaaagttatgcgggcatttcttttgcgttatggctcgcatggcacagagggcgctgggcgcaggggttttcccggaggcggcgcgttgcgccttctccgggctaccaaatcgcaaagcgctgtag

SEQ ID NO: 88342 - DNA, 1062 bp, Enterobacter aerogenes
atgagcgagccgataaaaccgcggatcgatttcgatggcccactggaaacggaaaagagccagactttaaaatcggcccgcgcctttgacgcggcggatgcgcaaaccttctctccgatgctgcctgaaatggttgctgaagaggaaggggccgccgaagcggtggtggaatcggtactgcgcccgaaacgcagcctgtggcggcggatggttagtgccgggctggcaatttttggtattagcgtggtggcgcagggcgtgcagtggacggtgacggcctggcagactcaggactggattgcgctcggcggctgtgcggccggggcgctaattgtcggcgcgggcgtggggtcggtagcgaccgaatggcgtcgcctgtggcgtctgcgccagcgcgcgcacgaacgcgatgaagcgcgggatctgatgcatagtcacgcggtgggcaaagggcgcgcgttctgtgagaaactggcgcagcaggccgggctggatcaatcgcatccggcgctgcagcgctggtatgcggcgatccatgaaacgcaaaacgatcgcgaagtggtgagcctgtatgcgcaactggtgcagccggtgttggacgcgcaggcgcggcgggaaattagccgctcggcggcggaatcgacgctgatgatcgccgtcagcccgctggcgctggtggatatggcgtttatcgcctggcgtaacctgcgattgattaaccgtatcgccaccctctacggtattgaactcggctattatagccgcctgcgtttattccgtctggtgttgctgaatatcgcctttgccggcgccagcgaactggtgcgcgaagtcggaatggactggatgtcgcaggatctggcggctcgcttgtcggcgcgcgccgcacagggtatcggcgccggattgttgaccgcccgcctggggattaaggcgatggagctgtgtcgtccgctaccgtggatcgcggatgataaaccgcggctcggcgatttccgccgcgaactgatcggccagttaaaagagacgctgcagaaaagcaaaaccggcgcggagaaataa

SEQ ID NO: 88343 - DNA, 1398 bp, Enterobacter aerogenes
atgaagcgactcaaaactgaattcaatgcgctggtcaaccgcggggttgaccggcatttacgtcttgccgtgactggactcagccgcagcggcaaaacggcttttatcaccgcgatggttaatcaactgctgaatatccacgccggagcgcgactgccgctgctgagcgcggcgcgcgaagaacgcctgttgggtgtgaagcgggttccgcagcgtgatttcggcattccgcgttttacctatgatgaaggcctggcgcagctttatggccagccgccggcctggccgacgccgacccgtggggtgagcgaaattcgcctcgcgctgcgctatcgctctaacgattctctgctacgtcatttcaaagacacttctactctgtatctggaaatcgtggattatccgggagaatggttgctcgacctgccaatgctggcgcaggattatttaagctggtcgcggcaaatgaccgggctgttgcaggggcagcgcggggagtggtctgcccgctggcgacagctgtgtgatgggctcgatccgctggcgcccgccgacgaaacccggctggcggagatcgccgccgcctggaccgattatctgcacgcctgcaagcgcgaggggttgcactttattcagccggggcggtttgtgcttcccggcgacatggcgggagccccggcgctgcagttcttcccctggccggatgtcgatgcggttggcgaagccaggctggcgcaagcggacaaacacaccaatgccggaatgctgcgcgaacgtttcaaatactactgcgagaaagtggtgaaaggcttttataaagaccacttcctgcgctttgaccgccagattgtgttggtggactgtctgcagccgttaaacagcgggccgcaggcgtttaatgatatgcgtctggcgctgacccagttgatgcaaagcttccattacggccagcgaacgctgttccgccgcctgttttcaccggttattgacaagctactgtttgccgccactaaagccgatcacgtgaccgtcgatcagcacggcaacatggtgtcgctacttcagcaactgattcaggacgcctggcagaatgccgcctttgaaggcatcagcatggattgtctggggctggcgtccattcaggctacccagggcgggcttatcgaggttaatggtgagatgatcccagcgctgcgcggcgatcgtctgagcgatgggcaaccgcttaccattttcccgggggaggtgccggcgcggctgccgggccaggccttctgggaacagcagggcttccagtttgagaacttccgcccgagagcgatggatgtcgataaaccgctgccgcatatacgccttgacgcggcgctggaatttttgattggagataaattgcgatga

SEQ ID NO: 88344 - DNA, 219 bp, Enterobacter aerogenes
atgaatataaaatggcaacaggcagggcaaaaagtgaaaccgggtcttaagatcgccggtaagctggtgctgctgaccgcgctgcgatacggcccggcgggcgttgccggttgggcggtgaaatcggtggcgcgtcggccgctgaaaatgttgctggcggtcgcgcttgagccgctgctcagtcggctggccaatcgttttgcccgcggtatgaaataa

SEQ ID NO: 88345 - DNA, 360 bp, Enterobacter aerogenes
atggccggattggactttaataaaaaactgtggcgtatcccgcagcgcggaatggtgaagggggtctgcgccggtatcgcgcagcacctggatgtgccggtgaagctggtgcgtctgataaccgtactggcgatgatttttggcctgttcttttttgtgctggtggcctacatcattctgactttcgcgctggatccgataccggatagcgaactgtacggcgaaaaagggccgagcaatggcgatttactggccgccgtggatgccgaactggcttccggcgaacagcgtctgcgtgatatggagcgttatatcacctccgatactttcacgctgcgcagccgttttcgtcagctgtaa

SEQ ID NO: 88346 - DNA, 225 bp, Enterobacter aerogenes
atgagcatgctttttcttgccatcccgctcacgctatttgtgctgttcgtgttgccggtctggttatggctgcactacaacaatcgctcggcggacggggcgttaacccagaacgaacagcagcgcctgctgcagctgaccgatgacgcgaaacggatgcgcgaacgcattcaggcgctggaagcgatccttgacgcggaacatccgaactggagagacaaataa

SEQ ID NO: 88347 - DNA, 669 bp, Enterobacter aerogenes
atgggtattttttctcgctttgccgacatcgtgaacgccaacatcaactctctgctggagaaagcggaggatccgcagaagctggtccgtctgatgattcaggagatggaagacacgctggttgaagtgcgttctacctccgcccgcgcgctggcggaaaagaaacagctgacccgccgtatcgaacaggcgcaggcgcagcaggtggaatggcaagaaaaggccgagctggccctgcgtaaagagaaagaagatctggcgcgtgcggcgctgatcgaaaaacagaagctgaccgaccttatcgggagcctggaacacgaagcgcaactggtggatgaaaccctggcgcgaatgaaaaaagagattggcgagctggagaataagctcagcgaaacccgcgctcgtcagcaggcgctgatgctgcgccatcaggcggccagctcttcgcgtgatgttcgccgccagctggatagcggtaaaatggatgaagcgatggcgcgttttgagtctttcgaacgccgtattgaccaaatggaagccgaggcggagagccatcgttttggcaaacaacaatcgctggatcagcagtttgccgaactgaaagcggatgatgaaatcagcgagcaactggcggcgctgaaagccaaaatgaatcagaataaccagtaa

SEQ ID NO: 88348 - DNA, 972 bp, Enterobacter aerogenes
atggcggaatacaaggataacctgctgggcgaggctaacagctttctggaggtgctggagcaggtctcgcagctggcgccgctggataaaccggtgctggtgatcggcgagcgcgggaccggcaaagagctcattgccaaccgactgcactttctctcttcgcgctggcagggaccgtttatttcgctgaattgcgcggcgctgaatgaaaaccttctcgattccgaattgtttggtcatgaagccggcgcctttaccggcgccagcaaacggcatccggggcgctttgaacgtgccgacggcggcacgctgtttctcgatgagctggccaccgctccgatgctggtgcaggaaaaattgctgcgggtaattgaatacggcgagctcgaacgcgtcggcgggagtcagccgctgcaggttaacgtacggctggtgtgcgccaccaacgccgatctgcccaaaatggtcgaggaaggtcatttccgcgccgacctgctcgaccggctggcgtttgatgtcgtgcaactaccgccattgcgcgagcgccagagcgacatcatgctgcttgccaaccagtttgccattcagatgtgccgcgaactggggcttcctctgtttccaggctttagcgagcgagccgtcgacacgctgctcacataccgctggccgggcaatattcgtgagctgaaaaacgtggttgaacgttcggtttaccgccatggcagcagtgatagcgagctggataatatcattatcaacccatttaacagcgcgacgcctgcgcctgcaccggtcgttgaacatgcgcttcccgcgttgccactggacctgcgggcctttcaactggagcaagaaaaaagcctgctgcagttgagcctgcagcaggcgaagtacaatcaaaagcagtcagcggagctgctggggctaacctaccaccagctacgcgccttgttgaagaagcatcagctatga

SEQ ID NO: 88349 - DNA, 1392 bp, Enterobacter aerogenes
atgagttctgtatcgttaagcgaatctcgtttcgtcggtagcgatcgcctgctggcgggtattgtgctcagcgtgctgacgttctggctgtttgcgcaatcggttatcaatgttgttccggcgatgaaaagcagcctcgatatttcactggagacgctaaccctggcggtgagtctcagcgccttatttagcggctgcttcgtggtggccagcggcgggctggcggataaattcggcagggtgcggatgacctatctcggcctggcgttgagtattatcggcagcgcgtttctggcggcgtcgcaggggccgggtctgtttatcaccggtcgcatcctgcaagggctctcggcggcctgcattatgccggcgacgctggcgctgattaaaacctggtatgaaggtagggcgcggcagcgggcggtgagtttctgggtcattggttcctggggcggcagcgggctttgctcgtttgtcggcggtgcgattgccaccggtcttggctggcggtggatcttcgtgttctcgattgcagtggcgctgctggcgttgctgctgctgcgcggcaccccggagagccgcagcgccagcgccgatcggcataagctggatgtgggcggattattaagcctgatcgcgtcgctggtgctgcttaatctgtttatcagcaagggccatcaatggggctggagcagtggcttatcgctgtcgatgctgggcggcgcggtaattacgggtggtttgtttatccgtagcggtttgcgtaaaggtgaagcggcgctgatcgacttcgctttatttcgcaaccgggcctacggcgcggcggtgctgtcgaacttcatgcttaatggcgctatcggcaccatgatgatcaccagcatctggctgcagcaggggcatcatcttaccccgctggaaaccggcatgatgacgctgggatatctggtgacggtactggcgatgattcgcgttggggaaaagttgctccagcgctacggcgcgcggttgccgatgatgaccgggccggtctttaccgccatcggcattttgctgatctcctgtaccttccttgataagtcgctgtatatcgggaccgtcttcttcagcaatattctgtttggcctcgggctcggctgttacgccacgccttcgaccgataccgccgtcgccaatgcgccggagaacaagatcggcgtcgcatcaggggtttataagatgggaagttcgcttggcggcgcgatgggtattgccgtgacggcgtcacttttcgcgctgttcttgccgttgggaatggccagcgccgcgcaatacgcgttgtggtttaacgccgcgctgtgtttaggctcaatggtggtaagcgcgacgatgctgccgcgcaccgctcatagctga

SEQ ID NO: 88350 - DNA, 1170 bp, Enterobacter aerogenes
atgacacatccattgattgaatctttgcaagttaatgaagcgcagtttgtggcgttacgtcgccgcttccaccaacagcccgagattggctttgaagaacataaaaccagcgatgaagtcgccaggctgcttgctgagtggggatatgaagtgcatcgcggcctcgccggtaccggcgtggtcgggacgctgaaagtcggcagcggcgaaaaacgtctgggtctacgcgcggatatggatgcgctgccgatgcaggaaatgagcggtaaagcatgggcaagccaggtcgacgggcgttttcacggctgcggccatgacggtcacaccaccacgctgctgtatgcggcggaatatctggcgcgcacgcgtcagtttaacggtacgctgcagttaattttccaaccggcagaagagctgctgtacggcggacgggtgatggtcgaagatggcctgttcacaaaattcccctgcgacgccatctttggcctgcataacatgccgggccagaaactgggcaaaatcggcctgcgcgacggcgcgatgatggcttcttccgatacgctgcatatcgaagtgaagggcgttggcggccatggcgcggtaccggaacataccgtggatgcgacgctggttgcctgccacattaccctcgcgctgcaatcgatcgtttcacgcaacatcacgccatttgaacctgcggtagtcaccgtcggcagcattcaggctggtcacgcgccgaacatcatcaacgataaagtgttgatgaagctaacggtccgtacccttaaccagcaggtgcgcgagacggtgctgcagcgcattcacgatattgcggtcgctcaggcagaaagttttaacgccagcgctaccttaacccacgtcaacggcagcccggtattacgtaacgatccggcggctaatgagctggtccgtgaagtggcgacctcgctgtttggcaaagaacaggttggtaccgtgaatccatttatgggcagcgaagatttcgccttcatgctggagagcaatcccaacggctgctacttcactatcggcgcgggtgatgaagccgaccgctgcatggtgcataacccgggatacgattttaacgatcaaatcctgcttaccggcgcagcgctgtggtgcggcctgacggaacgctatctgcgttaa

SEQ ID NO: 88351 - DNA, 2298 bp, Enterobacter aerogenes
atggaacaccatctcggcgatttcagcctcacggtgcgcgatattcgccacctcagcccgccggaaagcgacggattaacgctgctgtggctgctggaaggcagcgcgcggttgcaactcggcgaagcgccgcaaccgatgcgggttgatgaactggcgatcgttaaccgccgccagcgctggcagattaccggcgaagaggccaatgcggtcatgatcctcaaccttgccgctggttggctcacccgccttgatagcgatttttttgcctgtgattatcgggttaacggcgaaaacatggatgcggcagataacctgcgccagctgatgcgccagttgctggtagccgggctggttaatcatcagtcgcgttaccgcttagaggccaaccgctggctcagcgaaatcgccctgctgctggcgacccgctttacgcagcccatcgtacccagcctgcgccgcggcgccgaaaactggagccgacgaattatcaacgtagtagcgcgcattgaagccaactatcagcggcggatctcgctgcaggaagtggccgccgctgagtttgtctcggaggcctggctttcccgcctgtttcataaagaggtcggcgtcagcttcgtgcagtacattaccgccctgcgtctcggcaaggccgccgagcaactgctggccacccggcgttcggtgcagcaggtggcgcaggacaacggtttcgccagtgcccgcatcatgagcgatctgtttaagcgccagcatggcgtcacaccgcggcaatttcgccaacagcagccgcagcccgccgctcgtccgcgagtcaacgccagtgaggtctggtatccggtcgcggttgagcggctttacgcccgccttaacgaggcggaaaaaaacagcgataatacgccgccgctgctgctcaacccgcgtcagaccaggctggtggatatccgccagctgccagcgcgcgcgccggtattgcgccatacccgtaccatcgttaccgtccgagaactcgatgatttactccgcgaagatgtccgccgcgagctggagcaactgcagcagacgctacccgtctacggcattgatattcacgatccgtttctcagtagccgcctgtttggcgaaggctggtacgacccgacgctcgcgggttatgcctgttggtacaatcttcagcagctgtttagctggctggcgcagaaaggctggacggtgctactccacaccggtttaaccacccgctgcgatttactacagcgttttctgcaacttgccgccaatcacttttcacccacgacgcttgcgagctggcgttttgtctggcactggtcgccgcaggccagtgaagcggcgcgacagcaggcctggcgacaacagcgcgaagtgctcgcgtccaccttgcaacaaccgcaaatggggatctggcatcgtttcccgcaaagcgatattgccgacgatccgctactgcattcccagttgctcagtgaagccgattttctcgcctgccaggcggatgctaatgaactgcttgacctggcgcaggccgatagcagcaagctggccgccagtgaaagctatccgcgacagaaattacgccaaatacataatgccctacggcaacggcagctctcgttgccactgtggctgctatcgtggaatacgttgaccggtgatacccgcgataccaacggacgttttttccgcggcgcgctattgatggataacctgctgggcattgccgaacaggtgtggctggccggcttctggcttaattccgggctgcagggggaggcgcgggacaacggtaaacttgacacctccagcctggcgctgcattacctgcatggtctgccgcgcccggtttactgggtattatggctgtggcggcgtctgcgcggcgaagtcttaatcaatgacaaaaacctgttgttattgcgccataacggacactaccagttgctgctgcgcaatacggtgattttcaacccctggctatcgagcgaagaggcctttactcagcggtttcgccagccctataccctgcggcttgaagggctggagggacgctggcgcatcaaacagcatctgttcgatcaacatcacggcgcgctatttcctctgtttgaggcattccgcagccgcagcggcccggacgaagaagattatcgctggctccagcaccacgcccgcccggcgctgagcgtgcatgaggaacagatggatgatggctggcttcgggtggattcactgcagagcaatgcgctggcattatatgaattcacaccgctgaatgattga

SEQ ID NO: 88352 - DNA, 285 bp, Enterobacter aerogenes
gtgattccggttaattctcatacgctaacccgctatgccgcccatgccagtttgatctacaccatgaaaaatcatcatgccccagccctctctttaatgatgattttctcggatctctgcgtgcgctccacgcgcgatgcctacagcgaacaaggatgggaaatatcagaacgtaaaagcggactggtgctgcgtacctttgtcgctatccatcgcgacggcggagaactggagatcacgccaaaggattatatcgcccgctataatcaactccttccgctctga

SEQ ID NO: 88353 - DNA, 1647 bp, Enterobacter aerogenes
atgcgcctgaaattgtcctctcttttagcggcagcctcgatgctgtgcgggcaggcttttgccgcaccggccccggcgctgccggctaatgccgatatccgcgatagcgggtttgtctattgcgtcagcgggcaggtaaatacctttaacccgcaaaaagtcagcagcggcctgattgtcgacaccctcgccgcccagctctacgatcgcctgctcgacgtcgacccttatacctatcgtctggtgcctgaactggcggaaagctgggaagtgcttgataacggcgccacctaccgcttccacctgcgcgataaggtccagttccagactaccgactggtttaaaccgacccgcgcttttaacgctgatgatgtcatttttaccttcgggcgcatctttaaccgcgacgacccgtggcacagcgttaacggcagtagcttcccctatttcgatagcctgcagttcgccgacaccgtagaaagcgttcgtaagctggataaccataccgtcgagtttcgcttgaaacgcccggatgcctcattcctgtggcacctggcaacacactatgcttcagtcatgtcggcggagtatgccgcgcagctgaccaaaagcgaccgcgaagaacaactcgaccgccagcccgtcggcaccggcccgtttaaactggaagagtatcgcaccgggcagtacatccgcctgcagcgccacggggcctactggcgcggcaagccattgatgccgcaggtggtggtggatctcggttccggcggcaccggccgtctgtcaaaactgctgaccggtgaatgcgacgtgctggcctggcccgccgccagccagctcaccatcctgcgcgacgatccgcgcctgcgtctgacgctgcgcccgggtatgaatatcgcctggctggcttttaacactgctaaaccgccgctggataatccggaagttcgccacgcgctggcgctggcgatcaacaaccagcgtctgatgcaatcgatctactacggcaccgcggaaaccgcggcctcaatgctgccgcgcgcctcgtgggcttatgataacgacgctaaaattaccgaatacaaccccgcggaggcgcgccgtcgcctgcagacgctgggtctaagtaatctcacgctaaaattgtgggtgccgaccagttcccaggcgtggaaccccagcccattgaaaaccgccgagctgatacaggcggatatggcgcaggtgggtgtcaaagtgattattattcctgtagaaggtcgtttccaggaggcgcgattgatggatatgagccacgatttaacgctttccggctgggccaccgacagtaatgacccggatagcttcttccgcccgctgttaagctgcgcggcgattggttctcagaccaacctcgcccactggtgcaaccgcgagtttgacgaggtattacaaaaagcgctgatttcacaacagctggcgtcgcgtatcgaagcctacaaagaggcgcagcatattctcgcccgtgaattaccggtgctgccgctggcctcttcgctgcgtctgcaggcttatcgctatgatatgaaaggactggtgctgagtccgtttggcaacgcctccttcgcaggcgtgtcgcgcgaaaaagaagaggtgaaaaaaccatga

SEQ ID NO: 88354 - DNA, 966 bp, Enterobacter aerogenes
atgattatttttactctgcgtcgcctgctgttgttgcttgtgacgctgttttttctcacctttatcggctttagcctcagctactttacgccgcacgcgccgctgcagggcgcatcgctatggaatgcctggctgttctggttcaaaggggttctgcactgggactttggcgtctccagcatcaacggccagttgatttccgaacagctgaaggtggtcttccctgccacgatggaactgtgcattctggcgtttggttttgcgctgctggtcggcattcccgtggggatgattgccggaattatgcgtaataaatggccggacacgctcattagcgccctggcgctggtggggttctccattccggtgttctggctggcgttgctgttcactctgttcttctcgctaacgctgggttggttgccggtctccggccgctttgatctgttgtacgaagtgaaaacggtgaccggcttcgcgctcatcgacgcctggctctctgattcgccgtggcgccatgagatgatcgtcagcgccgcgcggcatatggtgctgccggtgttgaccctggccgtcgcgccgaccaccgaagtgattcgcctgatgcgtatcagcaccagtgaagtctacgatactaactatgttaaagcggcggcgacccgcggcgttacccgcaggacgattctgcatcgtcacgtgttgcacaatgccctgccgccggtgatcccgcgcctgggactgcagttctccaccatgctaacgctggcaatgattaccgaaatggtcttcagctggccgggactggggcgctggctgatcaacgccatccgccaacaggattacgcagcgatttccgccggagtgatggtgatcggcgcgctggtcattatcgtcaacgtgatctcggatattttaggagccatggctaacccactgaaacataaggaatggtatgccctacgatag

SEQ ID NO: 88355 - DNA, 891 bp, Enterobacter aerogenes
atgccctacgatagcgtctatctcgaaaagcgcccgcccggcgcattgcgcaccgtatggcgtaaattctacggcgataccaccgcgatgattggtttatacggctgcggcgcgctggtgctgctgtgcgtattcggcggctggtttgcgccctatggcatcgatcagcagttcctcggttaccagctactgccgccttcgtggtcgcgctatggcgaagtgtcgttcttcctcggtaccgacgatcttggtcgcgatgtgctaagtcgtctgctcagcggcgcggcgccgaccgtcggcggcgcctttgtggtaacgctcggcgccgcgctgttcggcctggtgcttggcgtgattgccggttccacccacggtttgcgttcagcgataatgaaccacattctcgacaccctgctgtcgattccgtcgctgctgctggcgattatcgtcgtcgcttttgccgggccgcatctgagccatgcgatgtttgccgtctggctggcgctgctgccgcgcatggtgcgttcggtctacagcatggtgcacgatgaactggaaaaagagtacgtgattgccgcccgcctcgacggcgcttccacgctcaatattctctggtttgcggttctgcctaatattaccgccggactggtcaccgaaattacccgcgcgctgtcgatggcgatcctcgacattgccgcgctcggttttctcgacctcggcgctcagctaccctctccggaatggggcgccatgctcggcgacgcgctggagctgatttacgtcgccccctggacggtcatgctaccgggagcggccatcatgataagcgtactgctcatcaatctgctgggcgacggtattcgccgcgcaattattgccggggttcaataa

SEQ ID NO: 88356 - DNA, 993 bp, Enterobacter aerogenes
atgccgttactggatattcgtaatctcaccattgagtttaaaaccaacgagggctgggtaaaggccgtcgatcgggtcagcctgacgctggctgaaggtgaagtccgtggtcttgtcggtgaatcaggttccggcaaaagcttaatcgccaaggcgatttgcggcgtcaccaaagataactggcgggtcaccgccgaccgtatgcgttttgatgatatcgatctgctgcgtctctctaaccgcgagcgccgaaaactgattggccacaacgtatcgatgatcttccaggagccgcaatcctgtcttgatccttccgagcgtattgggctgcagttgatgcaaaatatccccggctggacctttaaaggccactggtggcaacgctttggctggcgtaagcgccgcgctattgaactgctgcaccgggtgggaattaaagatcacaaagatattatgcgcagcttcccctacgagctgaccgacggcgaatgtcagaaggtcatgatcgccatcgcgcttgctaaccagccgcgcttgctgattgctgatgaacccactaacgccatggagccaaccacccaggcgcagattattcgcctgttgacccggctcaaccagaataacaacaccactattttgctgatcagtcacgatatgcagatgctcagcaaatgggcggataaaattaacgtcatgtattgcgggcagacggtagaaaccgcgccgagcgaggagctggtgaccatccctcatcacccctacactcaggcattgattcgcgccatcccggatttcggcagctcaatgccgcataaaagccggctgaataccctgcccggcgccattccgctgctggaacaactgccgatcggctgtcggctggggccacgttgtccctatgcgcaacgcgagtgtatcgtcacgccgcgtttgaccggcgcgcgtaatcatctgtacgcctgtcatttcccgctgaacatggagaaagagtga

SEQ ID NO: 88357 - DNA, 810 bp, Enterobacter aerogenes
atggtcgaaacattgctggaagttcgcaatctgagtaagacctttcgctatcgcaccggctggttccaccgtcagacggtagaggcggtgaagccgctgagctttaccctgcgcgagcgtcagacgctggcgattattggtgaaaacggctccggtaaatcaacgctggccaaaatgctggccgggatggttgagccgaccaccggcgaactgttgattgacgaccatccgctggagtttggcgactactcattccgcagccagcgtattcgcatgatttttcaggatccctcgacctcgctcaacccacgtcagcgtatttcgcagatcctcgatttcccgctgcgtctcaataccgatcttgaaccagaagcccgggaaaagcagattatcgagacgatgcgcatggtgggcttgctaccggatcacgtcagctactatccgcatatgctggcgccggggcaaaagcagcgcctgggtcttgctcgcgccttgatcctgcgtccgaaagtgattatctgcgatgaggcgctggcctcgttggatatgtcaatgcgctcgcaactaatcaacctgatgctggaactacaggaaaaacagggaatatcctacatctatgtcacccagcatctggggatgatgaagcatatcagcgatcaggtgctggtgatgcatgagggtgaagtggtcgaacgcggcagcaccgccgatgtgctcgcctcgccgctccacgaactgaccaagcggctgatcgccggccatttcggcgaggcgctgactgccgacgcctggcgaaaagatggtaaatag

SEQ ID NO: 88358 - DNA, 1428 bp, Enterobacter aerogenes
atgtcttctttttcatctacagatgggcagtcaaaaaatagtcaggctggattaagtgaaacgcggtcgatcgattacatccccgaacgcgagaggcatgggcatccgtttagccagtttaccctgtggtttggcggcaacctgcaaattaccgctattgtcaccggcgctttagccgtggtgctgggcggcgacgtggtgtggtcgctgataggtcttctcctcggtcaggtgctgggggcggcggtaatgtcgctgcatgcgctgcagggaccacggctgggtttgccgcagatgataatcagccgcgcccagtttggcgtctttggcgcggtagtgccgctggtactggtctgcatcatgtatgttggcttctccgccagcggtaccgtactggccgggcaggcgatggcaaagctgttgaatatcagcaatgtcgctggaatgttgctattcagcgcgattattattgtcattgcggtactgggttataaggtgattcataagctgggtaaactggcgagcattatcggcattctggccttcgtctatatgttcgttaccctgctgatgtcggcggatctcgcggccctggcgcaaaataaccatttctccctgccgatgttcctgctggcggtgtctctatcctcgtcgtggcaaatcgcgttttgcccgtatgtgtccgactattcgcgctacctgccacgcaatgtatcggcaacgaaaacgttctgctcggtgtttttcggtaccgtattgggaacccagacatctatgacgctgggggtgtttaccgccgcgattgccggcagcgctttccccggtcatgaagtgagttatctggtgggattgggtaaaagccaggtgatggcgatggttatctactttgctatttgctttggcaagatcaccttcacgacgcttaacgcctacggcagttttatgtctctgaccaccattgtttccggtttccgtcgccagacggcgttgtcgcagaaatgccgcgttgctttcgtcgtcctgatggtcgcggcttcgtgtattatcgcgctgcttagcgaaccggctttcttaaagcacttcacccatttcctgttatttctgctggcctttttcgttccctggagcgccatcagcctgaccgattactacattatttctaaaggcgcggtcgatattccggcgcttagcgatccgcatcagcgctatggtttctggaatttgtatgccattaccatttataccattggcgtgcttattcaactgccgtttattgagaacccgctgttccatggttcgctgacgtggatattcgccggcaatgatgtgtcatggattatcggctgggtaggtaccggatggttgtattatgcgctgcgccgctttgaccgccgaccattaccggcgcagagtgtgtttccgcagtga

SEQ ID NO: 88359 - DNA, 543 bp, Enterobacter aerogenes
atgatcgttcccgtccaactatccactctgcccgtcacgccctggaaaaatggcgcaggcgagacccgtgagatagtctgtgtcccctctcctgacgccccttttttatggcgagctagcattgccactttgcaaaatgatggtccgttttcctgctttcccggcgtcgaccgggtcattactctactggccgggcagccgctgcgcctgaaaggcgaagctatcgatcacgctttaacgctttggcaaccctgggcttttgccggcgagtggccgctgcgtagcgaagggatccgcgaacccggtctcgactttaatatcatgacccagcgcaaccgcgccgccgccgaggtacgggtcgttgatgatatacagactcccggcgacgaaggcgtcgcttgggtattacaggggcgctggcaacttggtgaacggcaatgtgaagcgcaatcgggtattttctggcatcagcaaacgccgggcgaactcgcgccgctcacgacggacgccctactgttactcaccacgatcgtgcgccgttaa

SEQ ID NO: 88360 - DNA, 789 bp, Enterobacter aerogenes
atgggttttctttccggtaagcgcattctgatcactggcgtggccagtaaactgtccatcgcctacggtattgcgcaagcaatgcaccgtgaaggggctgaactggcattcacctatcagaacgaaaaactgaaaggccgcgtagaagagtttgctgctgcgctgggttctaacattgtgctgcagtgcgacgtggctgaagacgaaagcatcaccgcgctgttcactgagcttgaaaaagtatggccgaaatttgatggtttcgtgcactctatcggttatgcgccggctgaccagttagatggcgactacgtcaatgccgtcactcgcgaaggtttcaaaattgcccacgacatcagcgcttacagcttcgtggcgatggcgaaagcttgccgctcgatgctgaacccgggctccgcgctgctgaccctctcctatctgggcgctgagcgcgcgatcccgaattataacgtgatgggtctggcaaaagcgtctctggaagccaacgtacgctatatggcgaacgcgatgggtccggaaggtattcgcgttaacgccatctccgcgggtccgatccgcaccctggcggcatccggtatcaaagatttccgtaaaatgctggcgcactgcgaagcggtcaccccgatccgtcgcaccgtcaccatcgaagacgtcggcaacagcgcggccttcctgtgctctaacctgtctgcgggcatctctggtgaagtcgttcacgttgacggcggtttcagcatcgctgcgatgaacgaactggaactgaaataa

SEQ ID NO: 88361 - DNA, 1161 bp, Enterobacter aerogenes
atggagcaacgccgcgtgtatggcaaaaaccactggtatcacgagacccagtcaaccaatagcccggtcgagattcttcctctggtcccggaggccgctgacgttgatgaccgttttttgctcgatctgccactcgcagccgatctcagccaccctcatgaaggctggctggcgcccgcgcgtcagttgacaaaggtccttttcccggacaacgtcacggtaacccgattacaaaccttcagcgcctacgaccgtcttagcaccgccctgaccgtcgctcaggtctacggcgtacagcgcttgtgtaaccactacgccgcccgtctggcgccgttgcctggccctgactcctcacgagaaagtaatcaccggttggcgcagataacccagtacgcccgccagttagccagttctccctcggttatcaacgaggtctcccgccgccagcttgaggaggtcgggctgaccagccgcgatattgtgttaattaaccaaattatcggcttcgtgggctttcaggcccgcgcggtggccgcatttcaggccgcgcttgggcaaccggtacgctggcttcccggtatgccgcagcagaatgatgccccggcagaacgctttactgatgttactggagagtggtccctggatatcgatgatgccgacctgcgttacgccaatgatgacaagcaagtcaggctcgccgcatggaaccgtcatcccggcctgcagcctctcgccccccttctggcaacggatgaaggcgcgttggccctgctacatcaactgctgaatcaactggataattctgcgcagcccttaagcgcaatggcggcgttactcgcggcgcgaatcaacggcagcgtcagctgttttaacgcctggagagctcgctggacaggtgacaacggattgttgcaggcattgcgcggcgatgaacgaacggttcagcactgggcgcgaagccattctttggaacacgttttcctacaggcggcgcagctattgactcgtgcgccggaccgttttagcgccgcgcagctaactcccctcactgaatatgggctttcccgcgttgaggctatcgatctgctggcgtggtgcggcctctgcgggtggctgaaccggcttaaaatcgccctcggtgaggtacgtcaagcgacgtaa

SEQ ID NO: 88362 - DNA, 1935 bp, Enterobacter aerogenes
atgtttcaggacaacccgctgctagcgcagcttaaacagcaattgcattcccagactccccgcgttgaaggggtcgttaaaggcacggaaaaaggttttggcttccttgaagtcgactcgcaaaaaagctacttcattccgccgccgcaaatgaaaaaagtgatgcatggcgatcgtattatcgctgtggtccataccgaaaaagaacgtgaaagcgccgagccggaagagctggttgagcctttcctgacccgttttgtcggtaaagtgcagaaaaaagacgatcgtctgtctattgttcctgatcatccgctgctgaaagacgccatcccttgccgcgccgcgcgcggcgtagaacacgacttcaaacagggtgactgggcggtggctgaaatgcgtcgccatccgctgaaaggcgaccgcggtttctatgccgaattaacgcaattcatcacctttagcgacgatcatttcgtgccgtggtgggtgacgctggcgcgtcataacctggaaaaagaagcgccgaatggcgttgccaccgagatgctcgatgaaggactggaacgccgcgatctgacgccgcttgagttcgtaaccatcgacagcgccagcaccgaagatatggacgatgcgctgtatgtcgagcgcgccgacgacggtaaactgctgctgaccgtcgctatcgccgatccgacagcgtggattgccgagggcagtaaactggacaacgcggcgaaaatccgcgccttcaccaactatctgccgggctttaatatcccaatgttgccgcgcgagctgtctgacgatttgtgttcgctgcgcgccaacgaagtgcgtccggtactcgcctgccgcatgactctggcggctgacggcgccattgaagataatatcgaattcttcgcagcaactatcgaatctaaagccaaactggcttatgacgacgtctccaactggctggaaaatatcggctcatggcagcctgctgatgacgctatcgcgcagcaaatcaaactgctgcaggaagtctgccagcgccgcagcgaatggcgtcaaacccacgcgctggtattcaaagaccgccctgattatcgcttcgtgttgggtgagaaaggtgaagtgctggatatcgttgccgaaccgcgccgcatcgccaaccgcatcgttgaagagtcaatgattgccgctaatatctgcgcggcacgcgtgctgcgagataacctgggctttggcgtttataacgtgcacaccggtttcgatccggccaacaccgaacaactggccgcgctgctgaagacgcacgatgtgcacgtcgatccgcaggaagtcctgacactcgacggtttctgtaaactgcgccgcgaactggatgctcagccttcaggtttccttgatagccgcatccgccgcttccagtcgttcgccgaaatcagtaccgaaccgggcccgcacttcggccttgggctggaagcttacgccacctggacttcgccaatccgtaaatacggcgatatgatcaaccaccgtctgttaaaagccgtcatcaaaggcgagaccattggtcgcccgcaggatgacgtcaccgtgcagatggcggaacgccgtcgtctgaaccggatggcggaacgcgacgtcgcagattggctgtatgctcgcttcctcaatgataaagccggaaccgatacccgctacgcggcagaaatcattgatgtcagccgcggcggcatgcgcgtgcgcctggtcgataacggcgctgtcgcctttatcccggcacctttcctgcacgcggtgcgcgatgaactggtctgcagtcaggagaacggaaccgtacagattaaaggtgaagtcgtttacaaagtcaccgatgttatcgacgtgactatcgctgaagtccgtatggaaacccgcagcgtcatcgcccgtccggcggcgtaa

SEQ ID NO: 88363 - DNA, 183 bp, Enterobacter aerogenes
atgtctgatctgaatgcccgcctgctcgcccaacgtatcgataccgtgctggatattctggttgccggagattatcactcggcgatccataatctggagatcctcaaagccgagctgcaggcgttgtctcacgacgagccagagaaggactcagggcaatcgaaagcgccgtgggaaatctaa

SEQ ID NO: 88364 - DNA, 750 bp, Enterobacter aerogenes
atgaacgcccgacaacaaagtattttgcaaatggtcatcgataaaggccgtatgagcgtagccgatctggccaggatgaccggtgtctcagaagtcactattcgtcaggatctgaattctctggaaaaacaaagctacctgcgccgtacccacggctttgcggtaccgctggatagtgaagacgtcgaaacccggatgatgaccaactttgccattaagcgtgaactcgccgcgcgcgccgcgtcgctggtggcagccggagagacggtgttcatcgaaaatggcagttcaaacgcccttctggctcgcacattggcggaacgaggcgatatcaccatcatcaccgtgagcagctatatcgcgcatttactcaaggaaacgccgggtgaggtgattctgctgggcggtatttatcagaagcgcagtgaaagcatggtgggcccgttaacccgccagtgcattcagcaggtacactttagcaaggcatttatcggcgttgacggctggcagagcgaaaccggcttcaccggccgcgacatgatgcgcgccgatgtggttaatgcggtgctggaaaaacagtgcgaagccattgtgctgagcgacagctcgaaattcagcgttgtgcatccctatccgctgggcccgatttcccgtttcaatcgcatcattaccgataataatttgcacgacactatccgccagcagctcaccgacagcggtttaaccgtcgatattgttaaccccgcctga

SEQ ID NO: 88365 - DNA, 222 bp, Enterobacter aerogenes
atgatgacttcgatgagcaaaaaaatggctgcggccgtactggcggttactgtagtaatgtctctgagcgcttgctctcactggtctaaacgcgaccgtaacaccgcaatcggcgccggcgccggcgcactgggcggcgcggtattaactgacggcagcaccctgggcaccctgggtggcgcagcggttggcggcatcattggccaccaggttggcaaataa

SEQ ID NO: 88366 - DNA, 327 bp, Enterobacter aerogenes
atgagtgattctaatagccgcctggtttactccaccgatagcggccgtatcgaagagccgaaagcggcgccgcaacgagcgaaaggcgatggcatcgtgcgtattcaacgccagaccagcgggcgcaaaggaaagggcgtctgcctgattaccggcatcgatctggatgacgacgcgctggcgaagctggccgctgagctgaaaaagaaatgcggctgcggcggttcactcaaggagggagtgattgaaattcagggggataaacgcgacttgctgaaatcgctgctggaggccaaagggatgaaagtgaaattagcgggtggctaa

SEQ ID NO: 88367 - DNA, 738 bp, Enterobacter aerogenes
atgacgtctactgctacctcttctcctcgcgttatcacatcctctcccgtcgttgttgcgcttgattatgataaccgtgacaaggcgttagcctttgttgatcgaatcgatccccgcgactgccggttgaaagtaggtaaggagatgttcacgctgctggggccgcagtttgttcgcgacctgcatcaacgcggctttgaagtgttcctcgacctgaaattccacgatattcctaataccaccgcacgtgcggtcgccgctgcggcggaactcggcgtatggatggtgaacgttcacgcctccggcggcgcgcgtatgatgacggctgcccgcgaggcgctgttgccgttcggaaaagaggcgccgttactgattgcggtcaccgtattgaccagcatggaagccagcgatttgcaggaccttggcatcacgctttctcctgccgatcatgccgctaaactggctgcgctaaccaaacgctgtggtctcgacggcgtagtctgttccgcgcaggaagccgtccgctttaagcaggagttagggcaggaatttaagttagtcacgccagggatccgccctacaggcagcgatgctggcgaccagcgccgaatcatgaccccggaacaggcgcagcaggcgggagttgattatatggtgattggtcgcccggttacccagtctgccgatccggcggcaacgcttgcggcaatcaacgcatcgctgaagcagggggcgtaa

SEQ ID NO: 88368 - DNA, 1170 bp, Enterobacter aerogenes
atgctggagttgttgtttctgctgcttcccgttgccgctgcctatggatggtatatggggcgcaggagcgcacaacagtccaaacaggacgatgctagtcgcctgtcgcgtgattacgtggccggggtcaacttcctgctgagcaatcagcaggacaaagccgtagatctgttcctcgatatgttaaaagaggacaccggcacggttgaagcccatttgacccttggcaacctgtttcgttcccgtggcgaagttgaccgcgccatccgtattcaccaaagcctgatggagagcgcctcgctcacctacgatcaacgcctgctcgccgtccaacagttggggcgcgattatatggccgctggcctgtacgatcgcgcggaagatatgttcaagcagctggtggatgaaaccgacttccgcctgggcgcgctacaacaactgctgcagatttatcaactgaccagcgattggcagtccgccattgaagtcgccgaacggctggtaaaattgggcaaagaaaaacatcgcagcgacatcgccaacttctggtgtgaactggcgctacagcagatggccagcaacgatctcgataaagcgatgacgctgctgaagaaaggcgcgtctgcggaccgcaacagcgcccgcgtctcgattatgatggggcgcgtgtggatggaaaaaggcgactacgcgaaagcggtagaaagcctggaacgggtgattggccaggataaagaactggtgggtgaaaccctggaaatgctgcaaacctgttatcagcagttgggtaagcatgcggagtgggaagcgtttctgcgccgctgtgtagaagagaacaccggtgcgacggcggaactcatgctggcgcagattatcgagcagcaggaaggtgccgaggccgcacagagctatgttacccgccagcttgagcgtcacccaacgatgcgcgtgttccacaaactgatggactaccatcttaatgaggcggaagaagggcgcgcgaaggcgagtctgggggttttgcgcaacatggttggcgagcaggtgcggagcaaaccgcgctaccgctgtcagaagtgcggttttacctcccacaccctgtactggcactgcccgtcctgccgctcgtgggcgactatcaagccgattcgcggcctggatggtcagtaa

SEQ ID NO: 88369 - DNA, 309 bp, Enterobacter aerogenes
gtgaaatatttacttattttcttactggtattagctatcttcgtcatctctgtgacgctgggcgcgcaaaatgaccaactggtcacgttcaactatttgcttgcccagggtgagttccgtatctccacgctgctggcggtactgtttgctggcggatttgccattggttggctgatctgtggtctgttctggctgcgggtacgtgtgtcgttggcgcgcgccgagcgtaaaattaaacgcctggagcagcagatcgcgccagtggccgcggcgcccgctgatgccggcgtccctgcggtcaaggaataa

SEQ ID NO: 88370 - DNA, 759 bp, Enterobacter aerogenes
atgctgttgattgccaaaaggaccgccatcggggcggcgctattgcttgttatgcccgttatagtctggctctccggctggcagtggcagccgggtcaagcaccggccatgttgaaaatgtggtactgggtgactgaaaccgtcacccagccgtggggaataattactcacgtagcgctatttggctggtttttgtggtgtttacgttttcgtctgcgcgaagcgctggtgctgtttctcattctcggcgccgctatcctggcaggacaggggcttaaatcctggatcaaagaacgggtgcaggaaccacggccgtttgtgatttggttagaacgaacccaacaggttccggtggcgcaattctatgagttaaaacgtaaagaacgcgctaaactggtgcatgagcaattggctgaacaacagacaataccggggttcttgcgtaaacactggcaaaaagagaccggttttgcctttccgtccggccatactatgtttgccgccagttgggcgctgctgggggtaggactgttgtggccgcgccggcgctgggtaactatcggtttgctgttgggttgggctactgcggttatgggcagtcgtctggcgttgggcatgcactggccgcaggatcttatcgtggcgaccagcctttcatggctgctggttaccgcggcgacctggctcacgcagcgtttttgcggcccgttaaccccgcctgttgaagaggcgagcgatatcaaaaaacgcgcaacctga

SEQ ID NO: 88371 - DNA, 591 bp, Enterobacter aerogenes
atgcagcttaaacgtgtggcagaagccaaactgccaaccccctggggcgatttcctgatggtgggctttgaagaactggcaaccgggcaggatcatgtcgcgctggtgtatggcgatatttcggggcaagccccggtactggctcgcgtacactcagaatgtctgacgggcgatgccctttttagtctgcgttgtgattgcggttttcagctggaagcggcgctgtcgcacatcgctgaagaggggcgtgggatcctgctctatcaccgtcaggaaggccgaaatatcggtttgctaaataaaattcgcgcttacgcgctacaggatcaaggctacgataccgtcgaagccaaccaccagcttggctttgccgccgatgagcgcgactttacgctatgcgccgacatgttcaaactgctcggcgtagagcaggttcgcctgttgaccaacaacccgaagaaagtcgaaattctgaccgaggcggggatcaatatcgtcgagcgcgtgccgctcatcgtcgggcgtaacccgaaaaacgaacactatctcgataccaaagctgccaagatggggcatctgctgaataaataa

SEQ ID NO: 88372 - DNA, 2700 bp, Enterobacter aerogenes
atgcatccctgtgataaaggaggagctatgtcgtcaacattacgagcagccagtaaggatacgctacaggtcaaagacaaaacctaccattactacagcctggcgctggccgctaaacaactgggcgatctcactcgactgcccaaatctctcaaagttctgcttgaaaacctcctgcgctggcaggacggcgattcggtcaccgaacaggacattcaggcgctggccggctggctggcgacagcgcatgctgaccgcgaaatcgcttatcgcccggcacgcgtgctgatgcaggatttcaccggcgtaccggcggtggtcgatttagctgccatgcgcgaagcggtaaaacgtctgggcggcgatacggcgaaagtgaatccgctctcgccggttgacctggtgattgaccactcggtgacggtggaccgttttggtaatgaaaacgcttttgaagacaatgtgcgtcttgaaatggagcggaaccacgagcgttatgctttcctgcgctggggacagcaggcctttagccgctttagcgttgtgccgccgggtaccgggatctgccaccaggtgaaccttgaatatctcggccgtgccgtctggagcgaactgcagaatggcgaatgggtggcgtacccggatacgctggtgggtaccgattcgcacaccaccatgatcaacggccttggcgtattagggtggggtgtcggtgggattgaagcggaagccgcgatgcttggccagccggtatccatgctcattcccgatgtcgttggtttcaagctgaccggtaaactgcgtgaagggatcaccgcgaccgacctggtgctgacagtgacccagatgctgcgcaaacacggtgtggtaggcaagttcgtcgaattctatggcgatggcctcgactcgttaccgctggccgaccgggcgaccattgcgaatatgtcgccggaatatggcgcgacctgcggattcttcccgatcgatgcagtgaccctcagctatatgcgcctgagcgggcgcagcgaagagcaggtggcgttggttgaagcttatgccaaagcgcagggtatgtggcggcagacgggcgatgagccggtctttaccagcaccctggcgctggatatgggcacggttgaggccagcctcgccgggccgaaacggccgcaggatcgcgtcgcgttgggcgatgtgccgaaagcgtttgccgccagtaacgaactggaagtgaatcaaacgcaaaaatcgcgccagccggttgattatacgctcaatgggcaacgctattcgctgccggaaggcgcggtggcgattgcggcaatcacctcatgtaccaatacctccaacccgagcgtgctgatggccgccggcctgctggcgaagaacgccgttgagcgcggcctgaaaccgcagccgtgggtgaaagcctcgctggcgccgggttcgaaagtggtttctgattatctggcgcatgccgggttgacgccttatcttgatgagttgggctttaacctcgtagggtacggttgcacaacctgtatcggtaactccgggccgctgccggaacctatcgaagaggccatcaaaaaaggtgacctgaccgtcggcgcagtgctctccggcaaccgtaacttcgaaggtcgtatccatccgctggtgaaaaccaactggctggcgtcgccaccgctggtcgtggcttatgcgctggctggcaatatgaacattgacctgacccgtgaaccgctcggcgtcggtaaagacggtaagccggtgttcctgaaggatatctggccgagcggcgaggagattgctcgcgcggtgcagcaggtttccaccgacatgttccgtaaagagtatgccgaagtcttcgaaggcaccgaggagtggaaagcgattcaggttgagcgttccgatacctatcgctggcaggatgactctacctatattcgcctgtcgccgttctttgatgagatggaggttgagccgaaaccggtagaagatattcacggcgcccggatcctggcgatgttaggcgattcagtgaccaccgaccatatctctccggcaggaagcatcaaggcagatagcccggcaggacgctatttgcaggagcacggcgtggcgcgcggtgatttcaactcttatgggtcgcgacgcggtaaccatgaagtcatgatgcgcggcacctttgcgaatatccgtatccgcaacgaaatggtgccgggcgtggaagggggaatgacgcgtcatttgccggacacgcagcctatcgccatctacgatgcggctatgctgtataaagctgaaggtacccctctggcggtgatcgccggtaaagaatatggctcaggctccagccgcgactgggcggcaaaagggccgcgtctgttgggcgtgcgggtggtcattgccgagtccttcgagcgtattcaccgctccaacctcattggcatggggatattaccgctggagttcccgcagggcgtgacgcgtaaaacgctacagctgaccggtgaagagcggatcgatatcagtaacctgcaggcgctgcatcctgcggcaacggttccagtcacgattacccgcgccgatggacagcaggaggtcattcagtgtcgctgtcgtatcgatactgcgacagaactgacttactatcagaacgacggcattctgcattatgtgattcgtaatatgctgtaa

SEQ ID NO: 88373 - DNA, 975 bp, Enterobacter aerogenes
atgaaactacagcaactccgctacatcgttgaggttgttaaccataacctgaatgtctcctctaccgccgaaggtttgtatacttcgcagccaggcatcagcaagcaggtgcggatgctggaagatgagttagggattcagatatttgcccgcagcggtaagcatttaactcaggtcactccagccgggcaggaaattatccgcatcgcgcgcgaagtgctgtccaaagttgaggccattaaatccgtggcaggggagcacacctggccggataaaggctcattgtacgtcgccaccacccatactcaggcgcgttacgcgctgcctggggtgattaagggctttattgagcgttatccgcgggtctctttgcatatgcatcaggggtcgccgacgcagattgcagaagcggtttcaaagggcaatgccgactttgccattgctaccgaagcgctgcatctgtacgacgatttggtgatgctgccgtgttaccactggaaccgctcaattgtggtgaccccggatcacccgctcgcttctaaaggctcggtgaccatcgaagagctggcgcagtacccgctggtgacttataccttcggctttaccggacgttccgaactggataccgcgtttaatcgcgccgggctcactccgcgtatcgtcttcaccgcgactgatgccgatgttatcaaaacctatgtgcgtttagggcttggcgttggggtcattgccagcatggcggtcgatccggtgtccgatccggacctggtaaaacttgatgccaatggtattttcagccacagcaccaccaagataggcttccgccgaagcaccttcctcagaagttatatgtatgattttattcagcgttttgcgccacatttgacgcgggatgtggtagacacagccgtggcgctacgttcgaatgaggatatagaggcgatgttcaaagatattaaactgccggaaaaataa

SEQ ID NO: 88374 - DNA, 2598 bp, Enterobacter aerogenes
atgggtaaagctctcgttatcgttgagtccccggcaaaagccaaaacgatcaataagtatctgggtaatgactacgtggtgaaatccagcgtcggtcatatccgcgatttgccgaccagtggctcagcttccaaaaagagcgccgactctacctccaccaaaggggctaaaaagcctaaaaaggatgaacgtggcgctctggtcaaccgcatgggcgtggacccatggcacgactggaatgcgcattatgaagtacttccgggtaaagaaaaggtagtttcagaactcaaacagttggcggaaaaagccgaccacatctatctcgcaaccgaccttgaccgcgaaggggaagccattgcttggcacctgcgggaagttatcggtggtgatgagcaacggtacagccgcgtggtgtttaacgaaatcaccaaaaacgcgattcgtcaggcctttgagaagccgggcgagctgaatatcgatcgtgttaatgcccagcaggcgcgccgctttatggaccgcgtggtggggtatatggtttctccactgctgtggaaaaaaattgcccgcggtctgtccgcaggacgcgtgcagtctgtcgcagtccgcctggtcgttgaacgcgagcgcgaaattaaagccttcgttccggaagagttctgggagatcgacgccagtactaccacgccgggcggcgacgcgttaccgctgcaggtgactcacaagaatgacaagccgttccgtccggttaaccgcgacgaaaccatggctgccgtcgcgctgctggaaaaagcgcgctatagcgtgctggagcgcgaagataagccgaccagcagcaagccgggggcgccgtttatcacctccacgctgcaacaggccgccagcactcgtcttgggttcggcgtgaagaaaaccatgatgatggcccagcgtttgtatgaagccggccatattacctacatgcgtaccgactcaaccaacctgagtcaggatgcgctgaacatggttcgcggctatatcggcgataacttcggcaaaaaatacctgcctgaaaacgcgaatcagtacgccagcaaagaaaattcgcaggaagcgcacgaagcgattcgtccttctgacgtgaacgtgatggcggaatcgctgaaagacatggaagccgatgcgcagaaattataccaactgatttggcgtcagttcgtcgcctgtcagatgacaccggcaaaatacgactcaaccaccctgacggtacaggctggcgagttcaaactgaaagcccgcggtcgtacgctgcgctttgacggctggacgaaagtaatgcccgcgctgcgtaaaggcgatgaagaccgtacgttaccggtggtcaatcagggcgacagcctgagcctggtggaactgaccccagcgcagcacttcaccaaaccgcctgcgcgtttcagcgaagcctcgctggtgaaagagctggaaaaacgcggcattggtcgtccgtccacttatgcgtcgatcatttcgaccatccaggaccgcggctatgtacgcgccgagaaccgtcgtttttacgctgaaaagatgggtgaaatcgtcaccgaccgtctggaagagaacttccgcgatctgatgaactacgattttaccgcccagatggaagaccgcctcgatcaggtggctaatcatcaggccgagtggaaacaggtactggataacttctttggcgatttcacttctcagctacagactgctgagaaggatcctgaagaaggcggcatgcagccgaacccaatggtgctgaccagcatcgactgcccgacctgcgggcgtaaaatgggcattcgtaccgccagtaccggggtattcctcggctgctctggctacgcgctgtcgccgaaagagcgttgcaaaaccactattaacctggtaccggaaaacgaagtcctcaacgtgctggaaggcgatgatgccgaaaccaacgcgctgcgcgctaaacgtcgctgtcagaaatgcggcaccgcgatggacagttaccttatcgatccgaagcgcaaactgcatgtctgcggcaacaacccgacctgcgatggctatgagattgaagagggcgagttccgtatcaaaggctatgacggccctatcgtggagtgtgagaaatgcggctccgaaatgcacctgaaaatggggcgttttggtaagtacatggcttgtaccaacgacgagtgtaaaaatacgcgtaagatcctgcgtaatggcgaagtggctccgccgaaggaagatccggtgcctttaccggaactgccatgcgagaagtccgacgcttacttcgtcctgcgcgatggcgcggcgggcgttttcctggcggcaaacaccttcccgaaatcacgtgaaacgcgtgcgccattagtggaagagttgtaccgcttccgcgatcgcctgcctgaaaagctgcgttatctggccgatgcgccgcagcaggatccggaaggcaataaaacgctggtacgctttagtcgtaagaccaagcaacagtacgtctcctccgagaaagagggcaaagcgaccggctggtccgctttctttatcgacggcaaatggactgaagcgaaaaagtaa

SEQ ID NO: 88375 - DNA, 252 bp, Enterobacter aerogenes
atgcaaggtacaacccaacccatcgaacgccaggcgttacttgaaattgccaaccaactcattcgcgatcatgaagatacgttagccggaattgaagccaccaacgtcgttcagcgtaacggggttttggtgttcagcggcgagttttatcttgatgaacaaggtttgccgacagcgaagagcactgccgtatttaacatgttcaagtatctcgctcatgagttgtcagataagtatcacctggttgattaa

SEQ ID NO: 88376 - DNA, 1092 bp, Enterobacter aerogenes
atgtacactgtgcgtcaacgtcagtgctttacacaaggtgaaaacgtggaattacttgctcagtacggcttatttttagccaaggctgcgactatcgtcgtcgccattgcggttatcgccgccattatcgttaatctgactcagcgtaagaagcagcgcggcgagctgcgggtaacgaatcttagcgagcaatataaggagatgaaagaagagctggcggtggcgctactggatggcccgcagcaaaaactctggcataaagcgcagaagaaaaaacataagcaggaagccaaagaggccaaagcgcgggcaaaattgggtaccgcggaacccagcggcaaggcgcgtgtctgggtgctggatttcaaaggcagtatggatgctcacgaggtaagcggcctgcgcgaagaaattacggcggtgctggcttcggcgaaggcgcgcgaccaggtggtggtgcgtctggaaagccctggcggggtggttcacggctatggcctggcggcttcgcagctgcagcgcttacgtgataaacaaatcccgctaacggtcgcggtcgataaggtcgctgccagcggcggctatatgatggcctgcgtggcgaacaaaatcgtctgcgcgccgtttgctatccttggctcgattggcgtagtggcgcagatccccaacatcaatcgcttcctgaaaaataaagacatcgatattgaactccataccgccgggcaatataaacgcacgttaaccatgttgggcgagaacaccgaggaaggtcgacagaagttccgcgacgatctcaatgaaacccatcagctttttaaagatttcgtccatcagatgcgcccgtcgctggatatcgaaaaggtggcgaccggcgagcactggtacggtgtgcaggcgctggaaaaagggctggcggatgcggtacagaccagcgatgaactcctgttgagcatgatggataatcacgatgtgattagcgtgcgttatcagcagcgtaagaaattgctcgatcgcgttaccgggagcgcggcggaaagcgctgaccgtctattgttgcgctggtggcagcgtggacaaaaaccgttaatgtaa

SEQ ID NO: 88377 - DNA, 762 bp, Enterobacter aerogenes
gtgcactatcaaccgcaatatcacctacttaaagaccgtatcattctggtcaccggcgccagcgacggcattggccgtgaagccgccctcacctatgcgcgctacagcgcaagcgtggtcctggttggccgcaatgaagaaaaactgcgcggcgtcgcgcaagaaattgaacaggctggcggtattgcggcacgctggtttaccctcgacctgttgacctgcacgccgcaggagtgccagcagctggcgcagaaaatcgcgattcactacccgcgccttgacggcgtgctgcacaatgccggcctgcttggcgacgtctgtccgatggaccagcaggatcctgaggtatggcagcaggtgatgcaggtaaacgttaacggcacgtttatgctcacccaggcgcttcttcctttattactcaagtccgattccggctcgctggtgtttacctcttccagcgttggccgccagggccgcgccaactggggcgcctacgcggcctctaaattcgctaccgaagggatgatgcaggtcctggccgaagagtaccaaagccgtcatctgcgggtaaattgtattaatcccggcgggacgcgtaccaaaatgcgcgccagcgccttcccgacagaagatccgcaaaagctgaaaccccccgccgatatcatgccggtctatttatggctgatgggcgatgatagccggcgcaaaaccggtatgaccttcgatgcccagccggggcgtaaaccagggatctcccaatga

SEQ ID NO: 88378 - DNA, 591 bp, Enterobacter aerogenes
atgagcgatcaacgctaccgcgagcgccagcagcgggtaaaagacaaagtcgatgcgcgggtcgccgccgcccagcaagaacgcgggttgatcatggtatttaccggtaacggcaaaggcaaaaccaccgccgccttcggtaccgtcacccgtgcggttggacacggtaaaaaagccggcgtggtgcaattcatcaaaggtacctggcctaacggtgagcgtaatttgctggagccgcacggcgtcgagttccaggtgatggccaccggctttacctgggatacgcaaaatcgcgacagcgataccgccgcctgtctcgatgtctggcagcacgggcgccgaatgctcgccgacgatagcctggatctggtactgctggatgaactgacctacatggtggcttacgactatctgccgctggaagaggtgctgacggcgctgcgcaaccgcccagcgcatcaaacggtgatgattaccggccgcggctgccaccgcgagattatcgagatagctgacaccgtcagcgaactacgcccggtaaagcacgcctttgacgccggggtcaaagcgcagatggggattgattactaa

SEQ ID NO: 88379 - DNA, 975 bp, Enterobacter aerogenes
gtgttcccgttttcagtgacgcatccccgtcaggtgacacaaagcgggcagccggcgaccaatagcggctacgagctgatcgccttcgacgctgagaaactcaacgtcttcgccgccgaggtgcgctactgcgaacctcactggcacccggcgccggagcttatcaccgtcctgcatggcggtttcacgctggccgtcggccagcgggagtggcaattgcgcgcgggcgatatgttgtatatcaacgcggaggaggtgcattcactcagcgcggagatgcccggtagccaactggtcaccgtgcagttttcgccaggtctgtttgatgaaatgcatccctctccgcggctggagtggtgtaccgccgggcgtattgcgcagagcgtggattggcaggtgcgccagcggttaacggcgctgctgcaacagcttgtcgataaccgtacgccattccagcgtatcgcggcgatatatttgctgcttgatgcattggtgacggcaggagagcctcaggagcgtgaggagagctcgctacgcgaagagtcgatgattaaaaaaggcattgattatattaatctgcattacgaccggccattgaccttgagcgaagtggcagagcacagcggcatgagctattcgtggttttcccggctgtttaagcgggtgagtcgttacaactttaaagagtatctgaccttggtgcggctgaataaggctcgcaatctactgcgtgatacgcgtacgccgatcaccgaaatcagccatagctgcggttttcaggagcacaaatacctgatcgccgcctttaacaaatactgcggactgacgccgacagagtaccgcaaacgctttgtttcgcggcaaaacgtcctcgaccaacagctggcgctcggcgaggactgcgtatgcctgccattaaacggccaactgctggcgaggctggcggttagtaatcaatccccatctgcgctttga

SEQ ID NO: 88380 - DNA, 2349 bp, Enterobacter aerogenes
atgaacaacgattttagtaccgttatcgccgccatgtcggtagaggaaaaagtggcgctgctgaccggcagcggcctgtggcgcacggcatcgatgccgcagcacggtatccccgatatcgtgatgaccgatggtacctacggcgtgcgctatagcagcgcgcaaatagatggcaatgaaaagtggagcatggatgacttcatctcggtgattacccaaaccgccgaccaggccagcgccgacgagcctgtcgccaagggcggcagcgaagcgttgttcagcgcctcgctgccggccacctgttttccgaatggctccagtctggcctgtagctgggatgttgaactggtacgggagatgggcgaagcgctgggtcgcgaatgccaacagatgggggtgggtattctattggggccgggaattaacattcggcgcaccccgctggctggacgcggctatgaatactattcagaggacccggtcgtaagtggggatatcgccgcggcgctgattaacggcttacaggccgaaggcgtcggcgccagccttaaacattttgccgccaataactccgagtatcggcgtaccgaaatggattcgattattgaggagcgggcgctgcgtgaaatctatctcgccggatttcaacgagcgatcgccaaatcccagccctggacggtgatgtcttcttataatcgtcttaatggcgttcaaacatcgcaggatccgttcttactgacccaggtattgcgtgatgaatgggggtatgacggtctggtgatgtccgactggtacggtattaaagatcgcccggcatcgctgcttgccggcaatgacctggcaatgccggaaacccgccgggacaaacaaaccctgctggcggcaatctcctgcggcgaggtaccgatgccggtggtcgaccgggcgtgtctgcggatgctggaactggttgataaagtgcaacgacatcgccggccgcacacgcgtgctgactttgccgcacaccatgcgttatcgcagcgtttagcggcagaatccatcgtattgctgaaaaatgaagacaacctgctgccgctgaagccacacaaaacgccgcgcatcgcggtgatcggtaaacccgctcaggagccggttattcagggctcgggttgtgccaccacggttccctatttactcgaccgtccgctggatgagattttcgatcttgccggggatgactttaaggtcacttgggcgccgggcgcgccagacgacaatcaaagcgacgagcaggcgctggcgcaggcgcgtgacgtcgccggagccgccgatgtggcagtgatttttgtcagcacggcggtcggtgaagatggcgagaatggcgatcgccaggatctgaatattcttcccgcgcacgaacagctgatccgtgaggtcgccggggtacagccaaacgtggttgtggtgttggccaacagcgatgcggtggtgatgccatggcttggcgaatgccgggcgctgctggaaaccttcttcgccggacaggggatggggcgcgctgtggctgaaattctcttcggtaagcgcaacccctgcggtaagctaaccgtcacggtgccaaataccctcgaagagacgcctgcctggctgcagtatccgggggaaaatctgcgtcatcactatggcgagggcctatttgttggctatcgctattacgataaacgccttctttcgccgcgtttcccgtttggctttggcctgagctatacccaattcagctatgccaatcttgcgctttccgcatcgcggcttgccgaaggcgaaaccctgcgtgtcgcctttgatttaacgaatatcggcgattgcgagggcaaggagattgtacagctgtatgttacggccccgaaaggggagctgatccgcgaggttcgcgcgctgaaagcctttagcaaagtgtcgttgctggcaggggaaacgcgtcgcgttgagcttgcgctgcccgtcgctgatttagcctgctatcatccggggctggcggattggctggtgacccctgggcagtggcaaatctacgtgggcgcctcgtctcgcgatcttcccttaacggcaagcgttgagattgattgccctgcgcgctacgtaccgctgcgcgacgacaattctctgcagcagcttattcaacagccggaagcctttgcccgcgtggtggcgctgatatcggcgaagagcggggtagcgcctgacctggtacgtgaaaagcttatccgcctggcgccagatctgttctgtggtttgctgattgcattgactgagttcctggcgctggatatcgatcgcgacgaactcaatgccgtgctggcgggtcattaa

SEQ ID NO: 88381 - DNA, 1362 bp, Enterobacter aerogenes
atgagtacaacaacaaagttatcggcaagctatgtggtcatcggcgtaaaagaaaagataggctatggcttaggcgatttcgcctctaatttatcgttcggttttgtctcgttattcttactgtttttttatactaatgtttatggcatcagcgcggtacaggcgagtctgatctttgtgattgcccgggtgattgacgcaatttttaatatcctgattggctttgcaattgataaaacgcagagtaaatatggcaaattgcgtccctggctattatatggtgcgataccgttaggctttttaaccgtgttgtgttttgtgccatttggcggggaagctaaattttatttcgcgctggcctcctataccatctattgcctggcctatacggcggttaacacaccttattcggcattgaccaaccgcttgacgcagcatgaggcctcgcgttcgtcgctgtcggtatatcgctttgtgttggctattgtcgggtatctgattgtttccacaacggcagactggctgatttcgccctttaacgacaaacaaatgggctatgtctttgccgtttcctgctttgcactgttagcgacttttatgtttcttgcctgttttggcatgaccaaagaacgcgttggtgaagaggataaaatgaatgcgccgacgcttcgcgaaatgtttcgtgcggtattaggtaatgcaccactgattcatctttcattatttaccgtgtttttctatatcgcctataccgtatggatggcgatcgctatttactttattaaatacattatcggtagcgaagggtttaccgctactttcttcatgattcagtctggcgcttatattattggaaccattatctctgagaaagtgattgcgttaatggggaaaaagaagatggcgcttctggcgttgttaattggcgtgctgggagtgctgatgcaatatttcatcgctggtaataacctgtggctgataatgatcggcgtgtgtctttacagcattacgcttggcatgggctttgtcgccatgtggtcgatgattgccgacaccgtcgaatatgctgaatggcatcacggtgtgcgctctgagggggccatctacggtttctttaacttcatcaccaaaattgcgatggcgattggcggcggctgcgcgggctggatgctggatctttatcactatgatgcgggtaatgtgaccagcgatgcgattaatggcatcaatattctgatgacgcttttccccggcgcaatgttcgccatcagcgccatcttcgtggcctgctatgcgttagatgaaaaaacctatcgcgatatcgtgcagaaaatcagcctgcgtaagcaaaacgcgctttaa

SEQ ID NO: 88382 - DNA, 903 bp, Enterobacter aerogenes
atgagcgagaaattacagaaagtgctggctcgtgctggccatggctcccgccgcgaaattgaaactatcatcgaagctggacgcgtcagcgtggatggtaagatcgcaaccctcggcgatcgtgttgaaatcgtacctggtttgaaaatccgtatcgacggtcatcttatttcggtaaaagaatctgccgagcaaatttgtcgggtattggcctattacaaaccagaaggcgaactctgcacccgtaacgatccggaagggcgcccaacggttttcgaccgtctgccgaaactgcgcggcgcgcgctggattgcggtaggtcgcctcgatgtgaacacctgcggcttgctgctgtttaccaccgatggtgaactggcgaaccgtttgatgcacccaagccgcgaagttgagcgtgaatacgccgtccgcgttttcggccaggtcgatgaagacaaactgcgccagctggcgcgtggcgtacagttagaagatggccctgcagcgtttaaaacgattaagttcaccggcggtgaagggatcaaccaatggtataacgttaccttgaccgaagggcgcaaccgcgaagtgcgtcgcctgtgggaagccgtcggcgttcaggttagccgtcttatccgcgtacgctacggcgatattctgctgccgaaaggcctgccgcgcggcggctggactgaactggatctggcgcagaccaactatcttcgtgaactggtggagctgccggcggaaaccgaaagcaaagtagcggtggagaaagatcgccgtcgtatgaaagcgaatcaaatccgccgcgccgtcaagcgtcatagccagaccagcggcaatcctcgccaggggaataacggcaaccgccgttccagcacccgcaacaagactaacggctaa

SEQ ID NO: 88383 - DNA, 2583 bp, Enterobacter aerogenes
atgcaaatattaaaaaaacagctttcggtcaacagctacccgttcaccctaactcaggccatcatatttaccttagccacgacaattctcgtcgtgctgctgacgacatatgcttttctctactacgaaggttatgctttttttgatgaggtgagtgaggatattctgcgtgcgaaaagagtcaatatcgaggaagtcatccacgattatattgatgttcccgcgcaatcgaacgcgatactagttcatgcgatcggacgtcaatccagtacggcgatcccggttcgcagcctgatcggcgaaatggtcaataccaccaataacgtcttcagcaacaaacattatctgaatttggtcggatttggcgcggtcaatggcgattttattcaagtggcgcgcggccaggccgagtcgaatgattatcttgcggtaaaagatgcgcaaacagatcaccatcttacggcttatagtcacctgacggtgaattcattagtaaaagcggtgcgtgcggattatcaaataacgcagcgcgaatggtatgcggcggttgccaaagaccagcgtccgcactggacaaaaccctttcgcgattatgaatatgaaaatgaaattggcgttgcgttcagctcaccggcattcaatcgccagggacagtttgttggcgtcgtcgccagcgagttgcacctcaacgaactaaataaaagcctggaaaaatttaaaccccatcctgaaagtattctgctgattgttaatgaaaaaaatgagctcatttcttcatcagtgccatcattgacgcgaaatatgctggccgggggaaaacactcacggctgaatctacaaacgctcgaaaacactcatttaccggttgttgtggcagccagtcgcacgttaaaagcgaatcaccatacgggattgcagtttttcagttccggcaaagaagaatattatgttgatgcttttccaatcaccgaccgtgatgacatattgcactggacggggattgtgattagcccggcgagaatgattacccataccatcattaaatatatagccattaccatgagcatgctgtttgtcatttttgtacttggtctgctggtggttttctatggcctggcgaaggtggtaaaacctctgcgagatattgtccgtaaagcggatcagcttgcgacgcaccgctggacgccgccagataataagcgacatttcccggaaatagcctctctggaaaccacatttatggcgctatcgcataagctggcagaaagtttcgacgcccaacggcgtgaaatagaggaggataaaaccaccgggttattctcacggacagggttactgcgtcagacatcgctatatcaaggtagaaacctgctcgcgctggtgcatatcagtaatatgaacgctattatcaattccttaagtacggagtatggtgaaaaatttattagcgattatattcttcgcctgcataatttactgccgacgaatacgctgattgcccgcgatacagtggataagctcatcgtggtttttccaggacaaactcagccaaaagagcgtcagcgctacagagaactgctctcctcactatttatcgacgtcaataatgaagcgtctcctacggcaagcaaatacgtttataccggcaatattggcctggtgacgactgagatccacgcagagaatattgaacaaacgttgcgtgaggcatggattgcattacgccatgcgcagaaacagggaaacggcgttgcgacgttttacagctgcgagatgcatgaggctgagctttataatatccaactccatgagcatcttcatgatgcgatccagcaacatgaatttcatctgatgctacagccaattgtggatttgcaggatcaaagcgcttttcaggaaggagaatgtttgcttcgctggcgctccgaaacggtaggcgaaatttctcccgatcgtttcctccccctggcggaagagagcgggttgataatcccgctgggacgctggattattgaacaggcctgtcgggaactttccgcgatgattctccgcggggcgccggcgaactttattctgcatatcaacgtatcggcgattcaactcctgcaacaggattttgcctggcatttaatggatgcgatttatcgtcatgggctggtcacgggcaatatttgtcttgagataaccgaacggttattgatgaatgatgctgtgcgaattagccggatgattgcttatctccgccgccatggtattgccgtcgcgctggatgattttggcgtcaatttatccagtttgccttatttacatacgctgtcatttgatagcatcaaaattgaccgccgtctgatttgccaatttgccgatgatgataaagcagaatcgatgattgcatcgctgattgtgctggctcaggggtttaaggtacccgtcgttgctgagggtattgaagatgaggcgataaaaaaccagttacgcgacctcggttgccagaaagcgcaaggttatctgtttggtcacccggcgccatttgccgactttcccttcctggcaagtgcattgacggcgagcgataatctatag

SEQ ID NO: 88384 - DNA, 2481 bp, Enterobacter aerogenes
atgccaaagctgaccccaaatacctatcccatcaccctggtaaaaagcgtgctggtggtttcactgctggcgctaatactgattattatcagtttgactggcttgtttaactatcagtcgcgtcaggtcagtagtgccattgataaaaaaatcattggttctcagtatgcgtttattcagcatacacttgaggatgccgtcgatcgcccacgacaaataacgaatctatttttacaatatattcagggcgaaagtaacaacatcgataaggatactttagttcctgaaatggtgtatttgacggcgcgcgcgtttaaaactatgcccgccttccagagcctgtcgtggtttgcggaaaatggctccagtattgctgttattcgtgacaatcatagtaatcaaatttatttacaacgaacccagcgtgataatcatcactccctggttaaatacagcgggttaagcccgcagaccaatattgtcaacgtcaataacgcgtttaatgttgctgatttacagcagtttcgccgcgctcgccagcaaacgcaaggtttctggcaacgctctctctctaccggcagtttgatcatgagctggaaccagccagtgtacgataaacaaggccgcttcatcggggcgatcgccagcggcgccacacctgcagatatgaccgcttatttacagagtctcctgccggataaaagctatgctcttctgcttatcgatgacaacaatcgcattgtcgcgcgttccggcaaccaacataaatggcagcaggaccgccaattgatagcaaagcttacctcggcgcagccgtcgccgacgtcattttccttgcgtacagaggacgagtctttgttggcgatcgcctttagcgtgcaggaccgccaacatctgctgaactggaaggcggtacttatcgcgccacagcatgcggaaatggcggaaatgaataaacagcgtcaacttgtgaccttcgccacgacactgtttatttttattctgatattgattctgatgatgattatttctcatttcaccggcgccttaaaggacgttgcagataaagtgcgtctggggttaatgccgtggaagaaaccaactaaacgcgtatttccggaaatagcatcgttggatgcagcattgagcaacctgtatgcaattattccagacactttcgaatctaaacgccggaagctggaagaagatagcgaaaccggttttttaacccgtagcggtttactgcattgtgagtcgctgtaccgtcatcgcaatatgctggcgatggtatacgttaacaactacaactcggttaagaatgtgctcggtacgactcaggcccgacagtttattcaccagtttactttacgccttcgcaaaatattgcctgaaggggcattatgttgtcgtgatcgagaagacttgttcattatcgcttttgatggcatgtatgccgaaaaggatgtcgactggtacagcgcgctacttgcttctgtttttcgtatgtctgcttctgatatgcccggcgaatcgcatatatttactggccatattggcatgttgattgaatcattaaccccagagaacatcggcgaatgtctgatgaatgttagtctggctttacagcatgcccagatggagcgtagcggtacgagtaaacttttcacggccgccatgcgtgaagaggaagtgaataatctgcgtctgcatcaggcgttatgcgacgatctccattcggaaggtttccatctcgttttgcagccgatcgtttcatttgaatcgcagcggccttgtaaagaaggtgaatgcctgatccgctggcaatcaaatgtgttgggcttcgtgccgcccgacaaatttatcgcccttgccgagcacaccggcatgattgtgccgttagggaaatggataattgaaaccgcctgtcgtgaacttgccgcgtttatcacgcgcggcgcgccgcgtgattttaaactgcacgtcaatatctcggcaattcagcttcagcaacctgattttgctcagcatctgctggaatcaattcacgctaatgatttgatgaacagcaatatttgtcttgaaatcaccgaaagcgtcttgctgcatgacacgtggcgaattgtcgaaatactggcttatctacgtcgtcttagcgtatgtatagcgattgatgattttggttccggttattccagcctctcgtatctgcattcgctgccatttgattgtctgaagattgaccgcgggtttgtcagcaatgtacttaacgataaaaaaagcgaagcggttatcgcctcggtgttaatgttggcgcgaagtttttccgtgccgctggtggccgaaggcgttgaaacgcgcgaaatggcagaaaaactgcaggagatgggctgtgatttggcccagggatattattattcccggccgaaaacgtttgatagttttgacgtcgccaatgggtttttcgttgttgaaccggaatga

SEQ ID NO: 88385 - DNA, 621 bp, Enterobacter aerogenes
atgagccagtttttctatatccatcccgataatccgcaggcgcggttgattaatcaggcggtggaaattgtgcgtaagggcggggttatcgtttatccaacggactctggctatgccctgggttgcaaaatcgaagataaaggggcgatggagcggatctgccgtatccgtcagttgccggatggccacaatttcaccctgatgtgccgcgatctctccgagttatcgacctacgcgtttgtcgataacgtggcgtttcgtcttatcaaaaacaatacgccgggcaactacacgttcattcttaagggaacgaaagaggtgccgcgccgcctgttgcaagaaaagcgtaaaaccattgggatgcgcgtgccggcgaaccctatcgcccagatgctgctggaaacgcttggcgaaccgatgctctcgacatcgttgatgctgccaggtaatgaattcacggagtccgatccggaagagattaaagaccgtctggagaaggtggtcgatctgattattcacggcggttatcttggccagcagccgacgacggttatcgacctgaccgaagacgcgccggtggtgcttcgtgaaggcgtcggtgatatcaaacccttccagtga

SEQ ID NO: 88386 - DNA, 882 bp, Enterobacter aerogenes
ttgagcgacactaattacgcggtcatttatgacctgcacagccataccgtcgcctccgatgggcgattgactccagaagagctggtacatcgcgcgcatgagatgcgggtggggacgctggcaatcaccgatcacgatagcgtggcggcaattccggcagcgcgtgccgaaatagcgcgggctgaactgccgctcacgcttatcaccggggtagaaatttccaccctgtgggaaaatcacgaaattcatatcgtcggactgaatattgatatcaaccatccggcgatgacgcaactgctctgtgaacagaaagcgcggcgcaaccagcgcgggcagatgattgccgaacggttggagaaagcgcgtatccccggtgcctgggaaggggcgttaaagctcgccaatggcggcgcggtcacccgcggccattttgcccgctttttagttgaagccggctttgcgagcaatattgccgatgtattcaaaaaatatctcgcccgcgggaaaaccggatacgttccgccgcagtggtgtacaataaaacaagcgattgatgtcattcatcattctggcggcaaagcggtgatcgcccatccggggcgttacgatctttccgccaaatggttgaaacggctgttggcccattttagcgagcagggcggcgacgcgatggaggtcgcccaatgccagcaggcgccgcatgagcgcgcgcagctggcgagctacgcgcaacagtttggtttgatggcgtcgcagggttcggatttccaccagccttgcccgtggattgaactggggcgcaaactttggctacccgctggcgtggaagggatctggcgcagttgggaagtggccgctgaacaaattgagagggaagtatga

SEQ ID NO: 88387 - DNA, 1563 bp, Enterobacter aerogenes
atgcaaacatcaaaaccagcgctcgagcttctcaccagcgacgccatctatcgcgaaaacccgacggcgttattccatcaattatgcggcgcgcgcccggcaaccttgctgctggaatcggccgacatcgatagtaaagacgatttaaaaagcctgctactggtcgatagcgccctgcgcattaccgctcttggcaataccgtcactgttcaggcgctgtcagcgaacggcgccgcgctgcttgaactgctggataacgcattgccgtccggcattgagaatctgcgccagccgaacagccgggtactcaccttcccaccggttagcgccctgttggatgaagacgctcgcctgtgctcgttatcggtgttcgatgcgtttcgtctgttacaggatttggtcagcgtcccgcaggccgagcgcgaagcgatgttctttggcggcctgttcgcttacgacctggtggccggttttgaggatttaccaccgctcaataccgataccgcctgcccggattactgtttctacctggcggagacgctgctggttatcgatcaccagaccaaaagcacccgcattcaggcgagcctgttcacgccgctggagaatgagaaacagcgtcttctgcaacgtatcgcccagcttcgccagcagttaaatgaaccgcccgcgccgctgccggtaacgacggttgccgaaatgcgctgcgacgtcgatcagagcgatgaagagtacggcgccgtggtgcgcaaaatgcagcgcgccattcgcgcgggcgaaattttccaggtcgtgccgtcgcgccgtttctcacttccctgcccgtcgccgctggcctcgtacgatgtgctgaaaaagagcaatcccagcccgtatatgttctttatgcaggataacgatttcaccctgtttggcgcatcgccggaaagctcgttgaaatacgacgccgtcagccgccagattgagatctaccccattgccggcacccgtcctcgcggccgccgcgccgatggttcactggatcgcgatctcgatagccgtattgagctggagatgcgtaccgaccacaaagagctttctgaacatctgatgctggttgacctggcccgtaacgatctggcccgcatctgtaccccgggtagccgctacgtagcggatttgaccaaagtcgatcgctactcttttgtgatgcatctggtttcccgcgtggtcggcgaactgcgccgcgaccttgatgtcctgcacgcctaccgcgcctgcatgaatatgggcacccttagcggcgcgccgaaagttcgcgccatgcagctaatcgccgccgcggaaggcaagcgtcgcggtagctacggcggcgcggtcggctactttaccgcccatggcgacctcgatacctgcatcgtgatccgctcagcctacgttgaggatggcattgccaccgtgcaggcgggcgccggtatcgtgctcgattccgttccgcaatccgaggcggatgaaacccgtaataaagctcgcgccgtgctgcgcgccattgctcaggcccaccacgcgaaggagactttctaa

SEQ ID NO: 88388 - DNA, 1596 bp, Enterobacter aerogenes
atggccgacatcctgctgctcgataatatcgactcctttacctataacctcgccgaccagctgcgggctaacggccacaacgtggttatttatcgtaataccgtaccggcgcaatcgctgattgaacgtatcggcaccatggataatccggtgctgatgctctctccggggccgggaaccccaagcgaagccggctgcatgcccgagctgctgacccgcctgcgcggcaagttaccgattatcggtatctgcctcggccaccaggccatcgtggaagcctacggcggctatgtcggccaggcgggagaaatccttcacggcaaagcgtcaagcattgagcatgacggccaggcgatgttcgccggtctcgccaacccgctgccggtggcccgctaccattctcttgtcggcagcaatattccggccgggctcaccattaacgccaatttcaacggtatggtgatggcggttcgccacgacgccgatcgcgtctgcggcttccagttccatccggaatcgattctgactacccaaggagcgctactgctggagcaaacgctggcatgggcgctgcagaaactggagcagaccaatgtcgtacagccgattctggaaaaactgtaccaggccgagacgctgagccagcaggagagccacgtgctgttttccgccgtcgtgcgcggcgaagtgaagccggaacagctggccgccgcgctggtaagcatgaaagtgcgcggcgaacaaccacaggaaattgccggcgccgctaccgcgctgctggaaaacgccgcgccgttcccgcgcccggattatcagtttgccgatatcgtcggtaccggcggcgatggcagcaacagtatcaatatctcaaccgccagcgcctttgtcgccgccgcctgcggtttaaaagtggcgaaacacggtaaccgcagcgtctccagtaaatcgggttcgtccgacctgctggccgcgtttggcatcaacctggatatgaatgccgataaatcgcgcgccgcgctggatgaactgggcgtctgctttctgttcgcgccgaaataccacaccggtttccgccacgcgatgccggtccgccagcagttgaaaacgcgcaccctgtttaacgtgttggggccgcttatcaacccggcgcacccgccgctggcgttgattggcgtctacagcccggaactggtgttgccgattgcagaaaccttgcgcgtactcggttatcaacgcgccgcggtggtacacagcggcggcatggacgaagtctcgttgcatgcgccgaccgtggtcgccgaactcaataacggcgaaatccagagctatcagctgaccgccgccgacttcggcctgacgccttatcatcaggagcaactggccggcggcacgccggaagaaaaccgtgacattctcacgcgcttgctacaaggtaaaggtgaagccgctcatgaagccgccgtggccgccaacgtcgccatgttgatgcgtttacacgggcatgaagacctgaaagccaacgcccggcaggtactggatgtgctgcacagcggagcggcctatgacagagtgaccgcattagcggcaagagggtaa

SEQ ID NO: 88389 - DNA, 1359 bp, Enterobacter aerogenes
atgcagaccgttttagcaaaaatcgttgccgacaaagcgatttgggtagaagcccgcaaacaacaacaaccgttagccagttttcagaatgacattgtgccgtccgaacgccatttttacgatgcgctggccggcgcccgcaccgcttttattctcgagtgcaaaaaggcgtcgccgtcgaagggactgattcgggaagatttcgacccggcgaccatcgccggggtttataagcactacgcctcggcaatttcggtactgtgcgatgagaaatattttcagggcagctttgattttctgccgatcgtcagcaaagtcgcgccgcagccgattctgtgtaaagacttcaccatcgacccttaccagatttatctcgcgcgttactaccaggccgatgcctgcctgctgatgctttcggtgctcgatgacgatcaatatcgccagctcgccgccgtcgcccacagtctcaatatgggcgtcctgaccgaggtcagcaatgaagaggagctggagcgcgcgattgcgctgaaggccaaagtcgtcggcattaacaaccgcgatctgcgcgatatgtcgattgatctgaaccgcacgcggcaattggcgccgcgtctcggcccggatgtcaccgtgatcagcgaatccggaatccatacctatggcgaagtccgcgagcttagccacttcgccaacggcttcctgattggctcggcgctgatggaacaaccggacctcagcgctgcggtgaagcgcgtgctgttaggtgagaacaaggtctgcggcctgactcgtccgcaggatgcgcaagtcgcctgggaggcgggcgccatctacggcggcctgattttcgtcgatagttcgccgcgtgccgttaacgatcagcaggcacaggcggtaatggccgccgcgccgcttagctacgttggcgtgttccgtgatgcagccgttgaagaggtcgtcacccgcgcgaccaaattgaaactcgccgcggtccagcttcatgggagcgaagatcaggcctggattgatgccctgcgcgcggcgctgccggagcagatccaaatctggaaggcgctgagcgtcggcgaaaatttaccgccgcgcaacctgaaccatgtgaccaggtatgtctttgacaacggtcagggcgggagcggtcaacgtttcgactggtcgctgctgcagggccaggacctgcgtaacgtgatgctggcaggcggcctcagcgccgataactgcgtagaagccgcgaaaagcggctgtgccggactcgatttcaactcaggcgtagagtcgcagccgggaataaaagaggcaagcctggtggctgccgttttccagacgctgcgcgcatattaa

SEQ ID NO: 88390 - DNA, 1194 bp, Enterobacter aerogenes
atgagcactttactgaacccgtatttcggcgaattcggcggtatgtacgttccgcagatcctgatgcccgccctgcgccagctggaagaggctttcgtcagcgcgcaaaaagatcctgagtttcaggccgaattcaccgacctgctgaaaaactacgcgggccgcccgacggcgctgaccaaatgccgcaatctgaccgaaggcacccgcaccacgctgtacctcaagcgtgaagatctgctccacggcggcgcgcacaaaaccaaccaggtgctgggccaggcgctactggccaaacgtatgggtaaaacggaaattatcgccgaaaccggcgccggccaacacggcgtcgcctcggcgctggccagcgccctgctcggtctgaaatgccgcatctatatgggcgccaaagacgtcgagcggcagtcgccgaacgtgttccgcatgcgcctgatgggtgcggaagtcattccagtgcacagcggttccgccaccctgaaagatgcctgtaacgaagcgctgcgcgactggtccggcagctacgagaaggcgcactacatgctcggcaccgccgctggcccgcacccattcccgactatcgtgcgtgaattccagcgcatgatcggcgaagaaaccaaagcgcagatccttgagaaagaaggacgcctgccggacgcggtgatcgcctgcgttggcggtggttctaacgccatcggcatgttcgctgatttcattgatgaatcccgcgttggcctgattggcgtcgagcctgccggccacggtatcgaaaccggcgagcacggcgcgccgctgaagcatggtcgcgtcggcatttatttcggcatgaagtcgccgatgatgcaaacctccgacgggcagattgaagaatcttattctatctccgccgggctggatttcccgtcagtggggcctcagcatgcgttccttaacagcaccgggcgcgccgagtatgtgtcaattaccgacaacgaagcgctggatgcctttaaagcgctctcccgccatgaaggcattatcccggcgctggagtcgtcgcacgctctggcgcacgcgctgaagatgatgcgcgaaaatccggataaagagcagctgctggtagttaacctgtccggccgcggcgataaagacatcttcaccgtacacgacattttgaaagcgcgaggggaaatctga

SEQ ID NO: 88391 - DNA, 810 bp, Enterobacter aerogenes
atgggacgttacgagacgctatttgcacagttaaaaaaccgccaggaaggcgcctttgttcccttcgtcaccctcggcgatccggggccggaacagtcgctgaaaatcatcgatgcgctgattgaagccggcgccgatgcgctggaattggggatccctttctccgacccgctggccgacggcccgacgattcagggcgccacattgcgcgcttttgccgccggtgttaccccggcgcagtgcttcgagatgctggcggcgatccgccacaagtatccgaccattccaatcggcctgttgatgtacgcgaacctggtgttcagcccggggattgatgagttctacgccgaatgcgcgcgtgtcggcgtggattccgtgctggtcgccgacgtgccggtcgaagagtccgccccgttccgtcaggcagcgctgcgccataacattgcgccgattttcatctgcccgccaaatgccgatgacgatttactgcgccagattgcctcctatggccgcggctatacctacctgctatcgcgcgctggcgtgacaggcgcggaaaaccgcgccgcgctgccgctgcatcatctgattgaaaaactggcggaatacaacgccgcgccgccactgcagggctttggcatctcggcgccggagcaggtttcggccgctattgacgccggtgccgccggggcaatatccggctcggccatcgtcaagattatcgagcgtaaccttgagcagccgcaaaaaatgctcgaagagctaaaaaccttcgtgcggagcctgaaagcggcgaccaaaaccgcctga

SEQ ID NO: 88392 - DNA, 456 bp, Enterobacter aerogenes
atgcaatatgcacataataattacgacatcaccgactttcacggcgcgctgttagacatcatcagcgtgatgaatcaaccgctgcgcgatgagcaaatattgcaggcggcaggggtacagcttgaacagatgctgtttccactactggtggcggtatggcgctatggcccggtgggggtagttgagctggcggatcatttaggccgcgattacaccaccgtcagccggcaggtgaaaaagctggaggctcagggccttgcctgcaagcaggccaatgtcaaagaccggcggattagcgaggtgacgcttagcgaaaaggggcagcggatgatcgacgctattgccgttgcgcggcggcggttaatgaatcaggtgctggctggatggtcagaagatgaggtgctggcgctgtttcgcttaacgcgaaaatacgccaacagcctgcagcggaaatag

SEQ ID NO: 88393 - DNA, 948 bp, Enterobacter aerogenes
atgaaagccgccgtggtgtttgatcttaacgaaggtccgatatgggccgattttagcgaaccgcagcccgccgtcggacacacgctgatcgacgttcgcgccgccgccattagccacgtggtaaagggccgggcatcaggacatcattatagttttgacggcactctgccgtttgtcgtcggtatcgatggcgtcggtatgacctctgacggtcagcgcgtctattttgctttccccagcgcaccgttcggcagtatggcgcaacgcgcgccggtcgcgctgcagaattgcctgccgctgccggatgcacttgatgacatcagcgctgcggccatggccaatccgggcatgtctgcctgggctgcgcttgtcaaacgggcgcagtttcaggccggagaaacggtactgattaacggcgccaccggcagcgccgggcagttggcagtacaaattgcccgctacctcggcgcaaaaaaaatcattgctaccgggcgtaatacgcaggcgctggctgccctcgcagccgatgagtgtattgatttaaccgccgatgagcagacgctaaacgcgcagtttgccgccgccagcgccgggcaaatcgatgtggttgtggattatttgtggggccgcagcgcagagttgctgctgcctatgctggcgaaatacacccctggcgataagccggtacgttatgtgcaggtgggttcccttgccggggcggatatcgcgttaaatggcgcggtgcttcgcgccgcgccgctacagctcatgggtagcggtatcggcagcctgaccatgccgcaactgctggcggcaaccggggagatgctgcaggcggcggttcccggtcagtttaccatcgccaccacgccgctgccgctccgcgatgtcgctacggcatggccgcgtgataatagtcagaaacgcacggttttcactcttgattaa

SEQ ID NO: 88394 - DNA, 1137 bp, Enterobacter aerogenes
atggatttactcattattctttgctatgtggcgttggcctatggcgtatttaaaattttccgtatcccggtaaataaatggacggtgccaacggcagtccttggcggcgtgtttattgtcggcgcgctaattctgaccatgaattataatcacccgtataccgaccgcgcgcaaaaaatagcattgtcgatcccgattgtaccgcaggtgtcgggggccatcgtagaagttaccgataaaacgaatgtgttattacgcaaaggcgaggtgctgtttcgtcttgatgatagccgttatcgtgcgcgactgaataaactggaggcggatctcagtgccgccgaagcggatatcagaacccggaaagcggcattaagtgaatccgccgccaacgtccagcagatgacggcggaatatgaacgcgcccgtcaggattatcagcgctatgcgaaaggcgcggcgatgccggtaaatcctttttccgagcaggatgtgaatcacgccgagcagcaatatcaagcgcaatctgcggccctgcgggcggctaaagcccagtatcaacagcagttcgaaagactttcggcgcgtttcaatggcgaggatgcgcaaatcgccagcctgaaatcgcagattgccgaggcgcgttatgaccttgaacagacggtattccgcgcgcccagcgatggttatgtcactcaggtgctggcgcgtccgggaaccacggcagttcgtctgccgttcaaaccggtgatgatttttattccgcagcagaaacgccaggtggtggcggtatttcgccagaacgccatcctgcgcctggagcagggggacgaggcagaggtggtgtttaatggcttaccggggcaggtgtatgccggcaaggtcacaaaggtactgccaaccattcccgacggtagttaccaggcgagcggcgcattacagggtttaagcgccacgcccggtcgggaaggggtttatgtgatgattgacctggcggcgagccgcgatcttgcccatttacctgatggggtcagtgcccaggcggcggtgtataccgaccattttgcccacgtgtcggtgatgcgtaaggtgctgttacggatgatcagctggttgcattatctgtatctcgaccactaa

SEQ ID NO: 88395 - DNA, 351 bp, Enterobacter aerogenes
atgtttctcgactacttcgccttaggcgtgttaattgccgtgtttttaattttattttacggcattattattattcatgatattccctatttattggccaagaaacgccagcatcctcaccaggatgcaattcatgtcgccggctgggtgagcctgtttaccctgcatgcgatttggccgctgttgtggatctgggccacgctgtatcgccccgagcgcgggtggggaatggcgcataaaggcgaagatagcgccgaaatgcatcagcgaatcaggcaacttgaaagcgagctcaagcgtctgcaggagcaacagataactgtaacgacaaactcgtcaaataaccgctga

SEQ ID NO: 88396 - DNA, 264 bp, Enterobacter aerogenes
atgaaaataacaacaatggctgcgttatctgcaatgttgctgctagcggcgtgcgcttccagcgtaaccgaaaaagaaaaacatattgaatatgacgatattatcaagggactatcggtttcggcggaagagatattataccggaaagataaaactactgatttttaccgttatcaatatttggtctatcagtcggaaaatgattattcccggcacagccgcactattacagtgagtggcattgctaattataaaacagcgtag

SEQ ID NO: 88397 - DNA, 936 bp, Enterobacter aerogenes
gtgaaagaaaaagacctgcgcattgacgaactccgcatcgttcgcatgattgccgaaacggcaagcgtgagcaaagccgcccaactactggacatgccgcagtcgaatgtgtcgcgggcgctgaatgcgctggaacggcgcctggggctggagatctttatccgccatccacgggcgttaatcctgagcgagtttggcgagcagttcctgcgccgggcggatattctgctggataagcataatgatctgctggatatgtccggtacctggaaacgcagcctcaacggcatggtgacgctcggcgcgccgatcggcattcaggctttccttgcccgataccttttgccgccggtgctacgttcggcgccggaattaaccgtcaatattctcacccgcaatcccgacgagcgcgaacagaaacacgggacgcttttcgatagcgattgcgatctgctgattagctttttccaaccgcaggacgaaagcctgatcgcaaggcctctcacccgttttcgcatggggctgtttgcctgcgcggattatattgcgcagtcgcccctgcacgatgttgatgagcttgcgcagcaccgctgcatcactttgcgtacgttgggcgggatccgcaacagttggcattgctataacgccgcgggtgagagtattcaggtagaggtcaacggttccagcgtatgcgataacattttgccggctatcgagcttgccaagcagggcctgggcatcgtatatgcccctttttactccgtcgcggcggaattagaagcgggtacgctacagccctgtctgccacgagaacgcggcgtgaatatgcaggcgtggttgatttatcgtcaacgaggcgtgttgccgcatcgcgtgcaggtgataatggatagcattatggaaagcgccaaactgcacgcccatcggttggtctga

SEQ ID NO: 88398 - DNA, 639 bp, Enterobacter aerogenes
atgaagaaaattgcagcggcggcattgatcttaggtacgctttctggtggtagcgcctgggcgcatgaagcgggggagttttttattcgcgcgggttcggcgacggttcgcccgactgagggttctgacaacgtactgggtagtctcggcggttttaacgtcagtaataacacccagttaggtttaacctttacctatatggcgaccgacaatatcggtatcgaactgctggcggcaacgccgttccgccacaaggtcggtaccgggccgaccggcaccatcgctaccgtacaccagttgccgccgacgctgatggcgcagtggtactttggcgatgcgcaaagcaaagtgcgcccgtatgtcggcgccggtattaactatacaaccttctttaacaatgatttcaacgataccggtaaggacgccgggctttccgacctgagcctgaaggattcatggggcgcggcaggacaggttggcctggattatctgattgaccgcaattggctgctgaacatgtcagtgtggtacatggatatcgacaccgacgtgaaatttaaagctaacggagagaatcagaccgtcagtacccgtctggacccgtgggtgtttatgttctctgccggttatcggttctaa

SEQ ID NO: 88399 - DNA, 414 bp, Enterobacter aerogenes
atgagtgaaatcaacccgtgcatgacgtgcggtgcctgttgtgcgtattttcgagtctccttctattgggctgaagccgacgacgccggcggcgtggtacctacgcagctcaccgaaccccttaccccttttctgcgctgcatgagcggcaccaatcagcggcaaagccgctgcacagccttaagcggcgaaatcggcgaatcggtgcactgcaccatctatcatcagcggccttccccctgccgcgaatttgctatgtcaggcgaaggcggcgaactcaacgaagcgtgcgatcgcgcccgtgcccgctacggcctgccgccgctgggaactctttacaaagatatacttaccgtgacagcggcagagactgctacccaaccacgttttgcggtacaatccccggctagttaa

SEQ ID NO: 88400 - DNA, 744 bp, Enterobacter aerogenes
atgtctatcacggcgaagtccgtctaccgtgacacggggaatttttttcgtaatcagttcgttactattctgctgattgcgttgttatgcgcgttcatcacggtagtcattggccatgccttttcgcccagtgacgagcagttatcgatcctcagcgaaggcgataatctggcgggcagcgccggcttgtttgagctggtgcagaacatgacgccggaacagcagcagatcttgctgcgcgcgtcggcagcctcaaccttctccggcctggtggggaatgccatcctcgtcggcggcgtactgttgctgatccagctgatctccgccgggcatcgcgtcagcgcgctgcgggcgatcggcgccgcggcgccggttctgccgaaactgttgctgcttatcctgttcaccaccttcgtggtacagatggggatgatgctggtgctggtgccgggcgtgctgctggcgattgtcctggcgttcgcgccggtgatgctggtgcaggataaaatcggcatctttagcgcaatgcgcggcagtatgcgtctggcgtgggctaatatgcgtctggtggcgccagcggtactgggctggctgctggcaaaaacggcgctgctgctgcttgcttcaagcttcgcaacgctgtcgccaaacgtcgccgccgtggtcattaataccatcagcaatctgttctctgcgctgttgctgatctatttgttccgcttgtatatgcttattcgcaactaa

SEQ ID NO: 88401 - DNA, 540 bp, Enterobacter aerogenes
atgaagcagtttctcgattttttaccgctcgtagtcttcttcgctttttataagatttacgatatctacgccgcaaccaccgcgctgatcgtcgccaccgcggtggtcctcatttatagctgggtgcgctatcgtaaagttgaaaagatggcgctgatcacttttgtgcttgtcgccgtcttcggcggtctgactatcttcttccacaacgatgaattcattaagtggaaagtgaccgtcatctacgccctgtttgctggcgccctgctgttcagccagtgggtaatgaaaaaaccgcttatccaacgcatgcttggcaaagagctgacgctgccgcagcaggtgtggtcacggctgaatctggcctgggcgctgttctttattctctgcgggctggccaatatctacatcgcgttctggctgccgcaaaatatctgggtcaacttcaaagtcttcggtttaacggcattgaccctggtctttaccctgttgagcggcgtctatatctaccgccacatgccgcaggacgataagcactaa

SEQ ID NO: 88402 - DNA, 399 bp, Enterobacter aerogenes
atgacaacaacagatctcgccccgaagggcgaattggttttacgcaccctggccatgccggcggataccaacgcgaacggcgatatttttggcggctggttgatgtcgcagatggatatcggcggcgcgattatggccaaagagattgcccgcggccgcgttgtgaccgtccgtgttgatggtatgacttttttacgcccggtcgccgttggcgatgtcgtgtgctgctatgcccgctgcgtaaaacgcggtaacacctcaatcaccattaatattgaggtatgggtgaaaaaagtatcgacggaaccgctgggccagcgttataaggcaacggaagccctgtttatttatgtggcggtagacaatgaaggcaagccgcgagcgcttcctgccgaatga

SEQ ID NO: 88403 - DNA, 645 bp, Enterobacter aerogenes
atggtatatcataccgcgctgaagcaggcgaaattcgctgacgaagatagacttatacctgactctatggcggcatggagagtctggcgttttaaacaaggggaactcatgacgtatcaacaagctggacgcattgcggtcattaaacgcattttgggatgggtcatcttcattccagccgtgctgtctacgctgatttccgtactgaaatttatgtacgagcatagcgaaaagaaaccgggtattgatgcggtgatgatggatttcgcccacctgatgattgagatggtgcgttttaatacgccgttcctgaatttcttctggtacaactcgccgctgccggagttcaaacatgcgttgaacatcggtttctggattatctacgcgctggtgtttgttggcatggcgttgcaggcttccggcgcgcggatgggccgccaggcgaagtttctacgcgaaggggtggaagatcagttgattctggaacaggctaaaggagcggaaggtctgtctcgtgaacagcttgccgaacgtattgtcgtaccgcgtcataccatcctgaagcagtattttacgctttacgtgctgccgattgtggtgattgtgattggctatgttttcttctcattgcttggcttcctgtaa

SEQ ID NO: 88404 - DNA, 669 bp, Enterobacter aerogenes
atgtcagcgaagcgccagattcttgccgctattttcgatatggatggcctgcttatcgattcagagccgctatgggaccgcgcagagctggaggtactggacagcctcggagtggatattagccgccgtgatgaattgccggacctgctggggctgcgcatcgacctggtggtcgatttgtggtttgcgcaacagccctggcgaggcccggaccgcgcagaggtaaccgccagcattatccgccgcgccattcaactggtcgaggagtcacggccgttgctgcccggcgtgcgtgaagccgtggcgctgtgtaaagcccagggactaaaaatcggtctcgcttcggcgtcgccgctgcatatgctggaaaaagtgctggaaatgtttgaactacgcgaccagtttgacgcgctggcttccgccgaacatctgccatacagcaaacctcacccccaggtctatctcgattgcgccgctaagcttggcatcgcaccgatgtcttgcgtggcgctggaggattctgttaacggcatgatcgccagcaaagcggcgcgaatgcgctcaattgtggttccggaagcagaaaacagccgcgatccgcgttttgtactggccgatgtgaaactgacgtctctgcagcagctgacggtagcagacctgcgcggctaa

SEQ ID NO: 88405 - DNA, 591 bp, Enterobacter aerogenes
atgacggcggaaggccacctcttcttttctatcgcctgtgcggtatttgcaaaaaatgcagaattaacccccgtgctggcgcagggggactggtggcatatcgttccttccgccgtgctgacctgcctgctgcccgatatcgaccatccgaaatcgttcctcgggcagcgtttaagctgggtctccaaaccggtagcccgcgcctttggccatcgcggttttacccacagcctgctggcggtattcggcgcgctggcgctgttctatcttaaagtgcctgagagctggattatccctgccgatgcgctgcagggtttagtgctcggctacctcagtcatatactcgccgatatgctcaccccggccggcgtaccgctgctgtggccctgccgctggcggttccgcctaccgatcctcgcgccgcgcaaaggcaatcagctcgagcgcgcgctgtgcatggcgctgttcatttacgccgtctggatgccgcaaagcatggccgaaaatagcgccgtgcgctggtcatccaatatgattaattcgctgcaaataacctttaatcgctttattagccatcaggctgaacgataa

SEQ ID NO: 88406 - DNA, 1392 bp, Enterobacter aerogenes
atgaattttccattaatagcgaacgttgtcgtgttcgcggttttactgtttgcgctggctcaaacccgccacaaacagtggagcctcgctaaaaaagtactggtcggtctcgttatcggcgttatctttggtctcggcctgcagctggtttacggctccgacagccaggttctgaaagattctattcagtggtttaatatcgtcggtaacggctatgtgcaactgctgcagatgatcgttatgccgctggtcttcgcctctattctgagcgcggtggcgcgcctgcacaatgcctcacagctgggtaaaatcagtttcctgagcatcggtacgctgttgttcaccacccttatcgccgcgctggtcggcgtactggtgaccaacctgtttggcctcaccgctgaaggcctggtacagggcagcgcggaaaccgcccgtctgaacgccatccagagcaactatgtcggtaaagtatcagatctgagcgttccgcagctgatcctgtcgtttgtgccgaaaaacccgtttgccgatctgaccggcgcgaacccgacctcgatcatcagtatcgttatcttctcggcgttccttggcgtcgcggcgctgaagctgctgaaagacgatgtggagaaaggccaacgcgtcctgaccgccatcgacacgctgcagggctgggtgatgaagctggtgcgtctggtgatgcagctgaccccatacggcgtgctggcgctgatgaccaaagtggttgccggctccaacctgcacgacatcatcaagctcggcggtttcgtagtggcttcttacatcgcgctgggcatcatgtttgtggtgcacggtctgctgttagccgtcaatggcgtcagtccgctgaagtatttccgtaaagtctggccggtgattaccttcgcctttaccagccgttccagcgcggcttctattccgctgaacgtggaagcgcagacgcgccgtctgggcgtaccggaatccattgccagcttctccgcctcattcggcgcgacgattggtcagaacggctgcgccggtatctatccggcaatgctggcggtaatggtagccccgaccgttggcatcaacccgttggatccaatgtggattgccaccctcgtgggtatcgtcaccgtgagctccgcgggcgtagccggcgttggcggcggcgccaccttcgcggccttgatcgtgctgccggcgatgggtctgccggtcacgctggtcgcactgttgatttccgtcgagccgctgattgatatgggccgtaccgccctcaacgttaacggttcaatgaccgccggcacgctgaccagtcagtggctgcgccagacggataaagccatcctcgatagcgaagaagacgccgaactggcgcatcgctaa

SEQ ID NO: 88407 - DNA, 273 bp, Enterobacter aerogenes
atgttcccgctttgcttagtgaatccatctgttatgaaatcattgcgccaacaaaatcgccctatcattagctacgtgccgcgcgtcgagcctgcgccgccggatcatgccgttaaaatggaccattttcgcgatgtctggatattgcggggcaaatatgtcgcctttgtactgatgggcgagcgtttccgccgttcaccggcgttcaccgtgccggaatcggcgcagcgttgggctaatcagatacgccaggaaggtgaattagaggcctga

SEQ ID NO: 88408 - DNA, 2259 bp, Enterobacter aerogenes
atgtcagaaaaacaccacgacccacacagccgacaggctccggtacacgatagcgacgaagcaaaaccgggcctcgattcactggcgccagaagaccgtgagtggcgccctaccccccagccaaccgcccccggggaagagccgacggcgccgggtagcctgaaagcgccggatacccacagcattaaattagataccctcgagccgcagcgtaaaggcggtgaaaacttcccgctgaccaccaatcagggggtacgcatcgccgacgatcaaaactcgttacgcgccggcaaccgcggaccaacgttgctggaagattttatcttacgtgagaaaattacccactttgaccatgaacgcattcccgagcgtatcgttcatgctcgcggttccgccgcgcacggctatttccagccttacaaaagcctgaaagaaattaccaaagccgattttctgtccgcgccggaaaaaatcacccctgtttttgtccgcttctccaccgttcagggcggcgcgggctcggccgataccgtgcgtgatatccgcggcttcgccaccaaattctataccgaagagggtattttcgacctggtgggcaataacacgcctattttctttatccaggatgcgattaaatttcctgactttgtccatgcagtgaaacccgaaccgcactgggcaattccgcagggacaaagcgcccatgacaccttctgggactatgtttcgctgcagccggaaacattgcataacgtgatgtgggccatgtccgaccgcggcttgccgcgcagctatcgcacgatggaaggtttcggcatacataccttccgcctgattaacgccgaagggaaggccacctttgtgcgcttccactggaagccggtggccggtaaagcatcactggtgtgggatgaggcgcagaaattaacaggccgcgatccggacttccatcgccgcgatctgtgggaagccatcgaggctggcgattatccggaattcgagctcggcctgcagttaattccggaggaaaacgagttcaatttcgacttcgatctgctggatccgaccaagctcattccggaagcgctggtgcccgttcaacgagtcggcaaaatggtgcttaaccgtaaccccgacaacttcttcgctgagaacgaacaggcggcattccatccgggtcatattgtgccgggtatcgattttagtaacgatccgctgttacaagggcgactcttctcctataccgatacgcaaattagccgcctcggcgggccaaatttccacgaaattccgattaaccgccctacctgcccgtatcataatttccagcgtgacggcatgcaccgaatggagattgataccaatccggcaaactatgaacccaactctatcaacgataactggcctcgtgaaacgccgccggcgccgaaacgcggcggctttgaatcgctggcggaacgcgttgatggcgagaaaatccgtaaccgcagtccctcgtttggcgaatactacgcccagcctcgcctgttctggctcagccagacgccgattgagcagcagcacattatcggcggctttagttttgagctgagcaaagtggtcagagtctggatccgcgagcgggtggtcgatcatctggcgcatattgatatcgggctggcggaagcggtagccaacaatctcggtatcgaactcagcgatgagcagcggaatatagcgccgcctgcgccggttaacggcgtggagaaagacccgaccctcagcctttacgccgatggcgatggcgacgtaaaaggacgaattgtcgcggtattactcaacgagaagacctgcgcgcaggatgtactcaacctgctacaggcgctacaggccagaggcgttcacagcaaactgctctattcgcgtatgggcgaagtcagcgccgatgatggatcgcagctacccatcgccggaaccttcgccggctcgccgtcgttgacggttgacgcggttatcgttcccggcggcgacctaaccagcatcagcgataacggcgatgcccgctactatctgctggaagcctataagcatctgaagcccattttactggcgggcgatgcgcggcagtttagttcgctgctacaggtgcccgctgcgggtgaagaaggggttatcgaatgcgacgcgattaatacgcttagcgtcgataaactgctgacgctactggccgcgcatcgcgtctggtcaagaagcagtaaagttgcggccatacccgcataa

SEQ ID NO: 88409 - DNA, 759 bp, Enterobacter aerogenes
atggaacgcgtattgatcgttaacgccgatgattatggcctgagcaaagggcagaattacggcattatcgaagcctgcaagaatggactggtgacatcgactacggcgttggtcaacggcgcggctatcggccacgccgcccaattaagccgtagcctgcctgagctggcggtaggcatgcactttgtgttgacgctgggcgagccattatcggcgatgccggggttaacccgcgacgggcggttgggcaaatggatttggcagatggcggaagaggacagcctgccgctggatgagatcgcccacgaactggagtgtcagtaccggcgttttatcgaactgtttggttgcgaaccaacgcatatcgacagccaccaccatgtgcatatgatcgcgcagatctatcccattgtcgccgcctttgcgcgcgaaaagggcgtcgctttgcgtatcgatcgtcaggtggcggcgctgaatggcctcgaccaggatgcggcgcgcagtagcgatggcttcagcagcgaattttatggtgaagcggtttcacaagcgctgttcctgcagacgctggatgcgtcgattgaacggcaggaaaactcgctggaagtgatgtgtcatccggcatttgtcgataacaccattatgtgcagcgcttactgctatccgcggctgaccgaactggacgtgctgacgtccggcgaactgaagtacgctattgcggaacgtggctatcggctcggaaactatcgcgacgtataa

SEQ ID NO: 88410 - DNA, 1347 bp, Enterobacter aerogenes
atgagccagaaattaaaagtcgtgactattggcggcggcagcagctataccccggaattactggaaggtttcctcaaacgctatcacgagctgccggtaacggaactgtggctggtggacgtggaagaagggcaggaaaagctcgatatcatccatgcgctgtgccagcggatggtggaaaaagccggcgtgccgatgaaagtctacaaaactctcgatcgccgcgcggcgctggaaggggcggatttcgtcaccacgcagctgcgcgtaggccagctgaaagcgcgtgaaaaagatgaacgtatcccgctaagccatggctatcttggccaggaaaccaacggtgcgggcggtctgtttaaaggtctgcgtaccatcccggtgattttcgatatcgtcaaagatgtgcaggaaatttgccccgatgcgtggatcattaactttaccaacccggcgggtatggtcaccgaggcggtataccgccataccaatttcaaacgctttatcggcgtgtgcaacattccaatcggtatgaagatgtttattaccgatgtgctgcaactgagtccgagcgatgagttgaatatcgatctgttcggtctcaaccacctggtgttcgttcgcgatgtgctggtcaatggcgtgtcgcgcttcgatgaactgctggacggcgtggcttctggccgtctgaccgcgaactcggtgaaaaatatcttcgacctgccgtttagcgaagggctgattcgctcactgcgcctgatcccatgctcatatctgctttattacttcaagccgaaagagatgctggcgattgagatgggcgaatactacaaaggcggcgcgcgcgctcaggtcgtacagaaggttgaaaagcagctgttcgaactgtacaaaaatccggatctgaacattaagccgaaggagcttgagcagcgcggcggcgcttactactctgatgccgcctgcgaggtgattaacgccatctacaatgataagcagaccgagcactatgtgaatattccgcaccatggccatgttgataatattccggccgactgggcggtagaaatgacctgtacgctgggccgcgacggtgcgaaacccacgccgcgaatcacgcattttgatgaaaaagtgctggggctgatttataccatcaaaggctttgaagtggcggccagccaggcggcaatgagcggtgagctcaatgatgtgctgctggcgctcaatttaagcccgctgattcattcggatcgtgatgccgagcagttggcgcgggagatgatcctcgcccatgagaagtggctgccgaactttgcagcgactatcgaaaaactgaaacagtaa

SEQ ID NO: 88411 - DNA, 825 bp, Enterobacter aerogenes
atgatgaccacagagatcagtaccgccagggaacaacagctcttcaacgggaaaaactttcatgtggtcatctataacaaaacggagagcgtgagcgggcttcaccagcatgattactacgagttcactatcgttttaaccgggcgctattatcaggaaattaatggcaaacgggtgctgctggagcgcggggattttgtctttatcccaatggggtcgcaccatcagagcttttatgaatttggtgcgacgcgcattcttaacgttggcatcagcagacgcttctttgagaaacattatctgccgctgctgccgttcgggctggtcgcctctcaggtctatgcggtgcaaagcgcctttctcagttatatcgagtcggttattgcttcactgaattttcgtgagactgaatttgacgaatttattgaactggtctcgttttacaccattaaccgcttgcgtcattatcgtgaagagcccgttgaagatgtgatccctcactggctgaaaaataccgtagaggatatgcacgataaaaataaatttggcgaaagcgcgctggaaaatatggtgcaattgtccgggaaaacgcaagaatatttaacccgggcgacccagcgctattatggtaagacgccgatgcagatcattaatgatatccgcatcaatttcgcgaaaaaacagctggaaatcaccaactattcggtcactgatattgcgtatgaatcaggatatagcagcccaagtctgtttattaaaacgttcaaaaggctgacctcatttacgccaagcagttatcgcaaacaactgaccaatattaattaa

SEQ ID NO: 88412 - DNA, 348 bp, Enterobacter aerogenes
atgtttgatctggataacatcgacgcggtagaaaccccggaaaatgacctcgaagaggtggtgatggggctgattatcaactccggacaggcgcgtagcctggcctatgcggctctgaagcaggcgaagcagggagattttgccgccgcgaaatcgatgatggagcaatcgcggatggcgctgagtgaagcgcatcgcgtccagacccagcttattgaaagcgatgaaggcgagggcaagatgaaggtgagtctggtgctggttcatgcgcaggatcatctgatgacctcaatgctggcccgtgaactggtggccgaattgatcgagctgcacgagaaggtacaatag

SEQ ID NO: 88413 - DNA, 1359 bp, Enterobacter aerogenes
atgagtaaagtgatcgattcgcttgaaaaggtactccttccttttgcagttaaaataggaaagcaaccgcacattaatgcgattaaaaacggctttattaaattaatgccgctgaccctcgccggggccatgttcgtattaatcaacaacgtttttctgagctttggtgaaggttctttcttttattcaatggggattcgcctggatgcctccaccattgaaaccttaaacggctttaaagccatcggcggtaatgtttacaacggtacgttgggcattatgtcgctgatggcgccgttctttatcggcgccgcgctggccgaagagcgtaaagtcgaccctatggcagctggtctgctggcggtcgccgcctttatgaccgtcacgccttatagcgtgggtgaagcctatgccgtcggcgccaactggctcggcgggcagaacatcatctccgggatgattatcggcctggtggtggcggaactgttcacctttgtcattcgccgcaactgggtcatcaaactgccggatagcgtgccgtcatcggtatcgcgctccttctcggcgctgatcccgggcttcctgattttgtcggtcttcggcattatttcgtggattttgtcaaactacggcagcaacttccatcagatcatcatggactccatctccacgccgctggcggcgatgggcagcgtcgttggctgggcgtacgttatctttaactccctgctgtggttcttcggggtgcacggttcgctggcgctgacggcgctggataacggcattatgacgccgtgggcgctggaaaacatcgcgctgtataaccagtatggctctgtcgacgcggccattgaagccggcaaacagttccacttctgggcgaagccgatgctcgactcctacatcctgctgggtggttccggtgcgacgctgggtctgattatcgccatcttcatcgcttctcgccgcgccgatcatcgtcaggtggctaaactggcgctgccgtcaggcatcttccagattaacgaaccgattctgttcggcctgccgatcatcatgaacccggtcatgttcatcccgttcgtgctggtacaaccgattctggccgcgattacgctggccgcatacagcctgggcattatcccaccggtgaccaacctggcgccgtggacgatgccaaccggtttgggggccttctttaacagtaatggtagcgttgctgccctgttggtcgcgctcttcaacctttgtgtcgctactgccgtgtacctgccgttcgtcatcctgtcgaacaaagcgcagagcaccatcgagcaggaagaaagcgaagaagatattgctaacgcactgaaattctga

SEQ ID NO: 88414 - DNA, 321 bp, Enterobacter aerogenes
atggaaaagaaacatatctatctgttctgctcggctggcatgtccacttcattactggtctccaaaatgcgcgcccaggcggaaaagtatgaagtcccggtaattattgaagcgtatcctgaaacgctggccggtgaaaaagggccggaagctgatgtcgtattattagggccacaaattgcgtatatgctgccggaaatccaacgtttgctgccgaacaagccggtagaggtcattgattccattctgtacggtaaagttgatggcttaggtgtattgaaagcggccgtcgcggccattaagaaagctgctgcacaataa

SEQ ID NO: 88415 - DNA, 339 bp, Enterobacter aerogenes
atgaacaaaaaattagcaggattgatgggcgcagcagcagtattaaccatgctggcagggtgtacggcctatgaccgcaccaaagaccagttcacacagccagttgttaaggatgtcaaaaaaggcatgacccgcagccaggttatgcagattgccggtaaaccgtcgtctgaagtcaccatgatccacgcccgcggaacctgccagacttatatcctgggtcaacgggatggtaaaattgaaacctactttgtcgcgctggacgagaccggccacgtgatgaactccggctaccagacctgcgccgagtacgacaccgatccgcgtaacaacaaataa

SEQ ID NO: 88416 - DNA, 828 bp, Enterobacter aerogenes
atgacgcttcaacaacaaattatccaggcgctgggcgcgaagccgcagattgatgtcgaaggcgaaattcgccgcagcgtggatttcctgaaatcctatctgcagacctatccgttcattaaatcactggtgctcggcattagcggcggccaggattccacccttaccggcaaactatgccagatggcgatcgatgagctgcgggctgaaagcggcgatcggagcctgcaatttatcgccgtacgcctgccctatggcatccaggccgatgagcaggattgccaggatgccatcgaatttatccagcctgaccgtgtgctgaccgtcaatatcaaaggcgcggtgctggccagcgagcaggcgttgcgtgaagcgggtattgagctgagcgactttgttcgcggcaacgagaaagcccgtgagcgaatgaaagcgcaatacagtatcgccggcatgaccaaaggcgtggtcgtgggaacagaccatgccgcagaagcgatcaccggcttctttaccaaatacggcgatggcggtaccgacattaacccgatcttccgtctcaataaacgtcagggcaaacaactactggcgcagttgggctgtcctgagcacctttatatgaagcagccgaccgccgacctcgaagatgaccgcccttctctgccggatgaagtcgcgctgggcgtaacctacgaaaatattgatgactatctggaaggcaaaacgctggatgagaacatcgccaaaaccatcgaaggctggtatctgaaaaccgagcataagcgccgcccgccaatcaccgtcttcgacgatttctggaagaagtaa

SEQ ID NO: 88417 - DNA, 864 bp, Enterobacter aerogenes
gtggccagaaaacaatctgccccgcgtctggaatttgaggcggcggcaatctatgagtatcccgaacacttgcgcccatggctggaggccttgccaaagctgcctggggtgtatcagttccatggtgaaagcgagacgctgccgctttatatcggaaagagcgtgaatatccgcagccgtgtgctgtcgcatttgcgtaccgcagatgaggcctccatgttgcgccaggcgcgacgcatcagttggcaacgcaccgccggtgaattaggcgcgctgttacttgaagcgcggttaattaaagaacagcagccgctgtttaataaacgactgcggcgtaataaacagctctgctcctggctgctggagtcgggtaaaccgcaagttgtgtatgcgcgagaagtcgatttctcccatcagcagcacctgtacggcctgttcgctaaccgccgcgcggcattacaggcgctacaaaccatcgccgatgagcaccgtctgtgttatggcattctggggctggagccgctgagtcgcgggcgcgcctgttttcgttccgcactggggcgctgcgccggcgcctgctgtggtaaagagagcgtcgaagatcataaccagcggctgctggcgcaaatgagtaaacttcagctggtgtgctggccgtgggcgggtccggtggcgctggaagagcgcggcccggatatggttcagtaccatatcattcataactggctgtggctgggcgcggtagattcactggcgcaagccgctaaactcaccacactgcctgccggtttcgatcacgatggctacaagattctttgtaagccattgctcagcggtgagtatccgctgcaccttcttggctaa

SEQ ID NO: 88418 - DNA, 483 bp, Enterobacter aerogenes
atgaagaagattactgctctgtttgttgcctctacgctggctctgggtgctgctaacctggctcacgcagccgatactaccgctaccacccaaaccgacagcaaaccgatgatgcaccataaaggtatgccgggtcatcacgatatgatgttcaaagacctgaacctgaccgatgcgcaaaagcagcaggttcgcgacatcatgaaaagccaacgccagaacatgaaacgtccgtcccttgacgaacgtcgcgccatgcacgatctgatcgccagcgatactttcgacaaagcgaaagccagcgcgcagattgataagatggaagcacagcataaagagatgatgctttcccgcatggaaacccagaacaagatttacaacatcctgacgccggaacagaaaaaacagttcaatgcgaattttgagaagcatctgacagaacgtaaagcgccggaaggtaaaatgcctgcacctgctgagtaa

SEQ ID NO: 88419 - DNA, 144 bp, Enterobacter aerogenes
atgcaacaaaaaataaataacaggctgttttataaggaaactgtgaagattataaaacagtggagattaaaaacaaagcatttaaccaggaataatctgcaaaccatatcaatggcacaaataaataagattggcgcgcagtga

SEQ ID NO: 88420 - DNA, 963 bp, Enterobacter aerogenes
gtggacgactttctggcactaactctggcggggcgctggccgcatcattttcatggcgaaaccgcccattttcgttggcactggatcgattgcggcatcctgctgctaaccccgcatgcgcgctgcgaacgttcactggtactctcctgcggtattcacggcaatgaaaccgcgccggtggagatagccaacgctttgcttcagcagttgtttagcggcgaactcccgctgcgctggcgtgtgttggtgatattcggcaacccgccggcgctgcggcaaaataaacgctatctcgatagcgatatgaaccgcatgttcggcgaacgctggcgcaagttcgcgcccagtggggaaacggtgcgggcgcggcagttggaaagcgctgtgacgcgtttctttagcgatagccatggcgtgcgctggcatctggatatgcataccgctattcgcggctcgctgcatccgcgctttggggtgttgccggcacgcgaggagccgtggagcgaagattttctcagctggcttggcgcggccgggctggaggcgctggtgttccatcaacaaccggcgggaacctttacccactttagttgcgaacgttttgccgcgctggcctgtacgctggagttgggcaaagcgctgccttttggcgacaacgatttaacccagttctcagcgacgcagcgggcgttaagcaggctgttggtgggcgatttggcggtggaagaagcgactgcgccgctgcgctaccgggtggtgcagcagatcacgcgccacagttaccagttccagttgcatatgtcgggggagacgctcaattttacgccgttcagcgccgggacgctgctggcggaggatggcgaaacgcgctatgtcgtcgaaaaggcgcaagagtacgtgctgtttcccaaccccggcgtggcgccagggctacgggctgggctgatgctggagcggttgtaa

SEQ ID NO: 88421 - DNA, 1476 bp, Enterobacter aerogenes
atgagtttatggattaacggcgaatggcaaagcgggcgtggcccgcagcgcagtaaatataacccggtcaaccaggcgctgctgtggcagggaaatgacgccgacgccgggcaggtcgcgcaggcggttagcgccgcgcgtcaggcttttcccgcctgggcccgcctgccatttagcgcgcgtcaggggatcgtcgagaagtttgcggcgctgctggaagcgaacaaaagccagctgacggcgattattgccgctgagaccggtaaaccacactgggaggcggccacggaaattaccgccatgataaataaggtggcgatctcggtgcgcgcttaccatagccgcaccggcgagagcgagacggcgatggccgacggcgccgccacgttgcgccaccgtccccacggggtgctggcggtgttcgggccgtataacttcccgggccatttacctaacggacacatcgtaccggcgctactcgccggtaataccatcgtctttaaacccagcgagcttacgccgcaaagtggcgaagcggtggttaaactgtgggctgaggcgggcttacccgctggagtcgtgaatctactgcagggcggccgggagacaggcgaggcgctgagcgggcaggcggatatcgacggtctgttgttcaccggcagttccgcgaccggcttccaactgcatcgtcagctggccgggcagccgcaaaaaatcctcgcccttgaaatgggcggcaataacccgttgattgttgacgagccgcaggatattgacgcagcggttcacctgactatccagtcggcatttatcaccgccgggcagcgttgtacctgcgcgcgccgcctgttggtcaagcgcggcacggcgggtgacgcgtttttgcagcgtttagtgacggtgtcacaacgtcttattcccggcgagtgggatgcgcagccgcagccgttcctgggcgggctggtatcgccgcaggccgcgcaaaaggtgcatcaggcctggcttgggcacgtggcgagcggcggacagacgttactggagccgcgtctgttgcgcgacggcacttcgctgctgacgccggggatcatcgacatgagcaacgtgcagcaggtggcggatgaagaagtctttggcccgctgttgtgcgtgtggcgctatgacgatttcgcgcaagcgatcgcgatggctaacgccacccgttttggtctctcctgcggattgatttccgccgagcgcgataagttcgagcgcctgttgctggaggcccgcgccgggatagtcaactggaacaagccgctgactggcgccgccagtaccgcgccgtttggcggaaccggcgcctcgggaaatcatcgtccaggcgcctggtacgccgccgattattgcgcctggccgatggccagcctggaatctgccgaactggcgctaccggagacgctcagtccgggtctggatttttcatcgcaggcaagttga

SEQ ID NO: 88422 - DNA, 1035 bp, Enterobacter aerogenes
atgatggtgatccgaccggttgaaaaagccgatttgccggggctgatggccctggcgggagaaaccggcggcggcctgacgtcgctgccggcggacgaacccacgttggctgcccgcattgaacgctcccagcggacctggcgcggcgaactgccgaaaagcgaacagggctatgtctttgtgctggaagatagcgtcagcggcgcggtcgttgggatctgcgcgattgaagtcgccgttggcctcaacgatccctggtacaactatcgggtcggcacgcaggtacatgcatcaaaagagctcaacgtttatcacgcgctgccgacgctgttccttagcaacgatcacaccggctgtagcgaactctgcacgctgtttctcgatccggcatggcgtaaagagggtaacggctacctgttgtcgaaatcgcgactgctgtttatggccggtttccgcgaccgctttaatgacaaagtggttgccgagatgcgcggcgtgattgatgagcatggctattcgccgttctgggaaagcctcggcaagcgcttcttcgcgattgaattttcccgcgccgactatctctccggcaccggtaaaaaagcgtttatcgccgcactaatgccaaaacatccgttatatatcgactttctctccgatgaagcgcgggcggtcatcggccaggttcatccgcaaacggcgcctgcgcgtgcggtactggaaaaagaaggcttccgttttaacaactacatcgacattttcgacggcggcccgacgctggagtgcgaaatcgaccgggtgcgggcgatacgcaaaagccgcctgctgacggtggaagaagggcagcctgcgcctggagagtggccgcagtgtctggtcaccaacgagcagtatcagcagttccgcgccatcctggtccatgccgacccggatagcgaaacgttgctgctgagcgcgcgtgagctggatacgctgaaatgccatccaggcgaccgcgtacggatggtccgcctgatcccggaggagaaagcatcatga

SEQ ID NO: 88423 - DNA, 1221 bp, Enterobacter aerogenes
atgtctcagtcaattacgcgtagcaattttgatcaatggatgatgccggtatatgcgccggcggcttttattccggtacgcggcgaaggttcacggttgtgggatcagcaggggaaagagtatatcgattttgccggcggtatcgcggtgaatgcgctgggacacgctaatccacagctagtaaaagcgctgaccgagcaggcgggaaaattctggcataccggtaacggctataccaacgaaccggcgctgcgccttgccaaaaagcttatcgacgccacctttgccgaccgcgttttcttttgtaactccggcgccgaagccaacgaagcagcgctgaaactggcgcgtaaatacgcccacgatcattacggcagccacaaaagcggcattgtcgcgttcaaaaacgccttccacggacgcacgttgttcaccgtatctgcaggtggccaaccttcctattcgcaggattttgcgccgctgccgccgcagatccaacatgctacctataacgacctcgactcggcgcgggcgctgattaatgacgacacctgcgcggtgatcgtcgagccgatgcagggcgagggcggcgtggtgccggcgaaagcggaatttttgcgtggcctgcgtgaactgtgcgaccagcacaactcgctactgatttttgatgaggttcaaactggcgtcggtcgtaccggcgaattgtatgcctatatgcactacggggtgacgccggatgtcctgtcgacggcgaaagcgctgggcggcggcttcccgatcggcgcgctgttggcgacggaaaaatgcgccagcgtgatgaccgtcggcacccatggcacgacctacggcggtaacccactcgccaccgctgttgccggggagttactgtctatcgtcaataccccgacgcttttgaacggcgttaaacagcgtcaccagtggtttagcgaacgcctgagcgcgattaacgccaaatacggcctgttcaaggaaattcgcggactggggctgctgattggctgtgtactgaacgacgaatatgccgggaaagctaaagccattagtacccaggcggcggaagacgggctgatggtactgattgccggggcaaacgtcgttcgcttcgctccggcccttaacgtgagcgaggaagaggtgaacaccggtctcgatcgctttgagctggcctgccgtcacttccttgcgggagtttcatcatga

SEQ ID NO: 88424 - DNA, 807 bp, Enterobacter aerogenes
atgaaattcatctcttttaatatcaacggcctgcgtgcccgcccccatcaactggccgccatcgtcgataaacatcagcccgatgttatcggcctccaggaaaccaaagtacacgacgatatgtttcctctcgaagaggtggcaaatctgggttacaacgtcttttaccatgggcaaaaaggccattacggcgtcgcgctgctgaccaaagagactccgatagccgtgcgtcgcggcttcccgggcgacggcgaagatgcgcagcgccgcatcatcatggcggaaatcccttcaccgtttggtaatgtcacggtaattaacggctatttcccgcaaggagagagccgtgaccacgagaccaagttcccggcgaaagcggcgttttatcagaatctgcagaactacctcgataccgagctgaacaaagaaaatccggtgcttatcatgggcgatatgaacattagccctaacgaccttgatatcggcattggcgaagagaaccgtaagcgctggctgcgcaccggtaaatgttccttcctgccggaagagcgtgaatggatggatcgcctgctgggctggggcctggtcgatacctggcgtcacgccaacccggataatcatgaccgcttctcatggttcgattaccgctctaaaggtttcgatgacaatcgcggtctgcgtatcgacctgctgctggcaagctcgccgctggctcagcgctgcgtcgaaaccggcatcgattacgacatccgcgggatggaaaagccttccgatcatgcgccggtatgggcaacctttaaaccataa

SEQ ID NO: 88425 - DNA, 585 bp, Enterobacter aerogenes
ttgcttattctgcacagcggtagcgcaggttatgcgctttatatcctgctgtttatcatcgccaccttatgtctgatgccaggcagcgcgttagtcatcgtcggcggtatgatattcggcccctggttgggcacgctactctcgcttatcgccgcgactgtcgcctcatcgctgtcgttcctgctggcccgctggctgggccgcgaagcgctgcagcgctattgcggtcaccacgccgtttttcaggctttcgagcgcggtattgcccgcagcggctgcgattttctgattttcaccaggctggtgccgctgttcccttataatctgcagaattatgcctatgggctaacggcgatccccttctggtcctttacatttatctccaccatcgccaccctaccgggattgtttatttatacttttatggctagtgaactggcccgcgatggcatcaccctggcttttattggcaaactcagcatcgccggcctgatgctctttgtattaactcaggccgccaggcgttatggccgctataaacacattagtgtcgccacatccgcggtaagcgataaaaatggataa

SEQ ID NO: 88426 - DNA, 705 bp, Enterobacter aerogenes
atggataacagaaaacggctgtggctcttacgcggcgctatcatcctgctggcactggcagcgctcgtcggctggtggttaataccgggcgtacgctcctttgtgcaacatagcttcagcgcgtttgccaccctcgatcagcaagcgctggagcgttttattcacgcttatggtccgctggcagccctggtctctttcgggctgatgatcctgcaggcgattgtcgcgccgctgccggcatttttaattacctttgccaacgcttcgctgttcggcgcactgtggggcggcgtattgtcatgggtcagcgcgatggctggcgcggcgttgtgcttttttattgcccgcgtactgggccgtgaagtggtagaaaaactaaccggcaaggcggtattacagagcgtagatggtttttttaggcgctacggcaagcacaccatcctggtttgccgcctgctgcccttcgtccctttcgatccggtgagttacgccgctgggctaacctcaatccgctttcgccattttatgtttgccaccggcgtcggccaattaccggcgactatcgtctactcgtgggccggaagcctgctgacgggggggctgttctggctgctcagcggtttatctattttgttcgctttagctatcgtagtcgcgatagtcaaagcgcaatacgttgcgcatcacaacaggaaatcgccatga

SEQ ID NO: 88427 - DNA, 564 bp, Enterobacter aerogenes
atgaatctaccgccgttaacgtcgattccattgatcctgcgcccgcaggcgtggctacaccgtcgccattatggcgcggtgctcagccctatccgctggtgggggcgcatcccgctggcgttttatctggtctccatgtttgtcggatatctggaacgccgacgctcgccgctcgatccgctgctacgctcgttggtgagcgcccgtatcgcccagctgtgtcactgtgaattttgcattgatatcaccagcatgaaactggcgcagcgcgcaggcggcagcgaaaaactattggcggttaacgactggcgcaatagcggattattcagcgatagcgaacggttggcactggaatatgccgaagcggcgagcatgacgccgcccgccgtcgatgatgcgctgcgcgcccggctggcgcagcagttcgatgctcaggcgttaaccgaactaaccgcgctgatcggcctgcaaaatttatccgcacgctttaattccgcactggcgatcccggcgcaaggcctgtgccaaatcccgaagcccgatgtttccgacactcatccctaa

SEQ ID NO: 88428 - DNA, 1179 bp, Enterobacter aerogenes
atgcgcagtctgcgttattgtttaatttggcttgccgcactgctgctggccccgactctcgccaacgccgacgagaactggcagagcatcagccagcaggcgcgcggccagacggtgtggttcaacgcctggggcggcgacccggcggttaaccgttacctcgactgggtcagcgccgaggtgaaacgggattacgccgtcgatctgcgtattgtacatatcgccgatgccgccgatgcggtcaagcgtattcagaccgaggcgcgtgccggtcgttcccgcggcggttcaatcgatttattgtgggttaatggcgagaatttccgcacgttgaagcaggcgaatttactgcgcagcgactgggccgagaagctgcctaactggcgctacgtcgatacgcgaaaaccggttcgggaagatttctccatcgccaccgacggcgcggaatccccgtggggcagcgcgcagctgacttttatcgcccgccgatcgcagctggctcaaccaccggacagcgcacaggcgctactggctttcgccacagcacatccaggcagcgtcacctatccgcggccgccggattttaccggcaccgctttccttgagcagttgctggttgcgttgaccgatcggccggaggccctgcgccagccgccgcaggagacaagtttcgccgcggtgaccgcgccgctttgggcctatctcgacaggctacacccgctgctctggcgccagggccgcgattttccgctgtcgccggcgcggatggacgcgatgctggcgcaaggcacgctacaactatcgctgaccttcaatccgctgcatgcgcagcaaaaagccgccagcggcgaacttccgcaagacagttatagcttcggttttaaacaagggatgctcggcaacgtgcattttgtcgctatccccgccaacgcccgcgcgacggcgggcgcacaggtggtggctaacttcctgctgtcgccgcaggctcagctacgcaaagccgatccacagatctggggcgatcccagcgtactggagcccgaaaaactcaacgacgcccagcgcgccgcattttacgccgtgcagccgaaagcgacgccgccgatgctggctgaaccgcacgccgcctgggttgacgcgctggagcaggaatggttgcgccgctacggtacccactaa

SEQ ID NO: 88429 - DNA, 1533 bp, Enterobacter aerogenes
atggttgcgccgctacggtacccactaattgcgctgacgtggggagcgatagcgcttatctacctccccctgcttcccgccgccgcgctgatggcgatacctgccgtcgacgccgcggcctggcgggcgctatttagcgatccgcagttgccgcaggcgttggcggcgacgctagtctctacgctgctggcggtgggcggcgcgctgttcatcaccctgatggtgattggcgcattatggccagctactggctggcagcgcctggcgagaagattaccgctgctgctggcggtaccccatgttgccttcgccaccgccgccttgctgctatttgccgaaggcggctggctatatcgtctgtttcccgcgctgagcccaccggtcgatcgctacggtatcgggctgggcctgacaatggcggttaaagagagcgcttttttactgtgggtggcgtatggcgtactgggtgaaaaacagctggcggcccaaagcgtagtgatgaaaaccctcggctacaaccgctggcaatgtctgcagtggattattgtgccggcactgctgccatcgatgagccttgttctgctggccaccgtcgcctggagtttgtcggcggtggatgtcgctttggtgatcggtccgggaaatccgccaacgctagcggtactggcgtggcagtggcttaatcagggcgatccgctgcaacaggcgaaaggcgcgctggccagcctgctgctgctggcgttcacgttaatcttcgcggccatcgcatcggtaggctggcgccgttggcggcaaactattcccgcactatgcggcaagcgcgccgcccctgccaacgcaacgaccggacatatcctggcacaggcggtacccgcctgcggtctggtttgcgcgttgttgttggctggcatttcacaatggacgcagccaacggctgaggcgatcggcaacagcctctggctggcgttaggcgccgcgatactgggggccgtgctgtgtctgctgtggctggagttcggtcccgccagatataacggactatggctgccattaatcgtgccgtcgctgccgcttgccgatggtcaatatcaattagcgcttgtgggctggctcgatggtcaattgatgacggtattatgggggcatctgttatgggtcgtgccatggatgctgtttatcctctccccggcgtggcgtaatctggatccacggttgctattgattgcccgtacgcttggctggcggcgcggacgcctgttctggtgggtcaaactgccgtcaatggcgcgaccgctgcttaccgcgctggcggtcgggttttcggtgagtatcgcgcaatatctgccgaccgtgtggctcggcggcggacggacgccgacgttgaccagcgaagcggtcgcgctgagcagcggcggcgacagtacgcggcttgccgcacaagcgctgtggcaattgctgctaccggcgatctgctttatggttactgcgctgatagcctggtttataggccgtcgccgccggggattacgctaa

SEQ ID NO: 88430 - DNA, 645 bp, Enterobacter aerogenes
atgctaaccgttcacaacctgacattaaccctccaccgccaaccgctgttgtgtggggtaaatttttctgtcgcccccggcgaggtgttggcgctgatgggcccttccggctgcggtaaatcaacccttttcgcctggatgatcggcgcgcttgccgacacctttcgcgccgaaggtgaattatggctcaacaaacgccgctgcgacgggctcgccactgaagcgcgacgcattggcatcctgtttcaggatgcactactgtttgaccacttcagcgtggggcacaatttacagctcgccctgcccgctgagatccgcggcgcggcgcgccagagcgaagttgagcaagcgctggtgcgcgctggcatgccggggttcgcctcgcgcgatccggccacgctctccggcggacagcgcgcgcgcgtcagcctgctgcgcgccctgctggcgaggccgcaagcgctactgctggatgaaccttttaatcgcctggatgcagaacttcgcgccgattttcgccagtgggtgtttgcggaaattgaccggctggcaatcccggcggtcctggtgactcacgacagccaggatctcccaccgggcggacgctgtattaatattgccgcctggcaggcaaattccgcctaa

SEQ ID NO: 88431 - DNA, 1308 bp, Enterobacter aerogenes
atgaaacgtgtttctcaattgaccgcactcgccctgctcatggggcttgctgcttcctctactttcgccgctgataccatgccaacgctggacttttcaacgctgcaacagcagcacggcgtagcgatagatacccgcctcagcgctttctataacggttggccgcaaagcgccaacggcccacagggccatgaaccgcaggcgctaaacctctccgctacctggcttggcgcaatgagcgacgaacaactgcgcgcatgggctactcagcaccggctgcaggccgatacgccaatcgcgttatacggtggcgctgacgataacgccagggttgcggcgcgcctgaaagaagccggattcaccaaactcagcacgcttagcgacgccttcagtcagggcgagcgcctgcagaagctgccgcactttgagcagctggtatatccgcagtggatccacgatttacagcaaggtaaaaccgttaccgccgccccgcagggcgactggaaactgtttgaagtggcctggggcgcgccgaaattttatctgctgaatcacattcccggcgccggttatatcgataccaatgaagtggaaagcgagccgctgtggaacaaagtgtccgatgaacagctaaaagcgatgctggctaaacacggtattcgtcatgacaccacggtgattctgtacggccgcgacgtctacgccgccgcgcgcgtcgcgcagatcatgctgtatgctggggtgaaagatgtccgcctgctcgacggcggttggaaaagctggtccgacgcgaatctgccggtcgagcgcggcatgccagcgaaagaaaaaacggtgacggatttcggcgcgccgatccccggtcagccgcagttaatgctcgataccgaacaggcgcgtgggttactacaccgccaggatgcgtcgctggtcagcgtccgttcgtggccggaatttatcggcaccaccagcggctacagctacatcaagccgaagggcgatattgccggcgcccgctggggccatgccggcagcgattccacccatatggaagacttccataatccggacggcacgatgcgcagcgccgacgatatcgcggcgatgtggaaacagtggaacattctgcccaaccagcaggtctcgttttactgtggcacaggctggcgcgcctcagagaccttcatgtacgccagagcgatgggctggaaaaacgtctccgtttacgacggcggctggtacgaatggagcggtaatccgcaaaatccggtagccaccggcgaacgcggcccggacagcagcaaataa

SEQ ID NO: 88432 - DNA, 633 bp, Enterobacter aerogenes
gtgcttgatagccgcctgcatccccgattgaagcccgtcctgaatgccatcgcccgcgggctcgatcgtccggggatctcccctgacggcctgacgcttttcggttttgctatcggcgtgctggcgctgccgtttctggcgctaggctggtacggcgccgcgctggcggccattgtgctgaaccggttgctggatggcctggatggcgcgctggcgcggcggcgtggtctcaccgacgccggcggatttctggatatctcgctcgattttttgttttacgcgctggtgccgttcggttttattgttgccgacccggcgcaaaatgcgctggcgggcggctggctgctgtttgcgtttatcggcaccggcagcagtttcctggcgtttgcgacactcgcggcaaagcatcaaattgccaatccgggctatgcgcataaatcattttattatcttggcgggttgactgaaggaacggagacaatcctgctatttgtgctgtgttgcctgtttccggcgcacttcacctggctggcgtggtgtttcggcgcgttatgctggctgacgaccttcacccgtatctggagcggctacctgacgctgagggaggcgcaaagccacaacctccctcagtag

SEQ ID NO: 88433 - DNA, 399 bp, Enterobacter aerogenes
atgcaaaaaatcattgatgttgtcgccgcgattatcgaacgcgacggtaaaatcctgctggcgcagcgcccgccgcatgccgatcagccggggctgtgggagttcgccggaggcaaagtcgaacatggcgaaagccagccgcaggcgttagcgcgcgaactggaagaggagttggctatcgttgcgaggccaacccgctatatcgccagccatcaacgggaagtctccggacgtttgatccacctgcatgcctggtggattggcgagtttagcggtgaaccggtcgctcattaccatagcgaactgcgctggtgtacgccgtcgcaagcattagaatttgatctggcgccggcggatattcctctgctgaatgcctttatcgctcaacaggcaggttag

SEQ ID NO: 88434 - DNA, 1344 bp, Enterobacter aerogenes
atggatcaggcgtgtactctggaaagttttctcgcccgcgttcaacagcgcgacccgcatcaaactgaattcgcccaagccgtccgcgaagtgatgaccactctgtggccgttccttgaacagaatccgcgctatcgtcagctcaatttgctggaacgcctggtcgaaccggagcgcgtcatccagttccgcgtcgtctgggttgacgatcgcaatcaggtgcaggttaaccgcgcctggcgcgtgcagtttaactccgcgattggcccatacaaaggcggcatgcgcttccacccgtcggtcaacctgtcgatccttaagttcctgggcttcgaacagaccttcaaaaacgccctcaccacgctgccgatgggcggcggtaaaggcggcagcgatttcgacccgaaaggtaaaagcgacggcgaagtgatgcgcttctgccaggccttgatgacggaactgtatcgtcacctcggcccggacaccgacgttccggcgggcgacatcggcgttggcggccgcgaagtcggctttatggccggcatgatgcgcaagctttccaacaatagcgcctgcgtcttcaccggcaaaggtctctccttcggcggcagtctcatccgcccggaggctaccggttacggtctggtttactttacagaagcgatgctcaagcgccacggcctgggcttcgaagggatgcgcgtcgcggtatccggatccggcaacgtggcgcagttcgccattgagaaagccatggaattcggcgcgcgcgtcattaccgcttccgattccaacggtacggtggtagacgaagccggcttcactaaagaaaaactggcccgtctgatcgacattaaagagcgcagccacggtcgcgttgccgattacgcgcgcgaattcggtctaacctacctcgaaggccagcagccgtggtcagtgccggtagatattgcgctgccgtgcgcgacccagaacgaactagatgtcgatgccgcgcaaatgctgatcgccaatggcgttaaagcggttgccgaaggcgccaacatgcccaccaccattgccgccaccgatctattcctcgatgctggcgtgctgttcgcgccgggcaaagctgccaacgccggcggtgtcgccacatccggccttgaaatggcgcagaacgccgcgcgtatgggctggaaagcggagaaagtggatgcgcgtttgcatcacatcatgttggatattcaccacgcctgcgtcgaatacggcggtgaagagaagcagaccaactatgtccgcggcgccaatatcgccggcttcgtcaaggtcgctgacgccatgctggcgcagggtgtgatttaa

SEQ ID NO: 88435 - DNA, 978 bp, Enterobacter aerogenes
gtgaaatatatctcaattagtcacccgggcggcccggaggttcttcagattggtgaaggcgacatcccttcggttggtgataacgacgtcctgatccaggtgaaagccgctggcgtcaatcggccggatatcttacagcggcagggcgtttatccgatgccggaaggagtaacgccgatacccgggctggaagttgctggagtggtcgcggcggtaggagcgcaggtgacggattttcatcccggcgataaagtttgcgctctgaccaacggcggaggctatgcggagtattgcgcggtaccggcggggcaaacgttgccaataccgcctgggctgagttttagcgaagcggcggcgatacctgaaactttctttaccgtgtgggccaacctgtttcagatgggcagggcgcaacctcatgaaagcgtgctgattcacggcggggccagcggcatcgggacaacggcgatcctgctgtgtcatgagttaggtatgaaagtctataccaccgttgggcaggaagaaaaagtggcggcgctgcgtccttatgccacggctatcaattacaaaaccgatgatttcgctgagaaaatcaatcagttgaccgatggtaaaggcgtcgacgttattctcgatatcgtgggtggcccctattttaatcgtaatctggaactgctgaagcgagatgggcggctggtgattatcggctttatgggcgggcgaatcgcccatgatgttgatattcaaaccttgatgctcaagcgcgcgaccgtgaccggttcaacgatgcgcggacgaagcgcggaagaaaaaaggcagatcgctcaggcgctacagcgccatgtctggccgctgctgtcgcagggtaaatgtaaaccgctgatttacgccagctatccgatggctgaaatcgcgcaggcgcatgcctgcctcgatagcggtaatcacctggggaaagtggtgattaccatggagtag

SEQ ID NO: 88436 - DNA, 852 bp, Enterobacter aerogenes
atgagcgaacaaatcagtaaacaaccgcaagttgaccacgctgaagagaatgcttttttcccttcagcctactcccttagtcagtttaccagcccggtgtccgatctcagcggcgctgattatgcatcagggtatcgcgggcggcggaaagtgctggttatcgccgccgatgaacgttacctgcctaccgataacggcacgctcttttcgaccggtaatcatccggtagagacgctgctgccgatgtaccatctgcacgccgcaggtttcgattttgatattgcgacgctctccgggcaaatggtcaagttcgaatactgggcgatgccgcgcgaagaccaaaagattatgccgttcttcgagcgttatctgccgcagttccgccagccgctggcgctttcagatgttgtggggcaactgggggctgatagcgactatgcggcggtatttattcccggcggccacggtgcgcttatcggcctgccggagagcgaagccgtcgccgaaacgctgcgctgggcgctgcggcacgatcggtttgtgatttcgctctgtcacggcccggcggcgtttctcgcattacgtcatggggagaatccgttaaacggttatgccatttgcgcgtttccggatgctgccgataaacaaacgccggatatcggctatatgcccggtcacctgacctggtattttggcgaagcgctgaaagcgatggggctggaaatcgtaaacagcgatattaaaggtcgtgtgcatcaggatcgtaaagtgctgaccggggacagtccttttgcggcaaatgcgctcggtcaactggcggcaaaagcgttgctcgacgaatatgcaaagtaa

SEQ ID NO: 88437 - DNA, 2064 bp, Enterobacter aerogenes
atgcggttgtttattgcagaaaaaccgagtctcggtcgcgctatcgccgatgtgttgccgaaaccgcatcgcaaaggcgatggctttattgagtgcggcaacgggcaggtggtcacttggtgtatcggtcacctgctggagcaggcgcagccggatgtttacgacggacgctacgcgcgctggaacctgctcgatctacctatcgttccggaaaagtggcaactgcaaccaaaaccgtcggtcaccaaacagctgaacgtcatcaagcgcctgcttggcgaggcgcaggaagtggttcacgcgggcgacccggatagagaagggcaactgctggtcgatgaggtgctggactacctgcagctggcgccggaaaagcgccagcaggtgcagcgttgcctgattaacgacctcaacccacaggcggttgagcgggcgattaaccgcctgcgcgcgaatagcgagtttgtcccgctgtgtgtgtcggcgctggcccgcgctcgcgccgactggctgtatggtatcaacatgacccgcgcctacaccattctcgggcgtaatgccggctatcagggagtgttgtcggttggtcgcgtacagacgccggtgttggggctggtggtgcgtcgcgatgaagagatcgagaacttcgtcgccaaagatttctttgacgtcaaagcgcatattgtcacgccgcaagacgagcggtttatcgccacctgggtgccgagcgaagcctgcgaaccctatcaggatgaagaggggcgtttactgcatcgcccgctggccgagcatgtggttaaacgcattgaaggccagccggcaatcgtgaccggctataacgataagcgcgattccgaaccggcgccgctaccgttttcactgtcggcgttacagatcgaagcggccaaacgtttcggcttcagcgcccagaacgtgctggatatctgccagaagctgtatgagacccacaaactgattacctatccgcgctcggatagccgctacctgccggaggaacattttgccggccgccatgcggtactgaatgcgattagcgtccatgcgccggatctgctgccgcagccggtgatggatccggagatccgcaaccgttgttgggatgataaaaaggtcgatgcgcaccatgccattatcccgaccgcgcgcagcagtcaggtcaaactcaacgataacgaagagaaggtatacaacctgatcgctcgtcagtatctgatgcagttctgcccggatgcggtgttccgcaagtgccagattgacctggatattgctaacggcaaatttgtcgccaaggcgcgcttcctcgccgaagcgggctggcgcgcgctgcttggtaacaaagagcgcgacgaagagaacgacggtacgccgctgccggtggtcgccaaaggcgatgagctattgtgcgaaaaaggtgaagtggtggagcgacaaacccagccgccgcgccactttaccgacgcgacgttactgtcggcgatgaccggtattgcccgcttcgtgcaggataaagaactgaaaaagatcctccgcgcaaccgacggtctggggacggaagcgacccgcgccgggattattgagctgctgtttaagcgcggtttcctgaataaaaaggggcgctatatccactcatcggatgccggtcgggcgctaatccattctctgccggaaatggccgcgcgcccggatatgaccgcccactgggaatcggtattgacgcaaatcagcgaaaaacagtgccgctatcaggactttatgcagccgctggtggggacgctgttccagcttatcgatcaggcgcggagcacgccggtgcgccagttccgcgggctggtcgcgccaggcggagcgaaaaagtcgtttagtaaagggaaaggcaagccgaaagggaaaaagccggaggcggacatcgcgccggaaagtccgcaattattttcttcgcccctcgccacgaggggcttagctaaaacgcacttccgcctgagggcgcttaacccggatgagggttttcccacatatcatttctgcctccctgctctaaaatag

SEQ ID NO: 88438 - DNA, 1044 bp, Enterobacter aerogenes
atgagcgagcaagctattcgtttaacgcaatacagccacggagccggttgcggttgtaaaatttcccctaaagtgctggaaaccattctgcatagcgagcaggcgaagtttgtcgacccgaacctgcttgtcggcaacgaaaccagcgacgatgcggcggtctacgatctgggtaacgggacgtcgatcatcagcaccaccgattttttcatgccgatcgtcgataatccttttgattttggccgtatcgcggcgactaacgccatcagcgacattttcgcgatgggcggcaaaccgattatggcgattgcgatacttggctggccaatcaacacgctggcgccggagattgctcgcgaagtggttgaaggcgggcgttttgcctgccagcaggccgggattgcgctggcgggcggtcactccatcgatgcgccggaaccgattttcgggctcgcggtgactggcgtggtgccaaccgaacgtatcaagaaaaacagcaccgcgcaggcgggctgcaagctgtatctgaccaaaccactgggtattggcgtgctgactaccgccgagaagaaatcgttgctgaagccggaacatcaagggctggcgacggaaaccatgtgccagatgaaccttgccggcgccgcatttgccaatatcgaaggggtaaaagcgatgaccgacgtcaccggtttcggcctgctggggcatctcagcgaagtctgccgcggcgcgggcgttcaggcgcaactaaactacgccgatatccctaaactcccgggcgttgaagcttacattgccgccggagcggtgccgggcggcaccggacgcaactttgccagctacggtcatttgatgggcgagatgccggcggcatggcgcgatctgctgtgcgatccgcaaacttccggcggcctgctgctggcggtcacgccggaagccgaagccgaagtccaggccgctgccgcggaatttggcattaagcttgccgccattggcgagctggtcaccgcccgcggcgggcgtccaatgatcgagatccgttga

SEQ ID NO: 88439 - DNA, 747 bp, Enterobacter aerogenes
atgaaaaagcgcgttctcgccctctgcctcgccagcctgttttccgttaacgctttcgcgctggtccctgccggcaatgatgcaaccaccaaaccggatctctattatctgaaaaatgcacaggccatcgatagtctggcgctgttgccgccgccgccggaagttggcagcatcgcatttttaaacgatcaggcgatgtatgagaaaggacgactgctgcgcaataccgaacgcggcaagctggcggctgaagatgctaacctgagcgccggcggcgtcgcgaatgccttctccagcgcttttggttcgcccatcaccgaaaaagacgcgccgcagttacataagctgctgacaaatatgattgaggatgccggcgatctggccacccgcagcgcgaaagagaaatatatgcgcattcgcccgtttgcgttctacggcgtttcaacctgtaacactaccgagcaggacaagctgtcgaaaaacggatcttacccttccggccatacctctatcggttgggcaaccgcgctggtactggcggagatcaatccgcagcggcaaaacgaaattctcaaacgcggctatgagctgggcgaaagccgggttatctgcggctatcattggcagagcgacgtcgatgcggcgcggatagtcggctcggcggtggtggcgaccctgcataccaacccggccttccaacagcagttgcagaaagcaaaggatgaattcgccaaaacgcagaagtaa

SEQ ID NO: 88440 - DNA, 552 bp, Enterobacter aerogenes
atggatgctctcgaactactggtaaatcgccgcagcgcgtcgcgcctgaccgatccggctccggctggtgaacagctggaaaatatccttcacgcggggatgcgcgtgccggatcacggcacgttacaaccgtggcggttctttattattgccgatgatggccgcgaacgctttagccaactgctggaaaaaggggcgatggccgccgggcaggatgaaaaagccattgaaaaagcacgtaatgcgccgttccgtgcgccgttgattatcgcggtagtcgcacgctgcgaagaacatccgaaggtaccgctgtgggaacaggagatgtccgcgggatgtgcggtgatggcgatgcaaatggccgcagtggcgcagggctataacggtatctggcgtagcggtccgttaaccgagagtccggttgtccgcgaaggctttggctgccgagaacaggacaaaattgtcggtttcctctaccttggcacgccgcagttaaaagcatcaaccacgtttacgcgcccggataccgcgccgttcgtcacgcgcttctga

SEQ ID NO: 88441 - DNA, 1854 bp, Enterobacter aerogenes
atgcgaaccctttggcgatttcttgccggattttttaaatggacatggcgaatactcaatttcattcgccaattcgcgctgaacctagtgttcctggtgttagtgctgatttgcgtcggcatctgggcacagtttagcagcagcaccgcggaacataccgcacgcggcgcgctgctgatggacatcaccggcgtggtcgttgataagccttccgccagcagcaagctcggggtcatcggccgccagctgttcggcgccagttccgatcgtctgcaggagaactcgctgttcgatatcgtacagacgattcgccaggcgaaagacgaccgtaatatcaccggtatcgtactggatctgaaaaacttcgtcggcggcgatcagccctcgatgcagtatatcggtaaagcgctacgcgagttccgcgacagcggtaaaccggtatatgccgtaggtagcagctacacccaggggcaatactatctggcgagtttcgccaataaaatttggctctcgccgcagggtgaagtcgacctgcacggctttgccaccaacggcctgtattacaagtcgctgctggataaactgaaagtctcgacccatgttttccgcgtcggtacttacaaatccgccgtcgagccgtttattcgcgacgacatgtcgccggctgcgcgtgaagcggacagccgttggatcggcgaactgtggcagaactatctcaacaccattgccgctaaccgccagatcaccgcgcagcagctgttccccggcgctcagggcgtgatcgacggcctgcgtaaagttgatggcgataccgcgaaatacgcgctggataacaagctggtcgacgagctggccacctcgacggaagtggaaaaagcgctgactaaacagtttggctggagcaaagcggataacaactatcgcgccatcagctactacgattacaacgtcaaagcgccaactgaacagggttcggcggttgcggttatctttgctaatggcgccatcatggacggtgaggaaacgccgggtaacgtcggcggcgacaccaccgcggcgcaaatccgcgacgcgcgcctggatccgaaagtaaaagcgatcgtcctgcgcgtcaacagcccgggcggcagcgtcagcgcctcggaggtcatccgcgaagagctggcggcggcgaaagcggcgggtaaaccggtggtggtctcaatgggcggcatggcggcatccggcggttactggatctccaccccggcggattacatcgtggcgaacccgagcaccctcaccggctccatcggtatcttcggcgtgattaacacggtggaaaatacgctcggttcgattggcgttcataccgatggcgtcgccacttcgccactggccgatgtctcaaccaccaaatcgctaccgcctgaagtgcagcagttaatacagctgagcatcgaaaatggctataagcgctttatcaccctggtggctaatgcgcgtaagagcacgccggagaagattgaccaaatcgcgcaaggccacgtctggaccggtgaagacgccaaggccaatggtctggtagatagcctcggcgatttcgacgatgcggtggcgaaagccgcggagctggcgaaactgaaacagtggcatatcacctggtaccaggaagaacccacgttcttcgcgatggtgatggatagcctgaccggttcagtgcgcgcggctctgccggccgcgattcaagcatacctgcctgcgccggttgtggcagccgcggacgttgtgaaaacggaaagcgataaactggcggcatttaacgatccgcagaatcgctatgccttctgtctgacctgcgccaatattcgttaa

SEQ ID NO: 88442 - DNA, 1017 bp, Enterobacter aerogenes
atgcaaaagaaatcgatttacgttgcctacaccggtgggaccatcggtatgcagcgctccgatcacggttatatccccgtttccggccacctgcagcgtcagctggcgctgatgcccgagttccaccgcccggagatgccggactttactattcatgaatatgcgccgttgatggactcgtctgatatgacgccggaagactggcagcatatcgctgacgacattcgcgaccactacgaccaatacgatggtttcgttatcctgcacggcaccgataccatggccttcaccgcttcggcgctgtcgttcatgctggagaacttaggtaagccggtcattgtgacagggtcacaaatcccgctagccgagctgcgttccgatgggcaaatcaatttgctcaatgcgctgtatgtcgccgccaactacccgatcaatgaagtttcgctattcttcaataatcgtctgtatcgcggcaaccgcacgaccaaggcccacgcagacggttttgatgcctttgcttcgccaaacctggcgccgctgctggaagccggcatccatatccgccgtctcggtaccccgcccgcgccgcacggaaagggcgagctgatcgtccaccccattacgccgcagcctatcggcgtggtcactatctatcctgggatttctgccgatgtggtgcgtaatttcctgcgtcagccggtgaaagcgctgatcctgcgctcctatggcgtaggcaatgcgccgcagaacggcgagtttattcaggtcctggcggaagccagccagcgcggtattgtggtggtgaacctgacgcaatgcatgtcgggtaaggtgaatatgggtggctatgccaccggcaacgcgctggcgcaggccggagtcattagtggttttgatatgaccgtggaagcgacgctgacaaagctacactatctgctcagtcagaaccttgatggtgcggccattcgaaacgccatgcagcaaaacctgcgcggcgagctgacccccgatgaataa

SEQ ID NO: 88443 - DNA, 642 bp, Enterobacter aerogenes
atgagccaccgcgcgctgctattggtcgacctgcaaaacgatttctgcgctggcggcgcactcgccgtccccgaaggcgacagcaccattgatatcgcaaatcagctgatcgactggagcctggcgcgcggcgacgccatcatcgcaagccaggactggcatccggccaaccatggtagctttgccagtcagcatcaggcggaaccctatgcccagggcgagcttgatggcctgccgcagactttctggcccgatcactgcgtgcagcatagcgatggcgccgcgctgcacccgctactcaaacagcaggctattaacgccgtgtttcataaagggcaaaatccggtaatcgacagctacagcgcgtttttcgacaacggtcaccggcagaaaaccgaattggatggctggctgcgcgcgcacggcgtgacggagctgaatattctcggcctcgcgacggattactgcgttaagtttaccgtgcttgatgcgctggatttgggctacaccgtcaacgtgatcaccgacggctgtcgcggcgtcaacctgcagccgcaggacagcgccgttgcctttatggaaatggccgccgccggagctacgctctacacccttgatgactggctggaaacccagccctga

SEQ ID NO: 88444 - DNA, 690 bp, Enterobacter aerogenes
atgaaacttttgcccttgctggcagcattacccctgctctgcgcctctgtcgtttccgcgcaatctttcatgtcggtcggctacttcaacggcggcggcgacgtcaccgcaggccccggcggcgatatcgacaagctggatgtccgacaaataacccaccttaactactcgttcgggcttatctacaacgatgaaaaagacgagaccaacgaggcgctgaaagatcctgagcatctccatcaaatctggctgtcgccaaaagtacaggcggatttacaaaaactgccggcgctacgtcagcaaaatcccgatctgaaagtcctgctctccgttggcggctggggcgcgcgtggattttccggcgcggcggccacgccggaaagccgagcggtgtttatccgttcggttcagcaggtcattgaccaatatggccttgatggcatcgatcttgactgggaatttccggttaacggcgcctggggattggtggccagccagccggcggatcgcgataactttaccgcgttgctgaaagaactacgtgccgccgttggcactaagaaactggttaccatcgccgttggcgccaatgttgaaagtccaaaaagctgggtcgacgtgaaagcggtcgccccactgctggactatatcaatctgatgacctacgacatggcctacggcacgcaatag

SEQ ID NO: 88445 - DNA, 495 bp, Enterobacter aerogenes
gtggtgaataactatctggctgctggcctcaaacccagccagatgaatctcggcattggtttctatggccgggtaccgaaacgtgccgtcgagccagggattgactggagtaagccagacgcgcagaaaaacccggctacccagccttacttcggggcgcagcaaatcgagttgtttaaatcgctgggttatgacctgagcaaagatacctatgtgaaatacaacgatattgttgccaaactgctcaacgatccgcagaaacgctttactgagcactgggatgacgaagcgaaggtgccgtggttatcggtaaactctgccgatggcaaagcgcttttcgccctctcctacgagaatccacgttcggtggcgatcaaagccgattacatcaagagcaaagggttagcgggcggcatgttctgggaatatggcgcagatgacaaaaaccagcttgcccgacaactggccgaatcgctaggtatcaagacgcagtaa

SEQ ID NO: 88446 - DNA, 279 bp, Enterobacter aerogenes
atggatatcgagcaaattattgccagcatgacgccggaactgtaccaacgtttagccaccgcggtggagttaggaaaatggccggacggcgttgcgctgaccccggaacaaaaagaaaacagcatgcagctggtgatgttgtggcaggcgcgcaacaacacggatgcgcagcatatgaccatcgacaccaacggtcagatggtgatgaagagcaaacagcaattgaaagaggatttcggtatcgtgccgaagccgattgcgacgttcaaaccgcagtaa

SEQ ID NO: 88447 - DNA, 414 bp, Enterobacter aerogenes
atggctaataaaccatctcctgacgagctcaaacaagaattgagcgagatgcagttttatgtgacgcagaatcacggtaccgaaccgccgtttaccggacggttgctgcataacaaaaaagacggcatctaccactgcctggtctgcgatgcgccgctatttcactcacaatccaagtatgactccggctgcggctggccgagcttctatgagccggtgagcgacgacgcgattcgttatctcaatgattactcccacgggatgcagcgtactgaaattcgctgtggcaattgcgatgcgcacctggggcatgtcttcccggatggcccgcagccgaccggcgagcgtttttgcgtcaattcggcctctttaagcttcaccgatgagcaaaacggcgagcgaactaaaggctaa

SEQ ID NO: 88448 - DNA, 996 bp, Enterobacter aerogenes
atgactatcaaagtaggtatcaacggttttggccgtatcggtcgcattgttttccgtgctgctcagaaacgttctgacatcgagatcgttgcaatcaacgacctgttagacgcagagtacatggcttacatgctgaagtatgactccactcacggtcgtttcgacggtaccgttgaagtgaaagacggtcatctggtcgttaacggtaaaaaaatccgtgttaccgctgaacgtgacccggctaacctgaaatgggatgaagttggtgttgacgttgttgctgaagcaaccggtatcttcctgaccgacgaaaccgctcgtaaacacatcaccgctggcgcgaaaaaagtcgttctgactggcccgtccaaagacaacactccgatgttcgttcgcggcgctaacttcgacacttacgcaggccaggacatcgtttctaacgcatcctgcaccactaactgcctggctccgctggctaaagttatcaacgacaacttcggtatcgttgaaggcctgatgaccaccgttcacgctaccaccgcaactcagaaaaccgttgatggcccgtctcacaaagactggcgcggcggccgcggcgcagctcagaacatcatcccgtcctctaccggcgctgctaaagctgtaggtaaagtactgccagaactgaacggcaaactgaccggtatggcgttccgcgttccgactccgaacgtatccgttgttgacctgaccgttcgtctggaaaaagcagcgtcctacgaagaaatcaagaaagcaatcaaagcggcttctgaaggcgcaatgaaaggcgttctgggttacaccgaagacgacgttgtatctaccgatttcaacggcgaagtttgcacttccgtgttcgatgctaaagctggtatcgcactgaacgacaacttcgtgaaactggtttcctggtacgacaacgaaactggttactccaacaaagttctggacctgattgctcacatctccaaataa

SEQ ID NO: 88449 - DNA, 885 bp, Enterobacter aerogenes
atgattaataaaatttttgctctcccggtgattgaacaactttctcctgcattctcccgccgcaagctggacgatcttgaacttatcgtcgttgaccacccgcaggtaaaagcttccgtcgccctgcagggcgctcacctgctctcctggcaaccggccggtgaagaagaagttttgtggttgagcaacaataccccatttaaaagcggcgtcgccctgcgcggcggcgtacccatctgctggccatggttcggtccgtcagcgcaacaggggctgccgtcgcacggtttcgcacgcaacctgccgtgggcgctaaaatgccaggacgaagatgaaaacggcgtgatgctgaccttcgaactgcagagcagtgacgaaacccgcaaatactggcctcacgacttcacgctgtatgcgcgcttcaagctgggtaagacctgcgagatcgaactggaagcccacggcgagtttgaaaccacctccgccctgcacacctacttcaacgttggcgatatcacggcagtcaaagtgagcggccttggcgatcgctatgtcgataaagtgctgaatgccgaagaaggtgtgctgaaggacggcatccagaccttcccggaccgcaccgaccgcgtttatctcaatgccgaagcctgcagcgtgattcatgatgacgtcctgcagcgcaacatcgacgtgatccatcgccatcacggtaacgtcgttgcctggaacccgggcccggcgctttccgtcagcatgggcgatatgccggatgatggctacaaaacttttgtttgcgtggaaacctgctgcgtgaccgtgccgcagaaagccagcgaagagaaacccactcgcctggcgcagactattcgcgttgtgaagcgttaa

SEQ ID NO: 88450 - DNA, 747 bp, Enterobacter aerogenes
gtgactaaaatcaaacttctggcactgggtgtgttcatcgcgacgtcagctggcgcagtgcacgctgacgggaagttaacgctgggggccggcgtgggcgtcgtcgagcatccttataaacaatatgatgcagatgtttacccggtacctgtcattagttatgaaagtgataacttctggttccacggtttgggtggtggctactacctgtggaatgataccaacgacaaactgtccgtgaccgcttactggtcgccgatgtatttcaagccgggcgacagcgacaattcgcagatgcgcaagctggaccgccgcaaatccaccatgatggcggggttgagctacgttcataacactcagtacggattcctgcgtacgacgctggccggcgatacgctggacaacagcaatggcattacctgggatatggcctggctgtaccgttataccaacggcaacctgaccctgacgccgggtattggcgtggagtggaatagcgacaatcagaacgaatactactacggcgtctcgaagcatgagtcgaatcgcagcggcatgcgcagctacgatcctgacagcagttggaacccgtatctggagctggcggcgaactatcgtttcctcggcgactggagcgtttacggtattgcccgttacactcgtctgtctgacgaaatcaccgatagcccgatggtggacaaatcctggagtggcctgatttcgaccgggatcacctataccttctga

SEQ ID NO: 88451 - DNA, 1935 bp, Enterobacter aerogenes
atgaatatattcgatcactatcgccagcgctatgaagctgccaaggacgaagagttcacactgcaggagtttcttaccatctgccggcaagatcgcagtgcttatgccaacgcggcagagcggctattgacggccattggtgaaccagtcatggtcgatacggccctggagccgcggctgtcccgcctcttttcaaaccgggttgttgcacgctatccggcgtttgaagagttctatggtatggaagatgccatcgagcagattgtttcctatctgaaacatgctgcgcagggtctggaagagaaaaaacagattctgtatctgctggggccggttggcggcggtaaatcctcgctggcggaacgcctgaaatcgctgatgcaaagggtgccaatctacgtgctgagcgcgaatggcgaacgcagcccggtcaacgatcaccctctgtgcctgtttaacccgcaggaggacgcgcagatcctcaataaagaatacggcattcctaaccgttatctcggcacaattatgtcgccgtgggcggctaaacgcctgcacgagttcggcggtgatatcactaaattccgcgtcgtgaaagtgtggccgtcaatcctcgaacagattgccatcgccaaaacggaacccggtgatgaaaataaccaggacatttcggcgctggtggggaaagtggatatccgtaaactggaacactatgcgcaaaacgacccggatgcctatggttactccggcgcgctatgccgcgccaaccaggggatcatggaattcgtcgagatgtttaaagcgccgattaaagtattgcacccactgctgacggcgacccaggaaggcaactataacggtaccgaaggtatctccgccctgccgttcaacggcattatcctcgcgcactccaacgaatccgagtgggtgaccttccgtaataacaaaaacaacgaggcgttccttgaccgtgtctatatcgtcaaagtgccttattgcctgcgcatctcggaagagatccgtatttatgaaaaactgttgaataacagtgagctgacccatgcgccatgcgccccaggaacgcttgaaacgctgtcgcgcttctctattctgtcgcgcctgaaagagccggaaaactcgagcatctactcgaagatgcgcgtctatgacggcgaaagcctgaaagataccgacccgaaagcgaaatcctaccaggaatatcgtgattacgccggcgtcgacgaagggatgaacggtctctctacccgttttgcctttaaaattctctcaagggtgtttaacttcgatcatgccgaagtggcggccaacccggtccatctgttctacgtactggaacagcaaatcgaacgcgaacagttcccgcaagagcaggccgaacgttatctggaattcctcaaaggctatctgatcccgaaatacgccgaatttatcggcaaagagatccaaacggcgtatcttgagtcttattccgaatatggacagaacatttttgacagatatgtcacttatgcagatttctggattcaggatcaggagtaccgcgatccggataccgggcaactgttcgaccgtgaatcgctgaattcggaactggagaaaatcgagaagcccgccgggatcagcaacccgaaagatttccgtaatgaaatcgtcaacttcgtgctgcgcgccagagcgaataacagcggacgtaatccgaactggaccagttatgaaaaactgcgcacggttattgagaagaaaatgttctccaataccgaggagctgttgccggtcatttcgttcaatgccaaaacgtctaccgacgagcagaaaaaacacgacgacttcgtcgatcgcatgatggaaaaaggctatacccgtaaacaggtacgcctgctgtgcgaatggtacctgcgggtacgtaaatcgtcctga

SEQ ID NO: 88452 - DNA, 1284 bp, Enterobacter aerogenes
atgacctggttcatagaccgacgcctgaacgggaagaacaaaagcgctgtcaatcgtcagcgctttctgcgccgttacaaggcgcagataaagcagtcgatctccgaagccatcaataaacgttcggtgaccgatatcgacagcggtgaatccgtctccattccgacggacgatattaacgagccgatgtttcatcaggggcgcggcgggcttcgtaatcgcgtccatcccggcaacgatcactttgtgcagaacgaccgtattgaacgccctcagggcggcggcggcggaggcggcggtggtcaggggcaggccagcgccgatggcgagggccaggatgaattcgtctttcagatttcgaaagatgaatatcttgacctgctgtttgaagatctggcccttcccaacctgaagaaaaaccagcaacgccagttgaacgagttcaaaacccatcgtgcgggttttaccgccaacggcgtgccggccaatatcagcgtggtgcgttcattgcagaattcgctggcacggcgaaccgcgatgaccgccggtaaacggcgcgaactgcgggcgctggaagacgatctcgataccattgccaaaagcgaaccagcgcagttgctggaagaggagcggctacgtaaagaaattgcggaactacgggctaaaattgagcgcgtgccgtttatcgacacctttgatttacgctataaaaactatgagaaacgaccggagccttcaagtcaggcggtgatgttctgcctgatggatgtttctggttcaatggatcagtccaccaaagacatggcgaagcgtttttacattctgctgtatttgttcctcagccggacctataaaaacgttgaagtggtctatattcgccaccacacccaggcgaaagaggtggatgaacatgagtttttctactcccaggaaaccggcggtacgattgtttcaagcgccttgaagttgatggatgaggttgttaaagcccgctatgacccggcgcagtggaatatttacgccgcacaggcgtcggatggcgataactgggcggatgactcgccgctgtgtcatgaactgctggcgaagaaaatattgccggtggttcgttactacagctatatcgaaatcacccgccgcgctcaccagactctgtggcgcgaatatgaacatctgcaggcgacgtttgagaattttgctatgcagcatattcgcgatcaggaagatatttatccggtgttccgcgaactgtttcataaacaaggcgcgaccagtaatacttag

SEQ ID NO: 88453 - DNA, 216 bp, Enterobacter aerogenes
atgattaacaatattcatttccgatgcccgtgctgccatgggtcacaatacagaacctcacattttgacgtgagcgaaaaaaaccccttcggcgcgaaatgcattttttgcaaatccgacatggtgacttttgacaatatcgaatctatcgatgtttatcagcctgtcatgtcacaactcgccggaagcaaaatgtttgcctccgccgcctcatga

SEQ ID NO: 88454 - DNA, 1491 bp, Enterobacter aerogenes
atgaaattacagaataaattactgcgacatgttatttccgcaggcgttgtggtgttgacgtcttcttttcttgtatacgaattaatcgctacccaccgcgatatgtcaggctatatgcgatacatcatagaaaaaggagaatcgacctttctctatgataagtatcagaatcaactcatcatctctcagtttctgcgtaagctggatactcccccaaaccaaacagaggtagaacaggtctgcaatagcgtacaacacaacggggatgtcagtggtttgaatatcgccggatatacctatccccagttgcatggcacgctaagcgccgcgcatgccgactgcggcaagtggcgtggagatattcctgcactccaggcattcgatcgcgcggttgccaaaaatgatagctggcagccagaggttcccgcgacgcttaaatcagaaaaacgctttcgctattacatagacctggtaaataaatacatctacttttatgcgcccgtcagaattaaaagtaatccgatacagaactggaattttcttcaggacagtaaactgggtattagccaggccagccttgatggtttagaacagggtcgttcgctcatctcgaccgtgtatgttgatgcgatgacgggaaagaatattttatcgtttttaacgccagtgtatttcaaggataagctgaaaggcgtagtgatggtcgatgtgaccgcgccagagattgaggccttgttatacacccgcgaccgacctttggtgtggcgctatctggatattaccttgaaggattccgataccggcgcactcattgaggtacatcatagtaaaacgcacctgttgaattacgcccattacacccatcaggtagcagaaaacttacggataacgctgtctctggatgttatgtattttctgcttagttcatggaaactcttcctgttttatttactctctaccgccgcattactgcatctggtgcgggttcatttccgcctttataactcggtatcgaaagagaatatcagcgataccatgaccggcctttataatcgtaaaatccttaccacgatgctggagtcgcgcctgcaacgacttaccgcgcaaggggttaacgtggtaacgatggcccttgactgcgatggactgaaaaagatcaacgatacctgggggcataacgccggcgacgaagcgattattctactggcgcaggctatttccgcatccattcgtagcagcgattatggcgtgcgcttaggaggcgatgagttctttctaattctgatcgattatccggaagctgaagcggaaaatatcccggtgaggatccggcaatatctggcgattcatgaccatcaacagcgcgtcgatttctcctggggcgcagaaattcttgcgccagaacagtcgctcagcgaagcaatgaaagctgccgatgcgcgcctgtatatgaacaaaaagcagaaaaaaagccccggcattcgcagataa

SEQ ID NO: 88455 - DNA, 501 bp, Enterobacter aerogenes
atgcaatcgccagagaccgccgacatacaccagcaattatgccgcctccttgatgagcaacaggcccgctatcgggtcatggaacatgaagccgttggtaaatgtgaagccgtatctgcaatccgcggtaccgcgctgggacagggcgccaaagcgctggtctgtaaagtgaaaggtaatggggtaaaccagcacgtgctggctatccttgccgccgatcagcaggccgatttatctcgcctggcgcagcatatcggcggcaataaagcctcactcgccagcccggcagaagtcgatgcccttaccgcctgcgtattcggcgccattccgccgtttagcttccaccctaagctaaaactggtcgccgacccgttgctgttcgaacgttttacagagatagcctttaatgccggcctgctggaaaaatcgatcattatgaataccgacgattatctgcgtatcgcccgccctgagctggtcgcgttccgtcgcgtcatttag

SEQ ID NO: 88456 - DNA, 447 bp, Enterobacter aerogenes
atgttcgatacaaccctgtttattttgctggtgctggcggcactcggctttatcagccataacaccactgtcgctatctcaatactggtgctcatcatcgtacgggtgacaccgcttaacgttttcttcccctggattgaaaagcaggggctgagcatcggtatcatcattctgaccatcggcgtgatggctcccatcgccagcggaacgttaccgccctcgacgctgattcactctttcgtcaactggaagtcactgctggcgattgccgtgggcgtattcgtctcgtggcttggcggacgcggagtcgcgctcatgggttcgcagcctcaactggtcgccgggctgctggtgggtaccgtgctgggcgtggcgctatttcgcggcgtcccggtcgggccgcttatcgccgccggtattatttcgctttttatcggaaaggcttag

SEQ ID NO: 88457 - DNA, 792 bp, Enterobacter aerogenes
atgattggactgggtttagacggctatgaaccagacagcggacatgaagcggcgctggcgtttcgcattcaggtggtggacgacgagcagttcattccgcgccatcagcaccgcaaaggtcaactgatcctcgcgttacacggcgctttaacctgcgaagtggataacgccatgtggatggtgccgccgctgtatgcggtttgggttccaggcctgcttccacacagcaatcgcgcaacgccaggggcacaggtgtgctttttgttcatagaaccgggggcggcgccgatgcctgagcattgctgcacgttaaaaatctcacccctggtgcgagagttgattatgacccttgcggaacgcggcagggaggcgcttgacgcgccgcctacgcagcgcctggtgcaggtattatttgatgagctaccgcaacaaccgcaagaacatctgcaattgccggtttcaggacatccgaagatccgccggatggccgacaccatggcccgcgatccggcacactggcagacgctctcgcagtgggcggcggcgttcgctatgagcgaacgcaacctggcgcggctggtggtgcgggagaccgggcttagctttcgccgctggcggcaccagcttcagctgatcctggcgctgcagatgctggtgcgcggacagacggtacagcaaaccgcccagacgctcggttacgattcaacaaccgcctttatcaccatgttcaaaaaagggttagggcaaacgccgggccgctaccacgccagtttggctaagcctttccgataa

SEQ ID NO: 88458 - DNA, 1182 bp, Enterobacter aerogenes
atgagtcctgtttcttcctctgccaacggcaacaaactgctgctgattgtcggaattttatttatcgccgccacgctacgggtaactttcaccggtatcgccccactgctggatgcgatacgcgctgaataccaactgacgacggcgcaaaccgggctgctcacgaccctgccgctgctggccttcgggctggtctctccgctggcggccggcgtcgcccgccgattcggcatagagcgtagcctgctgctggcgatggtgattatttgcctcgggatcggattacgttcgctcccctcagcagcctggctgtatattggtacggcgctcattggctgcggaatcgcgctgggcaacgtgctgctgccagggttaattaagcgtgatttttccggccatgtcgcccgtatgaccggcgcctactccattaccatgggcgcagcggcggcggcaggttccgcgatggtggtgccgctggcgctggcgggttttggctggcgcggcgcactgctgctactgatggttttcccgctgttggcgctattactctggctgccgcaggcgcgccgccaggctaccacgccgatgaccggatcgggtgccgcgcacaatcgggggatctggcgttcagcgctggcgtggcaggtcacgctgttccttgggattaactcactggtctattacgttatcgtcggttggctgcccgcaatcctgcagagtatgggctacagcgaagcgcaggctggctctctgcatggcctgttgcagttggcaaccgccgcaccgggcctggccatcccgctggtactccatcgcctgaaagatcagcgcggcatcgccgttctggtagccttaatgtgcgtagtaagcacgctgggattatggttactgcccggtcaggcggtgatctggacattgatttttggcttcggatccggcgccaccatgatccttggcctgacgtttattggtctacgcgccagctcagcgcatcaggccgcggccctctccggcatggcgcagactattggttatctgctggctgcctgcggaccgccgctcatcggtaaaatccatgatgcttacggcgactggcatataccgttactcatcgtcgcactcatcgcagtggtcatggcgctgttcggcgcccttgccggaagggcgcgcgaaattcattaa

SEQ ID NO: 88459 - DNA, 693 bp, Enterobacter aerogenes
atgaacacccctttgcgcattgcccttgttggcgattataaccctgatgtgattgcccataaggcgattccgctggctatcgatgacgctgccgcggttctggaacaaccggtgagttatgactggatagccaccagcgagattaccagcgcagactggctcaccgattatgacgccatctgggtggttcccgccagcccgtataaaaacgccgagggcgcatttatcgccattcgctacgcccgcgaaaatagcattccgttcctcggtacctgcggcggcttccagcacgcgattatcgaatacgcccgtaatgttatgggatggcaggatgcggcgcacgccgaaaccgatagcgaagggcgaatggtcattgcgccattaagctgttcgctggtggaaaaatcagacgctatcgagctgcgcgcgaacacgctgattgcccgcgcttatggccgtgacagcattgaagagggatatcattgtaactacggcattgccgaaagctttgcccatgaactggagcagggcgcgctgcgggtgaccggttgggatgagaacggcgagatccgcgccgtggagttaactacccatccgttcttcgtcgccacgctgttccagcacgagcgcaacgcgctggaagggcgtccggcgccgctggtacaggctttcctgcacgcggcccggcaataa

SEQ ID NO: 88460 - DNA, 351 bp, Enterobacter aerogenes
atgatgattcaatgtaaacgcgtttatgaccctacagaggccaacgatggttaccgcgtgctggtcgatcgcctgtggccacgcggaataaaaaaagaggatttgcattatgacgaatggtgtaaaaccctgacgccttccagcgatttacgcaaggctcttcacggagaagcgattgacttctctcacttccgccagcagtaccgcgaagagcttgaaacccatcgcgatgaagggctacggctcgccaaattggccaatcagcaacccttaacgctgctctacgcggccaaagatacgcaacaaaaccatgcgctggtgctggcggagtggctgaaaagcttaatctaa

SEQ ID NO: 88461 - DNA, 249 bp, Enterobacter aerogenes
atgaagtggatagtaatgatgttgccgctgatgctagcgggctgcgctcagtcacaacagcctgatgcgccgccgccgccaaattcgatcggcatggcgaatccggccgccgtctattgcgaccagaagggcggtaagcaggttccggtccagacacctcagggcgtacgcaccgactgtaaacttcccagtggcgaaacgctcgatgaatgggaactgtggcggcgcgatcatccggcgaagaaataa

SEQ ID NO: 88462 - DNA, 1140 bp, Enterobacter aerogenes
atgtcgatagcagacacgctgacaacagcagccgaagcgtatgtagaaaaattaagtgaggtcgtaaaaacaccggattttagtatcacgctgggtggggttgccctgaccgaactggccgaccgcatcacctcgctatctgttacagataacaacggttttattgctgaccagctaaccctgtcagtagatgactctgacggggtaacagatttacccccacgaggtgcggagctggcggtgtccatcggctggctgggtgaggcgttgatctacaaaggtctctacaccgttgacgaggtggggcatagcgggccgcctgatgttatcgacatcaccgcgcacagcgctgattttcgcgaagagatgaacgtcaggcgggaggtgtcttggcatgatgtgacggtagagcgggtggtatcggccatagcccggcgctatgacctgaagccgatgattagcgaggctctgatcgacattgagatcgaccatgcggatcagaccgaagagagtgacatgtcgtttttaacgcgcatggcggagatgttgggcgccattgccaccgtgaaaaatggctgtctgctgtttatcttgcctgggggcggcgtcagtgcatctggtagggcgctgccatcggctgagataacccgtgccagcggagatcgtcacaggttccgcattgccgatcgcgatgcttacaccggcgtgcgggcgtactggctggatcttaatttcggcaagaaaaaaccggtcaaggtcactaagcgcaaaacaaatactgccagaaaaaaggctaaggagaaaagcagccgcccggaaggggattatatggagggcgctgaaggtaacgtgtatgttttgcgtaaaacctatcagaacgaaacggcagccaggcgcgcagctgcggcgaaatggatacagctccagaaaggtgcggcacagttttcgataaccctggcgcgcggccgcgccgatttatacccgggtatgcatctgaccgtgtcgggctttaagcctgaaatcgatactcaggattggatcattgccagagcggaacatgtaatcggtgataacggatttaccacgagaatggagcttgaggcgaaaataagcgactggattgcagaaactgaacagtag

SEQ ID NO: 88463 - DNA, 1173 bp, Enterobacter aerogenes
atgtctgaaactcgttttcacggcgtccgctctcgcgaaaataccgacctacagcaggcaatcaatgacattgattccagcgtgattggtattgttgcggttgctgatgacgccgatccggaaaccttcccgctcaatacgccggttctgctgacacgggtacgtaacgtcctcggcaaggcaggtaaaaccgggtcactttacagagccctcaaagccatttccgatcagtgcagcccgcgcgttgtgattgtccgggttaaagaggcttccggtaacggcgccagccagtctcaggccgttattggcggaacagatggcgacagctatacgggaatgtatgccctgctgacggcggaagccaaaaccggctatcgtccgcgcatcctggcggtaccggactacgacaccgaggaggtaacgtcacagctttgcgtgattgcccagaatcttcgggcttttgtttatgccggttgtaacggctgcgcgaccatggcggaggctattgcttatcgcaaaaccttcgcttaccgcgagctgatgctgatctggcctgactttatcgcttacaaccccctgacggatgataacgaaacgtttcccgccccggcttacgcctgcggcctgcgcgccgctatcgataacagccagggctggcacaaatcgctgtcgaatgttgtggtgaataacgttctcggtatttcgaaggatgttttctgggcattacaggcagaagacagcgacgcgaacgagcttaacaacaacgaaatcacgacgcttatcaagcgtgacggtttccgcttctggggtaaccgcaccacggacaccgaaacctacactttcgaggtgttcacccgtaccgcgcagatcctggcggacagtatcgcggaggcgcaatttacctctgttgacagcccgctcactccggccaacgtgaaagatgtggtaagcggcatccgctctgctctcagcaaaaaagtcactgccggccagcttatcggcgctgactgctggtttgatacgctggacaacgacaccacagatttgcgccagggaaaactgattgtgcgctatagctacagcccggtcccaccgcttgaagatctgacgctataccagacctttactgatgatttttacgaaccggcgttcgcgtcgctcgggggtgaataa

SEQ ID NO: 88464 - DNA, 516 bp, Enterobacter aerogenes
atggctattcctcacaaactgcggctttttagctgctttgttaacggcgacaactatctgggaaaagtgacctctttcactcgccccaaactgtcacgaaaggtagaggactatcagggcggtggcatgctgggtgcggtcggtgttgatctcggccttgaggctggcgcgctggattccaccattgtttttggcggcctcattaaggctctgtttctcgaatacggagcagaaattgacggcacgcgtctgcgctttgcgggtgaatatttcactgatggcgaaagccagcttgtcgaggtggagctgcgcgggcgatttactgaactcgacggtggagactcaaaacagggagaagacaccgaggaaagctacacctttaaatccacctactacaaattctccattgatgatcagcccattatcgaaatcgatctgctgaatttcatctacaaaaagaacggtcagaacatgttcccggaccgcatcacctccgcccttggcatgggcaattga

SEQ ID NO: 88465 - DNA, 318 bp, Enterobacter aerogenes
atggctaaaaaaactaaaaacctgttcacgctgatgcagccggtagttcgtaaagacagtgagatcggtcaggtggaaatcaccggcgccatcagtcaggccggatcgttgcgcggcctgaatcttatccgcgttgccaatatggatgcagactcaattgccacgctgttgacgcgagtcaccgcgcctgcgctgacacaaaaagaaatcaacgagatgcacactctggactttatcgggctggcagagcttctggtccctttcttgaatccgccggagcctggagcgtcgagcgtggcggagacggggagcgagtaa

SEQ ID NO: 88466 - DNA, 2976 bp, Enterobacter aerogenes
atgaagagtcttgatatccgcgttgctttcagcgcgatcgacaaatttacccgccccgttaatgctgcccgccagagtgcgggcggcctatccgactccctcagaaaaacacaatccaccctgaaaggactcgataagagcagtgccacttttcagcgaatgaccgcagccgtcggcaaaaccgaccgttccatctcacgtgcccgtgcccgctttgatagcttgtcagaagcgcaacgtaaaaacgggacgctgacggaaaaacagcaaatattgatgtcgcgactgggtgagcggcttgatcggttgaccgcaaaacgcgtgacggaagtggcccgccttcgtgagagtgcatcagccctgcgccagcatggcgtcatgctttccggtagtagcgccaccatcggtaacgcgatacgccgcacagaacaatacaaccaatcccttgaacgggaaaaacggcaacttgctgcggtcacgcaggctcgtaaacgttacgagggcgcacagcagatggccgggaagttgcgttctggcggtgccatagcattaggtacagcaaccgctgccgggtacggcgccggacgcttcctgtcgcctgcggttggttttgatgaggaaatgtcaaacgtccaggcgctgacgcggctcgataaaagcgattcacaactgaccgctctgcgttcccaggcaaaaaaactcggtgctgaaaccgccttcaccacacgtgacgccgccagcggccaggcctttctcgcgatggctggcttcacgccagatgctatccgtgccgcactgccaggcgtgctcaatatggcgctggcaggcagcatggaactgggcgaaacggcagacatcggctcaaacattctttctcagttttccctcgatgccggagaaatggaccgcgtcagcgatgtgctgacaggtacatttacccgtaccaataccacgcttagcagcctcggcgagacaatgaaagttgtcgggccagtagcagcgggacttgggattagcctggaagaagccgcagccatgaccggcacgctggcgcgcgtgggtattcgcggtagcgaggccggtacggcaatgcgtcgctcgctctcccgactggcctcccctactacggcagcaaagagagcgcttaaagagctgggtgtagaaaccgccgacgcaagcgggaagatgcgtcgcgcgttcgatattcttctcgatctacaaaaacgcgtttcccgcttcggcgaggtggatcaggtttcattttttaaagatatcgccggagaagagggttttacgagcctccagtctttggtcaacggcgcaggtgatggctacctccagtcactctatgaacaaattgcagaagcacataaaaatcaggaggcgttcgccgtcgctaacaagaagaaagacaaccttggcggcgatttgaaggagctggacagcgcgtgggaggcgttccgcatttctgtggctgagacagtagacggcccattgcgcagactgacacaggggcttagccgggttattggcactgttcaaagctgggtagacgaaaaccccagactttcacaaacgttgttactcgccggcgggactgcactggcactgaccgcagtaattggcggtatgtcattagctgctggtctgctgataggtccgcttgcaaagctcagactggggtttgcgcttctgtccggcgggagcggaatcggaggtacggtatcagcgttccgcatgttgagtgctgtgggcagcagctcactggcaaaaattagcggatggggtgctttactcagcgacctggccggacgcatcggcgtattaaccagaatgatggtacccctgcgcggtgcgttacttggcgcctttgcctctccggggacgactatcagtgccctgtcaaaaagcattggcgggctggcactgcggctaaccgggatcccggctctcttcggcattgtaaaaggcggtattgcggcactgggcggcggattatcaatgctcttgagcccaatcggtttagtgggtgctgcgtttgtagctgcgggagtagtgctctggaaatactggggaccaatcaaagccttctttagcggtttttttacaggcgtcatccaggggttagcgccagttcataacgcattttcccggctggcgcccgttttcggggtcattggggatggcgtcaaaaacgtctggaactggtttaaaaaagtattaacgcccgttgaggagagtcgtgaagcgctaaacaagtgcgccagcgccgggcaaatctttggcgaggtcctggggaccgcacttagcgttctgctttggccccttcagaagttaatggaaggcgtcggctggttactggagaagctcgagctcatccccgatggcattgaacgagccaggctggaagcggccagactcagggctattccggttatgtgggaatgggatgaaaaatccgggcgcatggttaaaagggagtggcaatggtcatctgaaaagcctgcaagcaaaggcagcaccccgccgcccaatgtgctggggggaaactctggaacagagcggcggctgggccaaatcgcagataacactaaaggccttttagatgaggaaaagcgaaaacgtatcgggccgggtgacattgtatttaaaaacctccctcaagcctttgcggtgcgtggtgaatggcaggaatcgaagcttatccgccagtctgtcagcgctcgcccggttattgccgctggcgaaccattgataaaacagacgcaggcatggcaaccggtacgccgaaatcaaagcacccacacggcggctacagctttaggtggtagttttcccggtgatattcatgtccatctgcacggcattcagagcagcaatccgcgagaactggcgcgacttgttggcgaggctgtccgcgcggaaattgataaaaagcaacgcgctgcccggggttcgttccgggataacgattaa

SEQ ID NO: 88467 - DNA, 474 bp, Enterobacter aerogenes
atgatgatggtattcgggctctttgtatttgaactcaggacactgccctatcagcaattgcagttgtcccgtaactggcggcacgttaagaatgaccgtgtgggccggagcgcaaaatggcagtacgttggcgccggtgagaaccagctgacgctgggtgggttgctttatcctgaaatcactggtggcaacctgtctttgggtgccgtctcgacaatggcctacaccgggcttacttggccgctgatcgatggcgtcgggtccatttacgggatgtatgtcatcacgggcttgcaggaaacgcatcaggagtttgatcgctacggcaaagcgaaaaagatagagttcacactctcgttgcagcgggttgatgaggatatcagggagaggctgaaaagtacctcaattactgaactgatgccacccctgaaggaaaggacagaaactgtgttaaatacaatctatgatatgtaa

SEQ ID NO: 88468 - DNA, 2460 bp, Enterobacter aerogenes
atggatgtttacgaattaatagatattgaagtaaaaaaaagcattttacactccagtgactatgatacaactgaactactaagacttttagatattgtctatgattatatttatgagtgtcgagatgctgatctaattagaaagtccataaataaaatatcaaatatttttcattctgtgggcgataattctgttgtggttttgacgtttgtattaatgaataagttgagtgatcttaatggaattaaaatactgaaatattcagagagtcatgtagaacctgatttggataagcttaaagagtttattaaaaatgaaataattgaaaataatggtgtgtttgattttttcaatcacaagaaaggttcaacaaccctcggtaagaataagttgtacgcttctgttttgtctatgttaagacataatctacaaagtaccattaaagatgatgtcgatataaattgttccttggtgttattaataaatatgtggatattatcaccgaaagtagataggctttatgaattctacataattttttgctcttttttgcataaactacaccttagtcagaaaacacaaatggtaagggatttagcagaaactgcacttgtattaggttttcgagacaagaggttgaattattcattttatgtaagaatggctgtttattctcggcaatacaatgttattgactcgcttttgtcagcacagcttatgttgcacggatataattatattcaccaggaaaatgaaatttttctttcgaagtctcttctggagttggctataacgttacgtaacttccggctttaccctttcgttgaacgagttaaacaagcgcatgatcaattaaatattgaagatagatatgataaacatcagtttgatatggcaatatttaatatgaaattattaatggaggatgaagggctatttgaattggttgatgagtatctaaatgataatgatgttttggaattcgatgttgcttctggaataccatggatagttttattattgaacttaaagagaagtgatatttcacggttcgaaaattatcagaatttaattcagtcactgagtagactcgaatcaaatgaggaaatttataataaccctgtggtagaggattataggaaggccatgtccagtacagtctctgaaaacaaagaagcagtacagaaaggcatttcaaacatacttcaatctcgaagctttactgacgtaaattatgagcttactatgctacagccagctgtcataaatctactcaaaaattcgatcgcatcagatgatatagaaggggttttaatcgcgcattctttgtcctctggtgcctcagggttcgatattagcactgaagaagcaatgacggagtttagccctctaaaaaaagtgttcaatatatcttcgccaacaatatttgatggttatttgagccatctatcaaaactgatagagcaatcagatatgtcagtttttatatgggtcggatgctgtgatgatttttgttatagcgtcagtctaaaagaaagacgattttctctatatataaacgatacttttaataaaaatgatttaagaaattgggaggctacgcaaacagaattacttgcttttaatgatcagcctaatctagagtccatattggattctaacatcaatcactgggagttagagtctcgtgtaataattgaaagtctgccagctttgactgatatacatgaggctagaaatatagttttgtttcgtgatgttaatatgtcgcatttgccgtctaaccttataaaaacaaccgcgggaatattactcgctgatttggcccctttgcatactccctctacagttgagtcgtatattaaaagcgagtcatttattgttgggtacaaaaatatcaagctttgggctcctgtcgaagagggtgatttcgcaatcaatattgcttatgataaaattcaatctttatttaatgatgcatcattgttaaaaataacttcgcttgattctagaattgaacttaatacagatatcaatatatttatttcgcatggaggaaaggatgggttatatggatttaaaagtatctcccctgccgaaggtaaatattttataaatgaaaatgatgtttttggacgaggcaaagtagctattttatttatatgtcattcaggaagttctaaatcatctatgtttgctacgaaaccagatgggctggttagtaaaattttagagttaggttatgaatgtgtattagctccagcttggagttataatgttattcttactggtatctggacaagaagcttcgtcgatgctttaaatgatggtaagaatctgtctgaatcaacatattatgctaataagtccgttaagtctgagtaccctggcgtgggagcctatgctgcgatgcacctatttggtaatgatggtttaattttagttaacgatcggagctga

SEQ ID NO: 88469 - DNA, 1098 bp, Enterobacter aerogenes
atggccacgggactgacactaaccacggcgggcgccgccgaaatcgaggccgcgtatcaggcgggagaggttgtggatattaccgctgtactgatcggcgatggtggcggcgtgacattgccgaccgatcccgatgacctggcggcggtgacggcgctttttggtcagtttggccgtgaaacctttgactctgattcaagctatgaggggtttatcagcggtcagatcgttatcaactgccaggattatccgggtaaaacgctcagagaagcggggctggttagcgctaaggggacgctcatcgcttacggcacatacccggcgacatacctcccggcgcaatcggattccattatcaaagagatcattctgacgctggtgttgacgctgacgcacagctcaaacgtgcagcttgttatcgatccggcgcttgccacactcacgcaggaaacgggcgataaacgttatctgcagcgagcacaaaatcttgctgatttaaacgatcccaaagaggctagggataatcttgaactgggtaactcagccacgcgggacgtgggcaccgagatgggaacggtagctgcgggggatgactcgcggatcaccggtgcacttcagaaagaaaataatctttccgatctgagcgatacatccgaagccctaaaggcgctgggactcaacagcgacggagcggcctacagggcaattgttgacgccattttttacgttggaatcgttgtcgcaggcgagcaaagcccagcggagcggtttccctggcagacttggacggatttaagtgaaacctttgctgatagggttgtcagaattggttctcagtatggcgtgactggcggcagtaataaggtaaaactcgaagctgataatctgcctccccactggcaccgttcaggtgatagatctcccggcgccacctgggatccaacgacaactcacggaacagataatcagaaaagcgggccgctggcacttactgatggaacttacattgattcgacaggccttaaagagacagctaatttagcaatagatgtaactaacaaatatttaaccctttgtatgtggatacgtacagcgtaa

SEQ ID NO: 88470 - DNA, 213 bp, Enterobacter aerogenes
atgaaaacattcaatcaattaaaattcctgatcgacttttgccagaccgatgcgtttttccttgagcacctgaaccggcttcagatcgccggcgtgatttatcttgatgaaggcgatatcgatgctgaccgcaagaccgtaagtgatgatttttatgatcgccttgcgagtgtgtacggcattgagccagcaacaaaaaatgaggaggcataa

SEQ ID NO: 88471 - DNA, 3027 bp, Enterobacter aerogenes
atgaccgctaattatcccgccagcattctgccacccaacgccaccgccgtggaacgggccatagacagggccagcgccgccgcactggagaagttgccggtatatctgatccgttgggttaaagatccggacagttgcccgctggcgctgctgccgtggctggcgtgggaatatcaggttgatacctggaatattaactggtcagaacaaaagaaacgcgatgcgatcaaacgcgcccactacatccaccgccatcgtggtacggtcgccgccgtccgtcatgccctggtggacagtcctttcgggacggatattgttgaatggttcaatcagaacccgaaaggggatccgtatacctttcgcctgaacgtgtatcagaacgatttgccggtgacggaatacgaccagcaggatctaaaactggcggtgctgcgcgccaggaatctgcgcagctggttttccgttcatgtatttggccgacttcagggaacctcgtatgcggccggttacatgtacgccacggagaaaatcacgccgcgctttgtcccgttgcaggtggttttatcccgctacgagctgaatctggcccccggggacgcggaaacggtcacggtgacaattctccccgaatacgcggaagataaaacctttacgttaactacatcggatcaaacaatcgcgaccgcccggatagtaaacggcgatattctggttacgggcatgaagcggggtacctgttcggtcaccgttacgacgactaatggcgtcagtggggtgatcagcataaaagtggtcgcggtaatgaagttcattacccgcatcgacagtgcaaccaggccaatattctttgctcatatggacgagggtttcacggttgactatggcgacggcattgacagccgggactaccgtttcgatcccgccagtgaagcttcaggttgggttattcctacacgtgaattagtacagggaaaggaatacaccatcacggttaagaatacggaaaccgcctgtctgcgcagccgtttatctaactattcttcgaaactgaaccctgttgtggaattgattagtgttacaggggaaagaggtcatctttcagggttcgctttggataccaccggattaatggctattcgtcccggagcatttgacgatttgccaaacgtgaataactgcaaaaatatttttaccaactgctcgtcgcttacaggtattccggcatcgttgttttctcgcatgaagatagaggatttttcagacgcattcagagggtgtacatcgcttactgaggttccatcggggctatttgcaaaccagcccgatgcgatcgacttctcatcggtatttgcaggctgcaccggcctgatcagtatcggcaataatctattccacagctgtgtatctgcggtgaatttcagttacgcgtttgatggttgctcaatgcttgcaaatatcggcacgggaatatttacaggatgcggttcagcagggacattctcttatagcttcagggcgtgtaaaaatcttcttgtcttgcctgctgatatgtttgcggatgttccgggcggcgcattcaccggcgtattccagaattgcacggcactgacggcaattcccgccaacctgtttaaaacatgttctgaagcgaatcattttggcggtgcattcactggctgttcgcagcttctttctgttcctgccggtctgtttgctggtctgtcgaaagtgacctatttcggcacggtcttttctggttgcagttcgctgaaaacggtcggcgcgggtttatttgccgggtgcagccaggcgcggacattcgcctctgcattttacagctgccgctctcttgaaactgtagcgaaagatattttcagcggctgcgtagaggtgacgacctttgccagtacgttttatgggtgcagcagcctgacggcgctcccgtcttttactgactgcgcgaaagtcaccactttctcatacgcttttgctaactgtggatcgctcacgaaaattgatgatgatgcttttgctgagaaagcgctggtaacgacattcacatacgcttttgtaaactgtacttcgctggtttctgtgggggacggcgcatttcggggatgtagcgcgttaaccagcctgggctatacgttttcaggttgccgctctctggtttctctcgcgggagatatgtttgccggttgcgccaaagtgacagccgtcgatttcttgttcgacaagtgctccgcgttggctggactgccaaaagaactgtttagtgacatggtatctctgaaaggtatgggatcgacattccgtgattgcagcgcactgatcgcgctaccgtccggcctgcttgatggctgcatcaatctcacttcgttaacgctgacattctcgggttgtacctcactggcggtattgcccggcgatttgctgaaaaacaacattctgctgtccggtgccggatcgacgttctacggttgcacctcactggtaaatattccgccgacgctgttcgcgtcctgctcgcttattacctcgtttggcgccacgttccagaataccggcgtggaggaaataccggaaaacctgttcagcggcaacccgttggtgacctcttacggccagactttcaggggctgtaaaaacctgcgctcagtgccagccggtctttttgccgccagcataagtgccacggtattcacgaatgtcttttcggaatgcagtgcgctggaagtcgtcggggcgggattactcaacaccacggcggtaacgacggtgggttatctgtttgacggctgcgcgtcattacgtagcgacgttaacacgatatttaatcttgcgagttacccggagattgtcaccacaacggcaatattcaggagctgcgcattactggccggtaaaggcctggtatttatggacaaggtgccgaacgtcaccgcgcactattacgcgttttatgcctgcgtgggcctggacgattacgacgatttacccggcaattggataacgaataaatcatga

SEQ ID NO: 88472 - DNA, 924 bp, Enterobacter aerogenes
gtgcaaacgtccgtcgatttatctcagatcccacagcctgatatcgtcgaggtgcccgattttgaaacggtgctggctgatatccgggcgcttatcgtggcggccatgcctgtggaacttcaggcttctgtgtctgctgcactgctgctggaatctgaaccgatggcggcactggctcaggcattcacctatcgcgagatccatctgctgcaacgtatcaatgaagccgtgcgcgcagtgctgctttccagcgccctgggggcggatctcgatcaggtcgccgggaattttgacactgaacgcctgctgattaccgaagccaccgacgaggctgacgcagtatatgaaagcgacgaagagctgcgcggccgcacgctgctctcatgggctcgcctgagcacggcgggcgccagaaatgcctatcactattttgcgcgaggtgcggatgcggatgtgctcgatgtgcgcgcctatggccctgaaacccataaccaggaaggacgcgtttttctctacgtgctgtcacgtaccggagatgggactgccccgcaggcgctgcttgataaagtcctgtcagcggtaaacccggaagacgtgcgtccgattacggattatgtggctgattatgtccgctccgctgtgattgtgaattatcaggtggttgctgacatttacgtcccttacggcgtggacaccgccacggtgctggaaaaagccaccgcagcactgaacgaatacaccgcctctgtgcatcttatcaacgccaccgctgcacggtcgggcatagacggggcgctgcatcaggacggcgttgttaccgtcgatttgcattcaccggccgccgacgtcgttgcgacgatgggcgaagcgcctcattgcacctctgtgaaaatcaatcttgtggtgatggactatgaccgctaa

SEQ ID NO: 88473 - DNA, 351 bp, Enterobacter aerogenes
atgacagccagttacacggggatgaacccggaaggtaccggttcgctgaccgatcacgatcagctctggcagtctgtgacaaaaatcctcaccacgccaacaggctcccgtgtgatgcgccgggactttggtagcgtggtacctgatttactcgatgcgccacaaaatgccgtcacccgcatgcagctgatgggcgccaccgctattgcgctggcgcagtgggagccgcggatcagtctgaccaccgtcaatgtggtgttttcagaaacaggcgcggtgactgctgaactgaccggcactatcacggaaaccatgacagaaaccagtaacaccatcaggctaaggagctag

SEQ ID NO: 88474 - DNA, 588 bp, Enterobacter aerogenes
atgaatgccgagctgatgcgcctgctggaaaatattctgcgccagggtgtggtggagcaaatcagcgccgacaagaaagcggtgcgcgttcgctccggcaggttgctgaccacctggatccgctggaacgtcacccgcgccggggcgttcagcatctggctgccgccctcgataggggagcaggtctggatcggttgtccgggtggcaaccctgaaaacgcgtttgtgattggctctgcatacagcgcagataacccgccaacgggcagcagcctgctggaaatcaccatcaccgcaccggatggcgcgcgtctgcattacgacgccgccgccgatgccggagcgctggccgtgaccggcattaaaaccgcgcatatccaggccgagacccgcgtcacgctggatacgccggaggtggaatgcacaaaccacctcaaaacacgcactttcgaactgacccacggcggcacgatggccggtgatgtgttccattccggcggcgtgttgcagtcaaacgggatcaccgtacatgaacataaacacggtggcgtgcagtctggtgggagtactacaggaggcccgcaatga

SEQ ID NO: 88475 - DNA, 636 bp, Enterobacter aerogenes
gtgagcgatcggatgttcagcgagctggatcaggtctttcaggacatcctcgacggcgtcagcccggcggggcgcacccgtaccgcgcgcaaaattggcctggcagtgcgccgcagtcagcagcgccgtatcgcgtcacagaaaaacccggacggcagcggctatgccgtgcgccgccgcaaagtttaccgcacccagcaggggatcaagttcttctggaataacgaggtgcgggcgctgaaaaactggcgcggcgggcgcggtaaatatggccggacgatcacagggtttgatgagaagcgccgggatatccgcacattttaccgggccgatatcgagcggtatctggaaatcaaaacgcaatcagcgacgcagacggagacaaaaaaagcgccgatgtttacccgcctgcgcaccctgcgttttatgaaggtcagaccggacgcgggcggcgttaccataggatttgatggcatcgccgctcgcattgctcgtattcaccagtacggcctcaaagacgaggttggtgcgggcgcttacgcgcagtaccctgcgcgcgaactgctgggcatgactccggcagacctgatcgctacggaaaacgctgttatcagcagtctgggcggtgcgtcatga

SEQ ID NO: 88476 - DNA, 468 bp, Enterobacter aerogenes
atgctgaagataaacacactccgcgccgccatagagaaagcaaatacctggtgccgggcgaacccggaagcctggacggtgtttgttgaagagggtggcattgaaaccaccggtgaaacgccgtctttcatgtatcgatattctctggtgctgttcgtcatgaactacgccgggagcattgacgacttcacgctgccgctgatggcctggctctggtttaatcagcccgatctgctgctgaacccggataaaaaccagaagattaaattcaccacgcttattaacaacgatgacaccgccgatctgatgtttgagctgccggtgagtcagcgggttctggttcagttggatgaaaacggcgtgccgtatgccgagcatttgccggagccgcgcccgcgcgtgctggcaccccacgccgcaggctgggggctggtatttgaaggcatgcttcaggagggcggagcgtga

SEQ ID NO: 88477 - DNA, 321 bp, Enterobacter aerogenes
atgcagaaggggagcgacgacgtgaagccatgcaggccgcgttcaatggtgacacgtgcgctgttactcctgtgcctgacgctatcagccgcagcctgcaaaaacgcaccgcccgcgccgatcattcagctggtccatgaacccgtcccggaaagcctgaccgaagagacgccacgcccggcgctggataagccagtgacctggggcgcggtggcgatattcagcgacaggctgatggatgcgcttgatgcctgcaatgctgacaaagcggcgatccgccagtggaacagcctgcgccagaacacccgaaaggagccataa

SEQ ID NO: 88478 - DNA, 546 bp, Enterobacter aerogenes
atgaagaacatcatcaaaaaatgttcgattgcggtgattgtggccctgggcatttcactggcacccggaagcgtcagaacgacgaaagaagggcagcagaaaattgccggttgggaagactgccgcagcacgccttattactgcacggcgggtgctctgaccattggtatcggctccacgggcggcgttgaaaaccgcgaatacagcaaccaggaaatagcgcggcgctggatcaacgatctgcaacgggcagaaaactgcatcaataacaatttccacggcgccgacatgccacagtacacctttgaggccatgacggatgccgccctgaatctgggctgcaccgggctgatgtggttcaccgataaaaacggacgcaagcagaggaccacgatctggaagcatgcccaggccagacaatggccgcagatgtgcaacaggctgactgatttcgtcaatgtgggcggtaagcgctccgccggcctggttaaccggcgcaatgattttaaagcctggtgcctgctgggcctgagtacgacgtcatga

SEQ ID NO: 88479 - DNA, 279 bp, Enterobacter aerogenes
atgactctggatcgtattaacgaatattttgcgtttgcaacatccgccctggtgaccggcgtgggcgtcatgaccgtcagtgaaaagctagcgctggctggccttcttctggggattgtttccgccgtccggctggcgatccaccgccgccgcattgagcaggccagccagcgccgtaacgacttgatagagcagattctccgccaggcggaaacccgcaacctgtcggaccgcgaacggcagttgctggagcaactgcacggggataacccgacatga

SEQ ID NO: 88480 - DNA, 201 bp, Enterobacter aerogenes
atgaaagtcagggcgttgcaaaacgacacggttgatcagctctgctggcgtcattacggcaaaaccgcaggtgtcacggagaaggtgctcgaagccaatccgggactgagcaaccagatttttttgaatgccgggcaggagatcgaaatgcccgtgataaccagcgaggtggaacgggtaaccgtccagttatgggaatga

SEQ ID NO: 88481 - DNA, 516 bp, Enterobacter aerogenes
atgagttttatcgcgcagcgccccgtcagacctgctgagagtgatgtgacggacgtggacgacggcggcgcacagattgccgtcggtactttctggcctacggtaaaactccacgatctgcgcctcgcggcccgcatcgccggtgatattacgacttcccgattgatgcatatggctacggaggccgcgctgcacgtcgcggatcaactgaaggactggcggaagcaaagggaggcggaaggcgcggaatcgctggcttctgtactgctgacttccgccggtgaacccgtcgagctgattaacggcgaaagcgcaaaagtttaccgcttccggcgtgcggtctactccttcacgcgcgccagcgtactggaaggttacagggacgtcggcaccacgccaaagggcgacaaggacgcggaggctctcgacaggcaaatagacgacctctggcgggacgggcgctggagtatttcagatatccgggaagaaccccgtatttactcggagcttttctga

SEQ ID NO: 88482 - DNA, 867 bp, Enterobacter aerogenes
atgctgacaccggcacaaagacactttcagaaggtcatggcagagaggcggggcatcagtgatgagcgtgacgcggagacgcgcaccgcgcatgagcagatcctctttcgcctgcatatgcataaatcttcgctaagccagatccagtcccgccaggcgaaggccgctgtaaaggccagcatccttcctgagtttcagggatggattgacggcacgatcgagggcgacagcgggcgcgcggatcctgtcatcaccacgctgatggtgtgggcggtggactgctccgactatgcgctggcgctgcgtatcgggcgctatgtcgttaagcatggcttgagcatgccggatgacaactatcgccgcccgacacccacggtactggccgaggaaatctgcaatcccattctgaacctcgccaccacggacgccggagccgatttgtcaggctatatcgccatgctggacgagctggccgaaattgtggctgacagtgatatgccggatgaggtccgcgcgaagctgtgcaaggtgagggcgttttgccgtcgcgacacgaaagacgcggaaaccaaaggcgaagcgctgaaactcttccgggaagccatgagcctgaacccgggtgcaggtgtgaaacgggagatcgcctctctggtcagcgcgctgaagaaggcgccgcagaccagcacggcgagtggtgatgcggaaaatgagccttcatccagcaatacagcggcaaccgaaacacccgcagcagaaaaaacaacacgaacgcgcaagcagacgaaaacggcggccggcacccaaaaagctacccgcaaaacggcggcaaaaaagacaacgaaaaccgccgtcaaagtaaacgcctga

SEQ ID NO: 88483 - DNA, 1035 bp, Enterobacter aerogenes
atggaaaaccagacccgcgaactatttgataagtacattgtgcgccaggcacatctgaacggtgtctcaccctcagccgttgccaatcgtttcagcgtcgatccgactatccagcaaaaactggaacaggccgccatggagtcggatgacttcatgaagctggttaaccactttggggttaaagagcaggaagggcagaaagtaaaaattggcagtaagggaccgatggcgagcaccaataacagctcggacggcaccaaccgccgtaaccctgcaccgaaccataacaaagagccgcagaactaccactgccgcaaaaccaactatgactatgcgctttcgtatgcggagctggacgcgtgggccggtcaccctgaatttcagtcattaatcagtaatgcgatggctcgtcagctggggctggatcgccagatgattggctttaatggcacgcattactctgaaaactccgaccgcacgacctacccgttattgcaggattgcggcgttggctggctgcaaaaaatccgcaatgaagcgccgcagcgcattatgccgggtatcacgctgacctcgcgtgatgagaataacgcggtaattgcgtcaggcacctacggcaatattgatgccgccgtgcttgatgcgcgtcacagccttatggatccctggttccgccgcgctcccggcctggtgactgtgctctcgtccgatctgctgctgaaagtgaacttgccgaaagtgaacgcgctcagccagaccaatccgaataccgaactgctggccgcgcagctcattgtcagccaggaaaagatcggcggcctgccgacggtctttgtcccgggtattcctgaagacgtcgtgctcatcaccaacctgaaaaacctctctgtgtattaccagaaaggctccctgcgtcgctctatccgggaagagccgcactacaaccgcgtggcgacttaccagtccagcaatgatgactatgtcattgaagagtacggcatgattgccatgatcgacggcgtgacattcgcctga

SEQ ID NO: 88484 - DNA, 840 bp, Enterobacter aerogenes
atggccagcacgactaaacccgcccgcaaaaagtttcgcgttgcggtttccggcgccaccgttgacgggcgcgagatccagccgcagcacctccgcgatgcggcggcgagctacaacccggacgtttacggcgctcgcgtaaacgtggagcactatctctccatgcttcctgacagcaattttggcgccatgggggatgttgtggcattaagcgcggaggatatcaccgaagggccgctggccggtcgtacggcgctctatgccgagatcgacgcgtcggcacgaatgaagcagctcaccgatgaaggaaaaaaaatctattccagtattgagctgcatccgcagtttgcccttaacggcaaggcgtatgtggtcggcctggcgatgaccgacactccggcaagtctggggactgagcgccttaaatttgccgcgcagcagcgcgcgcaggtgatggccttcaataaccagcagatcgaggcgccgctgttctctgatgcgcttgaagctgaagtgatcgaactggcagctcatcgcagcgaggagggcgtcaactggttcaaccgcgtgatgggcatccttggcaaaggccagaaaaccgacgatcagcgtttcagtcagttgcatcaggttgttgaagccgttgctcaatctcaggcagaccagattgaccggttcagtgccctggaacaggaccgccaacaggataaagccaccattcagcaactgaccagcgaacttaacgagctgcgcggtcagcttcagctccagcccgcagaaaattacagcgcacgaccggcggcaaccggcaacagcagcgcgcagcttgcagacttctaa

SEQ ID NO: 88485 - DNA, 1728 bp, Enterobacter aerogenes
atgattcaggatgcgtttattcgattgagggcaaagcagctctactggcagggttacccgcccgccgaaatttcgcgactcatgggcatcaactcaaacacggtttattcgtggaaaaagcgcgacgcatgggatgacacaacgcccatcaaacgggtgacgcaatccattgatacccgtctctgccagctgagcgcgaaagacaataaaaccagtggcgatttcaaagagattgatctgttaacccggcagttgaaaaagctggataccgggcaggcctccactaccacaggcgctaaaaaaaccagtcgacgcaagaagaaaaatcacttctccgaggagcagatcgaggcgttgcgcttaaaaattctcgactctctcgcatggcaccagcgcggctggtacgaacagcgcgatcagcgtaaccggatgatcctcaaatcgcggcagattggcgctacctggtactttgcacgcgaggcgttgctgggcgcactgagaacggacgttaagcacgactaccagcgcaaccaaatctttctgtcagcatcacgaaagcaagcgctacagttccgcaacttcatccgcaaagcggctgaagaggtggacgtcgaacttaaaggcggcgagcaaatcacgctgtcaaacggcgcggagctgcattttctcgggacatcagctgcgaccgcgcagtcctacacggggcacctgcgatttgatgagtttttctggaccggtaactttatcaatctgcgtaaggttgccggcgctatggcaacgctcaaaggcttaacgcgtacgtacttctccacgccatccagcgaaagccatgaagcctatcagttctggaccggcgatcggtggaatgcgaaacggcctaaagcgcagcgcgttgatttcgatgtgtcctggaagaaaacgcgtagcggcgtgctttacccggacaaaacgtggcggcagatcgtcactattcaggacgttatcaacaatggctgggactacaccgacattgatgaaatccgggacgaaaacagccctgatgaatttgaaaacctgtacatgtgcgagttcgtcaaagacggcgaaagcgcgttcaatcttagccagttactggggtgcggcgctgacgggtatgacgattggcccgactggaaaccgttcgccagtcgccctatggggcaacgtgaggtgtggctgggctacgacgccaacggcggcagcggcaatggtgatgccggtgctctatccgtgacggtccctccccttgtggccggcggccggtttcgcacggttgaattgaagcaactgcgaggacttgagtttgagcagcaggcggcggtcatcaaagaggcagccgagcgctacaacgtcactcacatcgccattgacgggcaaggcgtcggggaggcggtctggcagattgttaaaaactggttcccggcggctatttgctaccagatgagcctctcttccaagcgcgccctagtcctcaaaatgttgcaggttatacgcgccggccgctgggaatatgaccgcagcgagcagggtctggtcagagccttcaacgctgttcgcaaagttgttacgcccggcggtttcatcacttacgaaactgaccgatcgcgcggcgtaagccatggcgatatggcgtgggcaaccatgctttcgattatcaatgaaccgttgggccaggaaagtggcggcggtggtttcgcaatgggatggtaa

SEQ ID NO: 88486 - DNA, 1053 bp, Enterobacter aerogenes
gtgaaaaagaaatacggtaaaaagccgataaccagcaccgccggttctgacattgcggagtcactgaaggccgatcctgagttaactgcattcagctttgacgggccttatccggtacgtgatatggccgacctgctggacaatctctattgcctggataacgggcgatactatgaaacaccggtagatttttatgggctggctaaagctccgcgccagagcgcctggcatgagtctgccctgtacttcaaacgtaatgtgctcaccggctgttttatcccgcacaagctgctcaaccgtcagaccttctcggccttcgcgctggactggttcacgtttggcaatgcctaccttgaactcccgcgcaatcgcctgggcgggccacttcccttccgtcattcactggcgaaatacacccggcgtgggagcacagatctcgatcaatactggtttatccggcgctggaaagaagagcacacgttcaaatcaggaacggtttgtcacgttctgaaccctgatatcaatcaggaggtctacggcatgccggaatatatggcagcgctgctggccgccagcctggcccactccgctgacatgttccgtaagctgtactacgacaacggatcgcatgctggatgcattgtctatattggcgccggacaggttgacgataaaagcatgaaggcagtcaaagagacgttgaccggcgcgcgtggtaaaggcgcatttaaaaacctgctgctgcatgcgccaggcggcggcaaagacggcgtgcaaatcctccccttccagcagatcactgcgaaagatgagtttatcaacattaagaacgccacacgtgacgacatactcgcagcgcaccgtatcccgccgcagctgatgggcgccatgccagagggaaacggctcatttggggatatcgagaaagccgcacgggtctacgctatcaacgagctgacgcccgtaatggaggcgctgaaggtggtcaatgagtggatcggagaagaagtgatccgctttaacccttacgcgttgcttaccgctgagaaataa

SEQ ID NO: 88487 - DNA, 537 bp, Enterobacter aerogenes
atgtatagttatacttttaataaaaaactcatgcgaaaaaaagagtgtttgatgtttataaaagacatcattctccccattttcttggggttatttggaatattagggacattagggggtgtacttatcacaaaccatcaaaattcaattaacgaaaaagagtctcgcctttatgcataccagactaaaataatcgaacagagaattagccttgtcgacagagctgctaaaatatttggtaagtcaccaggattgcaagatgtctggaaagaatacattgacacagtgaaaaatgataaagttgatcagttaattgttgacaaattaactgaggcccaaggagagtttcaaagcattatatttctttccagtgtttattttggccctaaaacacagcaggcacttaaggatttagatgcatatccagggccatggtggacaaaacctaaagagaaacaagataatcttgtttcctctatggctttagagataaactatgaaataaaatcacaatatgattcgagagtgataaattaa

SEQ ID NO: 88488 - DNA, 1599 bp, Enterobacter aerogenes
atgggctcatttgtttacttacttaaaggatcaagccaattgaacactttcatattcagaaataatgatgaaataggaaaattagaagctgaatcagatacttacttggattcttgttttttagagacaagtatattcaagggtatcatgaattttgatccatctgagaaaaaccctgatttcacaaaaagaattatagttggaaggactggcagtggaaagtcagcacttttaaaaaagattttagatgaaggaagcataaaagtttatgataaaatagaagcggaaaatacaatctttgaacatgttaaaaataatgtttttatttcctctttaaatgatagtgggatcgacttaagggtgttttataagtctttatggctacacgcgttactaataaaagtcattccagcgttacatcgatcaacttatcaaagttttttcaataaaattcacgagttaattggtggaaaaaagaaatcatataacccggaattggcaaacgaatacattgaacagtttaaagatgtattttttaatgacaaagctttagttgaaataagcaataaaatgcagagtgagttatcttccaagataggtataaagggtatagatcttggaggtaaacttggtcgcgaagatacacaaagagtacagtctgaaacatcaagttatgtaagcagagagttaattcggaaacaaaaggaattgataaaaatattaaaagaagagttttcggaggtcgggcaatttaggattattataagcattgatgaccttgaccgctcttggttaagctctagcgatataaggtatgatttcataaacgcattgttagaagcatttagagaattgctagatgttaaatcagtcaagattttaatttcgattagaactgatatactcatgggaatttataacaaaacattaaggcaagatgaaaaagatcagtcacttatctattcagtgtcttggagcaaagatgaaattcggcaaataattgatatgcgcattaatcatttaattaaaaataaatacaaaagttctcgcgctattacgatgagggatatttttgattttgacattaataatgttcatgctgatgattatattttagatagaacaatgttaagacctagagatgcaataagtttcgtaaattattgcctaaaggagtgcgatggaactgtaagcattaatcaagatgtggttttaatggctgaagagaagtttttttcttctagaaaaagagctttagtttcagaatgggtaactatatacaaaaatattgcggactatatagattctttgtctttgttaaaggaacatgaattttcattaaagtctattgcggaagataataaaaatgaaattttaacgtatattcttgacagagcttcatcagaggatgaaaatgccttacataccaagatagtaatgaattttgatgagctaatgaaggtatggtttatagttggtgttataggaataaaaagaactgaaaccctagttgtatactcttcatatgataaacctgatcttgatataactgatattaatcgcaccttcattatccatcctttatttaatagaaggtga

SEQ ID NO: 88489 - DNA, 834 bp, Enterobacter aerogenes
atgccaattccagataacattgctgccaaaatacttgttaaatcagctagacattgctgtatttgcagaagattttcaccattgcaaattcaaatacatcatatcgtcgcgcagagtgaaggtggtttagatgatgaagacaatctaataccaatttgtatttcatgtcattcatctgttcattcaaagatgcatatgacgaaaggatttagcagggcagaattaaaaggacatcgcgatgctgtgtacgatatggttgaaaaaggaaagcttcctgcgcaacctcaagtaaccggcgatgaaatgcatgcattatcaacagttattatcgaaacattgaaagcagaggggaaaagtcaagacctttctgagcgtgcgacagagattctattagctgctgcatgcgaggaaagcccagcattaattaataggacagatgatggaattattatcgagtccaacggacagacctttcatttttattccaaggaagtaaaacagtatcctgatgagctatttgaacttgcacatgctggtttcatgagccttgatggggcgacatcaagcataacgaacgccggtattgctcatgttcaaaagattgtaaaaacaacagccaaatatacagagaaaaaagtcagatgcatgaaatgcagtctacactttactatcttttcttggtatccagaactgcatcgagctaacactctctattgtccagaatgtggacaatctgagggattgtttattgtttgggctcagcagaaatttggttttatttttcagaaggtgccgggtaattcatcgctatgggacatggggaaccttccctag

SEQ ID NO: 88490 - DNA, 519 bp, Enterobacter aerogenes
atgtatgacgattatgataagcgagaggcgaatattgccagcttcctgtcgaacaaaataaaacgatgcattaaatgtggtcgtgagctggactacaaagagaagttttattacacagatcgaatttgcaatctctgccgcgggcttcaaccgttcgatagtgaggacgttccagaggtagaatctgaggttaagtcaccttttccaattattaatctcgatttatcaaagtatgaggacaaagggcagcaaaacaggtctgattttgagaagcaggtctttagccgttatcccgaatggcaattgttacgagaaaaagcggaaaaagattgggatgcagctcatccacggcctgaggaaataaactttgttactcaaatccctagttatagtttgatcattactgatgagcgcatagcagaactgattaatcagtatgatgcgaatggggcagtgaatattaaagttgaagagttaatttcattgctttgggaagtaagagagtaccggaaaatttaa

SEQ ID NO: 88491 - DNA, 2550 bp, Enterobacter aerogenes
atgcctgactccacatccctggcatggagctggaatgccagaaagcagccagtaaacccttatgctgttgatgtgcctgcacggaaaccctctgcgctggccgtctggattgcgctttatgagcaggataaaagcgatcaacgcgagcaggctgaagcaatgagtcgtgcagcagaagagtacctcttttctgttgcacattgcgatccctggcactatgacgaattgaatgatgcgctgattgagaaggctaagcgacatgcagaactccatcgtgttgatcctcttatcctgattcgcgatgacgtcgccagcttgcctggtttcctgcgcaagccgctggaaacaaggattaagtatttggaaaaatcagaagatccgcgccatttgcctacctatctgaatgaggtcattactccctcattagtgagaattgacagggtccgtgctaaccaggcgtcgctgtcattcaaggccatggctggcagggatagccttgatcaactccttcgacttgctgaactgaatcagcgggaggttaagcggctttcaacgctggtcgcagcgcacattgatatgatttttatccagctttgcggtgagatgctgaccgatgaattagcttctcccattgtaatactggagctctatcgtcgtgtggcggccgaagtgtcacgccttgatgttatcccgccgggttatgaagcgctccgcagcaaacataatcgccgcaacccgattaattacgagctgataccgggcgcgcttgcccgtatgcgttgtgctgactggtggcaacgtaagctgtggcaactccgcaacgaatggcgggaagagttacttcgggctgcgtgccttgttcatcggcacgcatcaccttatgtcagccatgacattctgttgcagaagcgggaacaacgccgtaaggcgatggattttttccgcaaccatgatctgattaacgaagatggcgacacgctcagcatggaggatgtggtgcttgcaagtgccagcaatccagcgcaccgtcgtaatgagatgatggcctgtgtcaaaggcctggaattgatagctgaaatgcgtggcgactgcgccatgttctataccatcacctgtccttctaagtaccacgccacactgatgaacgggaagcctaaccctacatgggatcactcgacagttaggaaaagcagcgactatctggttgatacgtttgcggcattccgtaaggcaatgcacaaaaaagagctgcgctggtacggcgtccgcgtagccgaaccacatcacgatggaactgtgcactggcatttattgtgttttatgcgcaaaaaacatcgacgtgcaatcacagagctgctgcgtcgtttcgctatccgagaagatcgcgccgaacttggcaataacactggcgctcgtttcaagtcaaagctgatagacccgcgaaaggggactccggccagttatattgcaaagtacgtcagtaaaaacatcgatgggcgtgggctgggtgacaccgtcagcaaggagacgggtaaatcactacgtgatagtgccgagtacgtcactgcatgggcatcgttgcaccgtgttcaacaatttcgtttttttgggattccaggccgccaggcgtaccgcgagttacgattgttcgcatcgcaggcaactcgtgcaatgaaaaccagcaaaccgggcgctccggtacttatggatccaaaactggacgctgtgctcgctgctgctgatgttggctgttttgccacttacatcatgaagcagggcggtgtacttgttccccgcaaaaattacctcattcataccgcctacgagccgacagtcgaaccaggaacgtatggcgatcacgggattcgtatttatggcatttggtcgccaatcaccggtaaggaaaacaaaatatgcacgcatgtccatacctggaagatggtgaagaagactcccgctaacccaggcgctgaaagcgccgcccagggcgaccccgtcgccccttggactcgtggcaataactgtcccccaaacccaaaaattcgcaaaaaagagatggtaactgacgttgctgtacccgagataatgacccccggtgaagtaacgggagcgcttgatgtgagtaaactatccgcaaaagagcgccgggctatactgagaaggattacagaggagatctataacaagaagaaagcgcagggtcacgtagaatcacgcaattactctccgtttgaggtcatgttgagcgattttgcttcatctattggcatcgaacttagtgaatcccaggttaatcatttatttaatgataaacgcatacgttatggtgatcgcatttactacgcgactcacgatggggcgctgcgcagtatggaaccagagaattcagatgttcaaattcggaatgtgtggaaactgttgaaaaaacacaataaagtagatgtaggtcacatcacagataatccagtagggcattattccgacatgctcaggtctctggacactagaggatgggctgtactctttgggggagataagaacagggggtga

SEQ ID NO: 88492 - DNA, 936 bp, Enterobacter aerogenes
atgattaaatcacctcttaagtgggctggcggtaaaacccgcgtgttgccggagctgctgaagcacttacctaaagctgattgcttgattgagccctttgtaggcagtggcacagtctttatgaatacggaataccgccgctatgtgctttgtgacagcaatcgcgcattgatcaatttcttcctcgcgctcagggaagaccctgaaagattgatactgatcgccaggaacgtattcagaaatggcaataacgaagatagctattacgaagagcgcaagttgttcaaccacctgtcgtgggatgacgagtgtgcagatgattacgttgtacggtgggctgcatcatttttatacctgaaccgccactgctttaacgggctttatcgcaccaacagggatggcggtttcaatgttccatttggcagctataaggcgccttattttccagaagcagaaatgcgcctatttgccgaaaaggcgcgggatactcacgcgctctttctttgtaatgattttcgtacttccattccgtacgtcgccaggaatcgcctggactccgtgatttactgcgatccaccgtacatcccgactagcaaaacagccaattttaccgcttacggcaagccatttaccctggatgatcaccgcgctttggttacggcgttgctggacgttaatcgccagcatggaacgcgatcggccatctcgaatagcgacacaccagaaacacgccagatctactccgctttcaatctccacgccttcagagttcgacgttccgttagcgccaaaacccgcgatatggccggtgaagtgattggcgttcttcgcgtgtgtggtggttgcggtcgttctggtggtggcggttgtccggactgtggggcggtgatgggtgatgcgacatatgccgaaatgtttggcgcgccggcttgttaa

SEQ ID NO: 88493 - DNA, 228 bp, Enterobacter aerogenes
atgcattcgcatttatctgtggtttgtaacgcgccgttgccggtttgtaagagggcgcttgccgccctgaattgctttgctcgtggacagcgtaattacacccgcgtcaagccacacgcctatctcgtgatccgcattggcctccgttggcgtttgctcagcaaaaacggtggtaagcagtggcgactgatgacccatgaaacctataaccaggaatgccgcaaatga

SEQ ID NO: 88494 - DNA, 567 bp, Enterobacter aerogenes
atgaatcacgtaatgatcgatttgattaacgttagtaagaaaccgtcatcacctctgtgtgccattgaagctgtgttttttgaaccctcaacagggcagatcggaaaggttttttattcttcgatagacattcgtaaatctgaaagcttgaagggccgtatcagcattagtacggcattcgattggatgaaaaaagactctcactggcgcgccgaagtaatgagcgcaaccgaagctgaagaagatgcactttgcagccttgcttctttcatcgccgacaacacctgtccccggaacgcggcgttattcgtatggttcaaagatgccccggaaaaactggtttcacttcgttatgccgtggatcgcttagaggtgtcaggcattttacctgaaggcacaaaataccgctgcattcgttcacttctcgaccttgctgctgccacagactatgcgcctcatgcgagaagcgccctggcatgttacacgctcactgacgcgcgatatcaagcggaacaagtctgcgaaatctggcagcgcttaacctccccacacattggatcgctgtga

SEQ ID NO: 88495 - DNA, 225 bp, Enterobacter aerogenes
atgtcggttacgtcaataaagccggaaggcggaataagcgatccagagtttatgggaatcagcaccaatgcgcgcaaaggcgagcgcgcccacttactcggattgctgcgcatccgtatgggcctgctgaaagagcaaggccttacccccgaagagatttattcagcacttgagcagtggatagccaaccacgaaacaatcaccagcgagggcagtagaccatga

SEQ ID NO: 88496 - DNA, 273 bp, Enterobacter aerogenes
atgttcaccgaagaaaaaacatcctttgaacaggaaatgctgattcgagaagcagtggaaagtgccgagcaggggttcactgtacatctaaaaaatggcgctcgtatcaccattagttcaaaaagcccgtctaaagatttaataatttacgggctcgaaaaagcaattcgcggtaatcacgatcgcgcgcgaatgacctttattgatttcatgtattactggcatgaaaggatatttaagcagattaaaagaaagccgcgccctaaccactaa

SEQ ID NO: 88497 - DNA, 378 bp, Enterobacter aerogenes
atgaaactcgaatatgcagaaaaaattaactcgcttttacaatgcttccatttcaataaagagtttctggaatggaatcatgattactctctccagcttttacgccacggcgtatcccacctctatcatttcgcgatgcttcaaggcgagaatgatgaatgcactcttgaagaactccgcaacatcattatttccgtcaccgatggtgatatccctaaaccatacgacctgctatctctggacgctgagcaactgaagaaggctatgaagtttgttcagccgcaggaggtaaccgtagaggttacaccggagatcctggaacacctgaaactgggagctagagcctcctggcggctggagccccctcgctttaactga

SEQ ID NO: 88498 - DNA, 219 bp, Enterobacter aerogenes
atgaagaacggtagccgcggatcagtatcacagctcaatagcaaaaccagcctctactgtggctttactattctgaaactcccacgcaaaaaaccgtacagccgccagcgctatcaaattacgcacacaggccattattacggcatcgactttgctttatcagaagcatgtcgaacgattgacagaatcatgagtaaaaagcacttcattgctttttaa

SEQ ID NO: 88499 - DNA, 279 bp, Enterobacter aerogenes
atggtaaagcaaatcacaagcacgaccgatgcggttccttatcaggaatttgccagactcatcgggaaaacgccggctgcggtaagaggaatgatcgagaaagggaagcttcctgtaatcgagatgaccgatccccagtctacttctggccgtgccggcgaatactgggtttaccttccagcctggaacaacggcatgaaactggcctacgaaagtcgtccaaaggagatcagggaagggtggttgatgtggctcggtctcggtgagccaggtcgatag

SEQ ID NO: 88500 - DNA, 984 bp, Enterobacter aerogenes
atgactattaagaaactcgatgatggtcgatatgaagtggacatcaggcctgctggtcgcaatggaaagcgtatccgcaggaagtttgataagaaaagtgaagcggtagctttcgagaagcatacccagttcaaccaccacaccaaagaatggttatcaaagccgacggataagcggcatctgtctgaactgatacagctttggtggaatttgaaaggcaagcatgaggagcacggtcggataaaccgcaacaagttagatattttttgcaggattaccgacgatccttgtgcttttcagattacaaaagcgctgattagtcagtattacgcggcaagaagaagccagggcattaaagcttccaccattaaccgtgatctcaacagcatcagtggcatgttcacagcgcttatcgaggccgagttgttttcgggtgaacatccgatcagagggcggaagaagttgaaagaagatgtcccagaaactggctatctgacagaggacgaaatcaagcacttgctctttaaactggatggcgacaacaagaagatagctgttctatgtttaagtactggtgctcgctggggcgaagcggctcgactcaaggcggaacacatcatacagaaccgtgtgacgttcgttaaaaccaagagtaacaagcagcggactgttccagtttcagcggaagtggcaaaactcatagcggatggtaaacgagggttgttatttggtaaggcgtcttattctgacttcaggcagatactcagggaagtaaaacctgatcttccgaccggccaggcgacgcatgcactacgccacagtttcgcgacgcactttatgattaatgggggaagcatcattacattacagaggatcctaggacatgcgcgaattgagcaaactatggcctacgctcactttgcgcccgaatacctccaggatgcaatctcacttaacccgctgagaggtggtgctgatgcgtaa

SEQ ID NO: 88501 - DNA, 1023 bp, Enterobacter aerogenes
atgtcagacttcattcttgcccgcgtctcacagacgcttgctaccgaacgaacgctcgaaacgttggtgcgacaactgctggaaatgctggaactggtgactcgtatggagtccacatacctgacgcgggttgatttagaagcacagcgccagttagtcatgtatgcccacaacagcagcgaaatgcagatcccggaaggtttttccgttccctgggacgagtcgctttgcaaacgcgcaatcgatgataactgtatattttgcaacgaggttggccaacgctggcggtcctgcaccgccgcgcaggaactcggcatcgccacgttctttagtattcccgtccatcttgccgatggttcgttatatggtacgttgtgcgccaccagccgcgtcaaacagccctataatctggaaggcgagcaggtaatgacattgttcgccggcctgatctcccattacgtggagaaagagacgctggttcagcaactgcgtagcgcaaatgcggcgctggagatgcactccaataccgatgaactgaccggtctggccaaccgccgcgcgttgtttaaacatcttaaaacgctgtttacccaagctcgcgcccagcagcgcaggctcctgcttatttttatcgacctcgacgattttaaagcgattaacgataaactgggccacccctgcggcgatagttttctcatccagataggtgaacgactaaacgctagcgtgcgtgacgaagatgccgttggccgcctcggcggcgatgaatttttaatcatcggcccggcacttggatcatctgagcaggaggcgtttatcgcccatctgcgccagcagcttaccgggcgttaccgcctggccggacacggtatagaataccctggcgccagctttggggtcatcgacgtcgatccgcagaatatggacgttgaacaggcgctacgcgcagcggatgaggctatgtaccacgacaaaaacgcacgccgcatgctgaccattttcgatatcgaccagaaagcataa

SEQ ID NO: 88502 - DNA, 264 bp, Enterobacter aerogenes
atgattctgcaaaaaatcctcagtaataaaaacggcaagaagtttctgttgtcgatggcgacagtttttgccattgcgcttgccgtcgtgggccgcgcaacgttcggtggcgtggtgagcgagtacaacatgccgtactcggagtggacaacctcgatgttcttcctgcagggggcgatggtgatggtttacagtaccgtgttcaccgtgttatttgctatcccgctgggctttctgtttttaggttctgaccgtcaggactaa

SEQ ID NO: 88503 - DNA, 639 bp, Enterobacter aerogenes
gtgttcgctgagtttggtgttttgaattatctgacctacctggtcggggctatttttatcattctcgtaccaggtcccaatactttttttgtactgaaaaccggtatcgcgcacggcgtgaagaaaggataccttgccgccgctggcgtgtttatcggcgatgcggttctgatgttcctggcttttgctggcgttgcgacgcttatcaaaacgaccccggtgctgtttaatattgtgcgctatcttggcgcgatttatctgctttggctgggcgccaaaatgctctactcggtatttaaacagcgcgaggggcatgatgccgccgatgctgagccggggagcgccatcctcaaacgctcgttaaccctgagcctgactaacccgaaagcgattcttttctatgtctcttttttcgtccagttcattgacgttaatgcgacatcgccgggcatcgcgttctttatcctggcgctgacgctggagatcattagctttgtctacatgagcttccttatcctttctggctcgtttgtgacgcgctatgtgaaaaccaaaaagaaactggcgaaattgggcaacagccttatcggtctggtctttgtgggttttgccgcccgcctggcgacgctgcagtcctga

SEQ ID NO: 88504 - DNA, 915 bp, Enterobacter aerogenes
atgtcttgcgcctttaaaaaaaatctactgcttccccgctattgggtgacctggtttggcctggccattctttggttaatcgtccaactaccttatcccgttttacatacgctcggcaccagcgcagggcgactatcgcgtcgcttcctgaagcgtcgggaacatatcgcccggcgtaacattgagctgtgcttcccggaaatgtccagcgcagctcgtgaaaagctgttggaagagaactttatgtccctcggcatggggcttatcgaaacgggtatggcgtggttctggagcgatgaacgcgttaagaagtggtttgacgtcgaaggcatcgccaatctgaacaatgcgctcagcgccgataaaggcgtgatggttgttggcatccactttatgtcactggagctgggtggccgagcaatgggcttgtgtcgtccgatgatggcgacgtatcgcccgcacaatagcccgcttatggagtgggtgcagactcgcgctcgtctgcgctcgaataaagcaatgatcgaccgccgtaatctttccgggctggtgcatgcgctgaaatccggtgaggcggtgtggtttgcgccggatcaggattacggcccgaagggcagcgtatttgcgccgtttttctcggttccacaggcggcgacgactaatggtacttgggtgctgtcgcgcctctccggttcaaaaatgctgagtatcagtatggtgcgcaagctggatcgaaaaggttacagcctgcacatcagtgaagtgatgaatgattaccccggcgaagataaacagattgccgccagttatatcaacaaggtcatcgaacgagaaatcctgcgtgcaccagagcaatacctgtgggtgcatcgccggttcaaaacccgcccgcttggcgaaacctcggtatattag

SEQ ID NO: 88505 - DNA, 123 bp, Enterobacter aerogenes
atggagttttattgcctgaaaagggcgaaaaataacagttatggcataatttatattattgcaaacgtgactattagtctcaattatatacttttgtcagtatttatcagcaagcataaataa

SEQ ID NO: 88506 - DNA, 1188 bp, Enterobacter aerogenes
atgcgtattgccttaaagtcggctttaatgctggtcacgcgcgtcattaacgccatcaacccaaggctggatctgcatctacagcgcacggcgctaataagctacaaattatcgctggcgttggatcttcctgcgtcgcaacaaaaaaccatctttctggctgcgctgctacatgatatcggcgagcttggcgataagcggcgcattgattcgctaaacgcgatagacaacctttatgacccgcaccaaatccgtggcgtacagatgcttgccgggctggatacttttacccctatcagccctattattggcgatcaccacttcagcccaagccgcaaaggcaatctggagcagcatatcgtctatttcgcggactgttttgagcgtctactcccttcgcaaggcgtcgttgccccggaccaacaaagtgctctcatcgcccgctttgtcgctgactatcgcgacatcgatcctccactttgcgatagactatgcgaattggcgcaacaccctaccttctggcgccatatgcaagcagagcatattcagcggttgctggagatcgtcgggccgattaatgacgtatatattgacatcgatggtctaaaagatatttgtttgttgatcgccaaaattgtcgatacctacagtagtttcaccgccagccacagcatcatggttggcgaaatttcttatgccctcgccgtctatatgcatctgccgccgccggtgtgccgcaaaattgaaattgccggctatttgcatgatatcggcaaaatatatattccactggcgatcctcgaaaaacaggctgaacttagcgatgacgaagcacaattgatccgcgagcatagctatatgaccggtgaaatattacgagatttcaccgatctggcggaaatcatcgattgggccgctaaccatcatgagaaactcgatggcagcggctacccgctgaatttaaatcatcgttatttacaacttccggacagaattatcgccgttgcggatatctttaccgcgctcgttgaggatcgcccgtatcggctcggtatgccatatcaggaggcgttacaacttatagaagctgatgttataaatggcgctctggataacgatgtgtatcttgtattgcgccagcatgcccaggcgctacatcacctcgtcactcgcataccgcgcgtctga

SEQ ID NO: 88507 - DNA, 1770 bp, Enterobacter aerogenes
atgactaactgggcctacgggatcaccgtagggctgaccattgcatccggtatggcgatgctaatcgcttccggcgccgatcgcgctgaacgccaggctgtacaacaacgggatacgttcgttcgtcttgtcgatgagatagaacgcgacgcgtgggagctttcggacctcacgcgactgtatgtcatcgaaaaacaaccggagacgctgcaacagtatcgtcagcagatccaaacgctcgaatcaattgaaaatcggttgcttaaactaaaagacattggcgccagccagcaggagctggcgctgttgcacgatggtctgcgtattgccgatgaattacaagatgaacagcagaccgccatcgaacgcgtcgctcatggcgaagagaaagaggcgattttgcaggtttacggtaagccttatgagcaggagctggagcgggtgcaaacgcaaatcgatcatttccgcctgctgctggaaggacgaacaaacaacgccatgcagcaagcgactgaaaaatcacgcctctggcggacgctttcggaagcgatggttggcctgaccgccttgatgtttttatttgttctcggctttattctcaaacgccgggtgctcacccctgtggtacgactcagcgatgtggtacagcgtctggcatcgcaggattatgccgtcgaaccaccgcacttcaaacagattgatgaaatcggcgatatggcgcaggcgatccgtatctttcgcgaaaatggccttgcccgccagcgtcttgaacaacaacgcgatgccgactgggccgttcgtgaactgctggcgcgaatgactcaacgcttgcagggatgtgaatcatttgaggatgtggtgaaggtcgctgaacttttcgcccccaatatcgcgccggacgttcctggccgactgtatattcttgataccgatccctggcaaatgcgctgcgtcgcgcagtggctttcgccgccggacgaggcggccgtgttttatcccgataagtgctgggcagtacgtcgaggcctgagccatccgccggttaacggcgaaccggacatcgcctgctatcatctgccgcaagaatgcaacgagcaatcattgtgcgttccactgatcgcgcagggtgaagccattggcctgctctcttttcgtaatgtcactagtgagacagccccctctcgcgcttatcttgaactcatggcggaagcgttgggcctggcgctatccaaccagcgtctgcgcaatgctctgctggaaaaagcgttgtttgattctctgaccgggttgcgaaaccgccatcatcttgaggaagcgctgcatacgcagatgaatctggcggtgcgcaacaacagcccgctgagctgcctgatgatcgatatcgatcactttaaggcggttaacgataattacggccatgaggcgggcgatctggtgattaaaaacgtcgcggcgatcatccagcgcgcggtacgcgatcttggcctggcattccgctatggcggcgaagagtttttggtgctgctttccggcagcgatgaggccagcgcagaagcctgcgcgactgaaatctacaacaacgtgagaaatatgactttacgctgcgggctgacggatataggccaggtgaatgtctctatcggtatcgccagctatccgcaacacgcgcaaagcgacagcctgctacgtgctgcagatgccgcgctgtatcgggcgaaagagctgggacgttcgcggattatccgctttgatatgctgaaatcagcataa

SEQ ID NO: 88508 - DNA, 429 bp, Enterobacter aerogenes
atgaagaagtttctctttattgcgctgggaatggccgcgttgtttagccaggctggcgtcgccgggactaaaacgttggttgattatggcgtcgtacaggaaagccatattattagcactccgcatcagcgccagccgcttcgtacgctcgcggcaggaacgctgggcggcgtggtcggccatcagttcggcaacggaaaaggccagacggcaatgaccgccgcaggcgctctggccggagctggcgcttcacgctatcaccaggatcggcagcagggcgctcagcaggttgaactgctaatcaaaaccaatagtgggcaggtgatacaggtgctacagggttacgacggtcggcttatcttcaacaagggagataaggtgcgtatcctgacgtcgggaaatgatactcgggtggataaatcggtgtaa

SEQ ID NO: 88509 - DNA, 411 bp, Enterobacter aerogenes
gtgaatactttcttgcgtaacaccctggccgccgtagtgatgactgcgggtctttccgttgccgctcaggccgcgacgacagccgaagtgccgccgttatcccaggacccggtggtacaacatctcaagctgagcaacgatcaggtcagcaaaattcaggccctgcgtcaggagctggaaacaaacctcaaaaatatcaaaattggtggttaccaggatggtgctctggtggatgtgattcagtccggtaaatgggacgatgcgaaagtaaaacagcagctagccgcttttgcgcaattggatcagcagacgcgttattaccgcgtgaagtattacttcggcattaatcaggtgctgacggctgaacaacgtgagcaggtaaaaaaagatctgcagcagactctcaactaa

SEQ ID NO: 88510 - DNA, 1029 bp, Enterobacter aerogenes
atgtctccacgtagcgccagcgatctgtacgccgaaatgaaaaatatgtcagtagaagagcgtattcgctttttctcgctttcgcttgcggaaatgcatcgtgagctacaggagagcatcagcgagattgagtcgatgcagcgagcgctggccgaaagcgaggagaaccatcgacagctggttgagactgcacaggatgcggtgattaccatcaatcatgctggggtggtgattaactggaaccaggcagcggaaagaatgttcggctggtccgctggggaggctatcggcaacaacctgggcgagatgatcgtgccggaagagtttcgcgagcagcacgcccgtggtttaatgcgctttcaggcggctcagccgtcgaatatccttaatcgcaccatcgaaattaccgccctgcatcgaactaaaggcaaattccctatcgagctgtcgatctggccgcatcaacaatcaggcaagcagattttctccgcgtttattcgcgatatcaccgaccgtaaacagcgggagcaggtggtctggttgcacgccaacttcgacgcgctgaccggattgccaaaccgcaggctgttggttaatcgcctggagctggcgattactcaggccatcgccaatgagacagaagtagcgctgctctttatcgatctcgaccgctttaagccggtgaatgacgtttacggccacgccgtgggtgacgaactgctgcggctggtggcgtttcgtctacaaagcgttttacgagcaggtgatacggtggcccgcctcggtggcgatgagtttatcgccctgctccctggtttaaaagcaaacgatccgctcccccgacaaacggcggaaaaaatcagcaatgcgctgacccagtcatttttgatccacgagcatgttattacgatttccggcagcatcggcattgcgcttttccctcacgatgccgcagatgccgatacattgctgaacagtgcggataaagcgatgtacagtagtaagaaggcgacgccgcgagagaggtaa

SEQ ID NO: 88511 - DNA, 426 bp, Enterobacter aerogenes
atgaaagaactcgaaaatccaagaattgaatccaaagttaactcctttgttgaaaaaggaaatgagttgcatgatgacaaaaaatatgcacaggcgttagaacaatatgaaaaagcctggaatattttgcctgaaccaaaaccagaatggcaagttgctaactggatttccgcaaatatattcagcgcttattttgaccttggtgattacaatgaggcaaaaaaatggggcgaaatgacgttgcaaacgagaggggcggagatagatacagcgccatcgatcgatctgggtatggtttgttatgagctagaacaatttgatgaagcttacaaatattttaacgatgcttatagctatggaaaagagagagcatttaaaagcagacctaagaagtaccttgagttttttttaaataaaagggcatag

SEQ ID NO: 88512 - DNA, 522 bp, Enterobacter aerogenes
atgcctattttgactggattaagtattgataaacaagatattagttatctggaggaacatttctctgttgcttttcctgatgattacaaagattttttaaaaaaatacaatggatatagaatcgttgcacctgactattgcgatctaccattcgacaaagttgataatgattttatttcattcgatgcgcttcttggttataagactagcaatagtaattttgatatagttgaaattaatgaagagttactagatgaaatatcgtatattgatggtgcactaataattggcatggatccaagtgacaatggctatgtcctgataactaaaaatgatttggccggagtttattactgggaccggacttgcctacatgctgaggataataaacaaagctatgatattagtgatgatgatgatttaaaccatctttatcttataaataaagccttttcagatttttttggaagtataatgaatctaacagtcaataaaggaatgaagttatctacgggattgtaa

SEQ ID NO: 88513 - DNA, 444 bp, Enterobacter aerogenes
atgaaagaactcgagtatataaagccatatagcttaaaagaattaattacgaaaattgttcatcagggatacacaaaagacaatttttgcctttacacaaaggaatatgaagctgttgctacccccgaacttgtttgctatctggatcggtatactgaagttagtgatgatgaagacgtttatcctgaatacgttgagcaagaagataaatttggtgatattatcccatttgaaattaaatttaatgattcagcatctcaatatgatattttttcatttagagaaacattattgggtggttatataattataaatggaaaagttaaagaaaccattcaggaaaaggggttcaagggaatgaaatttgtggcaatcgaaaatgcgttagatgtattttgtaaagattatttttacgatgtagaatctaaccgtaaaaaaatataa

SEQ ID NO: 88514 - DNA, 315 bp, Enterobacter aerogenes
atggatctattaagatttaattactcaactttattgaaaagaagtaaatctttgtcttatcgcgaacaaataactactataacaatagtattaatgaattttctaaaggaaaacaatttagttataatagaaccgtttgaagaggatggtagcctaagagaagatcttgttttgtatagttctgatttaacggaggacggtaaccttttgtttaaggaatattatccgaaatggtctaggtatatagatcgtgggggggatgttaacaatactaaaatattagacgatggtttggatattattaaaaatagataa

SEQ ID NO: 88515 - DNA, 759 bp, Enterobacter aerogenes
atgcgcgagtacgtgtactatccgggaagttttcagccgctggcgctgctgacgcaggaagcgggcaggaaggagagctggcactatcattgtgacccgaacggcgcgccggtccgcctgacgtcattacagggcgagatagtgtggtcagagaagacgggggtatggggagagaaaggggaggtctacgccgatcgtatcagcaacccgctgcgttttcagggccagtattttgacgctgaaacggggctgcactataatcgacatcgttactatgatcctgaaattgcgggatttattagccaggatccgattggattagccggtgggctgaatgtttatcagtatgcgccgaacccgctgggatgggtggatccgtgggggctaacgtgtataccaaataaagttaatggagatgcccgagaagcaaaactcttaacacgattgcaaaatatcttcggtgttgaaaatgttattagtcagcggcatttacgtaatgctcagggaaaaattgttggtcttgttgatgatgaaatcaaactaggtaaaacaaaaggttctcgcatccttgattttgtcgttaagactaaggatggctggaaaggaatagaggtaactagcaaaacagcttctaaaatcgcccaatcttcaaaagaggaaattattcggagtgctggaggtggttttgtccgtcatccagttacaaaaaaattgatagaactttctgacgatatatctagaataatacgtcttgattaa

SEQ ID NO: 88516 - DNA, 600 bp, Enterobacter aerogenes
atggaaaagcatttaccaaagtactcaatcccagaacggcaaattagagccttcttcacaaaagattttatccgtgtctatcaggcatattccgatgaaatagctgatagtgcgattaaaaacaatacgttcgtttctcccccatttagcctgactagaatgacatggattaagccatcatttttatggatgatgtatcgctctggctgggggaaaaaagacagcaatcagacgagaatattagctatagacttgagtcatgacgcattccaaaaaattcttcatttaggggtgccaagtgattatcattcagcatcaacctttcaaaataaagaagaatggcaagataaaataaagaattcagatattatatttcagtgggatcctgagagagatattcatctaaataaacttaattaccgtacaatacaaattggaattcgaaaccaagcagtcattaatttttgtaatgaatggattgttaatctacatgatatcacccatcaggtacaggagattcacaacctcgtctctttaggcgatttttgcaaggcgaaagcgcttatccctacagaaaaaacatatcatttccaactttaa

SEQ ID NO: 88517 - DNA, 495 bp, Enterobacter aerogenes
atgaaaatggataaaaaacaattaatcgtctctttaatgaaaagagaaattgatatctcaaaattttataatgatttcaatgcattttacggtgaacttaacatatgctatgaacttgaattagctcgtcaaaatagagatgctgaattagttgatgtttttttatatttgtcagctcttattaattatgattttaagtgtatagatttattgaatgaattgataatagctgattggcataaaaaacatgaggatttagcaacgattctaaattactatcatagtgagactagtgttgaatacttatatcaagcggcgttgttagaactaaattatagagactatgatgaggattatgttctggcagataaatgtattagggcgctagccaaaataaacaataaaaactcaatcgaaaaattggaaaaattggctatggtagaaaatgaaaaaataaaaaaaagcgcaatgaaacaattaagtaaaattagttga

SEQ ID NO: 88518 - DNA, 4104 bp, Enterobacter aerogenes
atgcactccggggctcacttcgacccgcagcttggcctggatatccatacttatccctggccgctgccgacgccgcatatcggcatcgttttcgacgtgtttgattatctgccgctgctgggcactaccgtacacgtcaacagcatcaaacgcgccagcgcggggaccggcggtattgcggtacatattccggtcggcggcgtgtgggtgccgccgctgcgcgcgcccggcggcccgcagatggaagacgagctgtttatgggcagcaaaaccgtcgccgtcgatggcgaaccgttttcccgcatcggcatgccggtactgagctgtaacatcctcggaatggtgccgccgttccgcctgaagcggctgagcaaaccaaagccgctctcgctgacgctgccgctgacgtttaacctcgcgattcccaacaacgtgattgtcggcgggccgccaaccatcaacctgatggcgctgctgatgcgcgccgggttaagcgggttgggcaaggggttgaagaaagttaaaaaaacgccgcagtggcggctgtttatgcggcggtttaaaaagctgcgccagaagctgtttcgcaacatggatcccggcgtcctgaaatgccgggtgctacgcgccgaaccggttgatatccgcgacggtagcgtgagcctggagcatgaggattttctgttacccggccgcctgccgctggcgtggacgcgaagctactcgtcggcggatctcgatgaagaagggctgtgcggttacggctggtcaaccccggcggacacccgccttgaaatactggccgatgaaggcgtcgcggtgctgactcagccggaagggatgacgctgtttgcggcgctgccgcagtccgacgggcgcgagcagggtattgtcggcctgccggacggcagccgcctgtggcgggaaacccgcaatggcgaatgtttctggcatgttgagcaggaagggagcgcgcggctgcaatttcgcggtaagtgcgggcggctggcgatttaccggctggcggaccgtaacggtaacggctggcagttcgactggcaggggcgcgaccttgagcgtattcgcgagttcagcacgtgcggcatgagcggcagggagatcctcgtcacctggcagaatagccgcctgcgggcgctacgcctgcgcaacgcgctggatgacgagatcacgccgctgacccgctatgaatacgatagcgataatcaattgagcgcggagatcgatgcgctttcgcatccgcggcgcttctactatcaacagcgccatatgaccagccatgtcgaccgtaacggccagggctttcattaccagttcaatgacgagtggcgggtggttcacgcctggggcgacggcggcgtatgggattaccatttcgcctggcacgacttgctcaacgaagtggaaatcaccgattccaacggccatgtaacgtctgtcagctttgatgataacggcctgccggtttcggagatcgatccgaccggcggcaataccgtcttccactacgatgattttggccgcaccgtcgaactcattgagccggacggcagcacgcgtcgttgggagtatgatgaacaggggcgaatgatcgccgaacatctgccggacggtagccagattcaggcggcctacaatgaagacggcgatctgctgacgctgattgatgagaaaggcgcctgctggcgttcggactacgacgaacgcggcaacctgctggcgggaacggaccctaccggcgtcacctcgcgctatcagtatgatgagtacgggcagctgagcgcggcggacgtgccgggttccgggcagagtcgctatcgctatgatcggtttggttttttgcaggcgctgagccaggccggcgcgggaaccactcaactgcggcattccgcgcgcggcaccctgctggagcgtattgacgccggcggcggcagcagccgtttccactgggacagcaaggatcggctggtggcgatggtcaatccgcagggcggcgaaattcgcgtcgcttacgaccgggaagattcaccgcttcacttcaccgatgaagccggccagataacccgttttcgttataaccgcaccggaatgctggccgcctgcgagacgccggatggcgcgacgcttggctatcagtacgacctggaagatcgcctgctggcggtgatcaaccagaacggtcagcgctggcagctggaccgcgacgcgctggggcgcatcgccgcggagaccgattactggggacaggtaacccgttatggctgggataaaggcaaccggctgatcagccgtgaggatccgctggggcggctggtgcgctacggttacgaccgcggcgggcggctaagcgagcggcgcagcggcgataccctgcaggcgaagtatcattacgatccctgcggacggatggtgctgtgtgagaatccgtggcggcggctggcgtggcgctatgatgacgccgggcgggtgctgctggaggagcaggacggttttcagctgcattatggctataacgagcgcggcctgctggtctcccggcgcagcgacagcggtcatcaggtgcgttacgccatggatgagtatgaccggctgagccagatccagctgaatgacgatgcgccaatcgtgctgggttacgatgaggccgggcggcgggtcagcgagcagctgtcggcggaggtgacgcgtcatttcacctacgaccggctcggccaactgacgtcgcagcaggtgttgcagaatgatttaccgctgttcgccagcggcttcagctgggataggctgggtaacctgacccggcgcgatgacagcctgtggggcagcgatcgttacgcttacgatccggtggggcgcttgacggcccataccgcgccggacggtacgctgcggcagtttgtgcaggatgcggcgggcagccacctgcagacgcagacccgggcggtgaatgagagcgccggaggctggttccgcgaggggcagcagcgcggggtgcgttatgtattcgatcgcgcgggcgagctgcgacagcggcgcgatgtccggcataacggcgagaaagaggatttcagctgggacgataaccgccaactggtggcggtgcgcaagggcgagcggctggtgcgttacggctatgacgggctggggcgccgggtgttcaagcagacggcggaagagacgcgctggttctactggcagggcgacgcgctggcgggggaaacggtcactatcacccgcgaaccgctggcggcacagagcatttttgataccggcagccgactgcagcggcagaaagcgcaggaaacgctgttcagcagtatgcgcgagtacgtgtactatccgggaagttttcagccgctggcgctgctgacgcaggaagcgggcaggaaggagagctggcactatcattgtgacccgaacggcgcgccgatccgcctgacgtcattacagggcgagatagtgtggtcagagaagacgggcgtatggggagaaaaaggggaggtctacgccgatcgtatcagcaacccgctgcgttttcagggccagtattttgacgctgaaacggggctgcactataatcgacatcgttactatgatcctgaaattgcggggtttattagccaggatccgattggattagccggtgggctgaatgtttatcagtatgcgccgaacccgctgggatgggtggatccgtggggattagctaagtcatgtggtggaacaacaaaattttatcgttcaatgagtcatgaagatttcgagtatttacgcactacaggtaaattaagaggaacatctgaaacattcatttcaccaagaagagcattctctgagaattacgatggagttttagtgaggttttaccttaaaaacgatgcattatcagaactaaaatcaattggggttaaagattcagcagtacttaccagtattacttatccggacatgccagatgtagggaagggatggaaggagacaagtgcattctttaaagctgaaggggaacagattaatattggattaggtaaaggtaaggcattagatatattcaatcaagggattcagcgattcgagaggttaaattaa

SEQ ID NO: 88519 - DNA, 129 bp, Enterobacter aerogenes
atgaagacccggattattattattgttgccgtgacgctgctggcaatcctgtttttaagcctttcggacggcgggttcgccaccgaagtgcgcaccttcctgcgcgcgctgctgcgcgccatgttctga

SEQ ID NO: 88520 - DNA, 1554 bp, Enterobacter aerogenes
atgaacgcggcgaagaatccgaccgaaaaagtaatgagcgagcttgagcttagctggctggacgccagcgagcaggcggagcagatccgcttatttatctggcggacgcctgccggcggcgagtcgctgcttgatggttttatcgcgctgcagcagcatcctgaaggccgctcgctgccggatctgctgctggggctaaccacgccgtttgagaccggctatggctacagcgaggcgctcgggcgcgagtttgtggaacactacgaagcgacgccggatgccgctatatgggatgccgaacgctttctcccaacctatagcccggcgcagttgcggcagatgctgcaggattttgcgacgacatttcatgacgatttacgttatctggtgttggtgctgaaaccctccgccgtcagcgatgaaaaggcgttgaaccgctggttgaacggctggctggcgcaggaggcgtgcaacgccagactgttacttatcgacacgcttgagcaaccgatttggcagccgctgtatgaggcgcatccgcgcagggtacggctgctgaccgatgacgtcgacagtatgaaagtgatgcatcaaaccgcgcgcgggcagagcgatccgaatcccgatcgcctgctgtttcgccgctatctggctgacgccatgctgctgctggaaaaaggcagcgccgcgcaggtggccgcgcgcggcggtatggcgctcggcgtcgcccagcgctgcggttgggccgaccagcaggcgatgatgcataacctgatcgccggcggttggttgaaaggtaacgatcatcaacgggccgtcgaacactaccgccaggcgcaaaacatcagcggcgaaattgccgacccggcgcttaaaggacaactgcgtacccaaagcacttttggcgaggccggcgcctggttcgcgcgcaaagagtatctccaggcggcgaaaggctatcggcgggcggcgggcgaagcgcaaaccattccacacccggtatttgccgtagaaggctggcggatgtccggtttttgtctcaacctcgccgggcaccgggcaaaagcgatggaggagtatgcccacgccatccaggcggcggagccgatcccacggcaagagcgcgctcagaccacgctgccgctggcattccaggatctgctgcgcatccatgataaacgacggaccgaggtgcttgaggcctgcgcgacacgctggcaaagcgaaaaacagcgcttaatccaacaggcggaagaccgcttgccgcggcaacccgccgtcgaacaggtaaaacgcgtggaccggcagttacagctacagctggaagccgcgttcgcgctgatccgcgaagcgcgggaaaaactgatccgcggcggcgatgacagctttcgccgcgtgatccgcctggcgcgggagaagctgcatccgcactggaacggcctgccggagatcgcccacccctttgatgccccgccgggtgaatggcaaagcctgcctgcctggggaaataccgatgcatcatccactgaaaatgcagggagcaacccgctatga

SEQ ID NO: 88521 - DNA, 2217 bp, Enterobacter aerogenes
atggttaatcggatatcgatcctgtcatctgtcgacagctcctcgttattattctggaaattcagcgggcaggagaaactgtccgaacctttccactttcaggtcgatttactcagccaggattttgctatcgaccgtcaggccatgctcggcaaaaacatgacggtggcggttcccggccaatggggacaggagcgttatctttccggcaaaatcaccgccgttaccgtacgcgccgaagatcttggcgagacgcgctacgccgtctatcagaccacgctggaacccgatttctggccgatgatgcgcgaccgcaacttccgtattttccagcagcagcgggtgccggatatcgtggccaaactgtttagcgagcataacgttaagtttgaggacaaacttacgcgtagctaccggcagtgggattattgtgtacagtacgcggaaagcagcttccatttcatcagccgtttgctggagctggaaggtattagctatctgttccgccacgataaagacggccataccctggtgctgatggatgactatcagcagactgaatccttccccggttatgaaactattccctggcatgcgcaaccgggcggcggcgcggtcggcgaagagggcatcagccagctgatggcgagccacgtcgtcacgccggggctttacagcaccgatgactatgattttcgcaagccccacgcctggatgctgcaaacgctgcagaatccggtctcgccgacaccgggcaaaatcgacgtttacgactggccggggcgctttatggagcacggcgacggcgaagcctacgcccgtattcgtcagcagtcctggcaggccgaacagcagcaaacgcagggtatcgccaccgcgaccggtatcgtcccgggacacacgtttaccctgacgcatgcgcctaacatggctgataacgctaaatggctggtggtgggcgcccgctatgattttgaagagaatcagtatgcctccggtggcggaaataccgcgcagcaccgcatcgcattcaccgttattcccgccgcgacgccatttgtccctgcgtcaaggaccgactggccgcgcacctacgggccgcaaaccgcccgcgtggtagggccgaaaggagaatcgatctggaccgataaatatggccggattaaggtgaaattccactgggaccgcgaaagccagggcgatgaaaatagctcctgttgggtgcgcgtttccagcgcctgggccggccagggttacggcggggtgcagatcccacgcgtcggtgatgaagtggtggtggactttattaacggtgagccggaccggccgattgtcattggccgcgtctataacgaagccagtatgccgccgtgggcgctaccggcggcagccacgcagatgggttttatgagccgttcaaaggatggttcgccggacaacgccaacgccctgcgttttgaagataaacccggcgaagagcagctctggctgcacgccgagcgcaacatggatactgaagtcgaaaacgacgagacccatgatgtcggcaataaccgcaccaaaaccgtcggcaaagacgaaaccagccatatcaaacagaaccgcacccgcacggtggatggcaatgaaagcgttaccgtcggcaaagatcgcagcaaaaccatcaatggtaatgaaaccaccaccgttgagcagaaccgtaccgaaagcgtgaaggggaatgagaccctaagcgttgagcagaaccgcgatgaaaccatcagcggcaaccataccaccacggtgaaaagcgaccataccgcgaccgtcgaaggcaagcagtcactgacggtcgtacaggatcgcacccgtcaggtgcagggtaacgaaagcgtcagcgtccagcagaaccgtaacgtgcaggtcaccggcaaccagacgctaggagtgaccggcaatcacgatatttccgtgaccggtaagcaaacgcagaccatcaccagtaagcaagaggtgacgatcggcgccgggcgtaccctgagcatcaccggcggtgatacccgctttacgcaagggagcgtaaccgacagcgctaccgataccgtacatatcaacgtgggcgaaagcggcattctgataagcaacggcagcgtggagattaccgctggcgggtcgacgatcaccattaacgccgccggcgtgatggtgaatggtaagaagattgagctcaatgcctga

SEQ ID NO: 88522 - DNA, 420 bp, Enterobacter aerogenes
atgcagtttttcacactaaccgaactacgccagatcgtggcactccccctgttcagagatcttgttccctgcggttttcctagccccgcgcaggattatgttgaacggcgtatcgacctgaatgaactgctgattcagcatcctggcgccacctactttgtgaaatcaagcggtgactcaatgattggcgctggcattggcgatggtgatttactggtggtggatagctcccgcaaggccgtccatggcagcatcgttattgccgcagtggatggagaattcacggttaagcgcctccagttacatcctgttgtcatgctcaaacctgataatcccgcctaccagccgattatgccaggcagtgaagagtgtctggaaatttttggcgtggtgacctacatcgtgaaatcggcgggctga

SEQ ID NO: 88523 - DNA, 1320 bp, Enterobacter aerogenes
gtgtctggaaatttttggcgtggtgacctacatcgtgaaatcggcgggctgatcgtgtttgccctgtgtgatgtgaactcgttctatgcttcctgtgaaaccgtctttcgcccggacttacgcggccgcccggtggttgttttgtccaataatgacgggtgtgtgatttcacgttctgcggaagccaaaccgtttgtgaaaatgggtgaaccgtactttaaacaaaaagatatcttcagacatcatggcgtggtttgcttcagtagcaactatgaactctacgccgatatgtccaaccgggtaatgacgacgcttgaagagatgtcgcctcgctgtgaaaaatactccattgatgaagttttttgcgatcttaccggcgtgcgtaactgccgcgttcttaccgaatttggacatgagctcagagccacggtgcggcaacgcacacacctgacggtgggcgtcggaatagcccagacaaaaacgctggctaaactggcgaatcatgcggcaaaacgctggcaacagcagacaggaggcgtggttgacctgtcgaatgcggagcggcaaagaaaattgatggcggcgctaccggtggaagaggtttggggagtgggtcgacgcatagcgaagaggcttgaaacgatggggatccggacggtattgcagctggctgacacggatatccgcttcatcaggaaacactttaatgtcgtactggaaagaaccgtccgtgaattacgcggcgagccctgtctcgagctggaagagtttgccccggtaaagcaagagattatctgttcccgttcgttcggccatcgcatcaccgagtacgaagaaatgcgccaggccatctgtagttacgcttcccgggctgcagagaaacttcgtcaggaacatcaatactgccggtttatctccgtctttgtaaaaacgtcgcccttcgcgcctgacgaacggtattacgccaataatgcctcggtcaccctgcttaccccaacgcaggacagcagagatattatcgccgccgcgacgcgttgtctggatgccatctggcaaagtggctgtcggtaccagaaagccggggtgatgctgggcgatttttatagccagggcgtcgcgcaacttaatctgtttgacgaaaatgcgccgcgaaaaaatagccaaaaactgatggaggtactggaccgcctgaatgctgaggacggacgtggaacgctttacttcgccggccagggtatccagcaaccgtggcagatgaagcgggaaatgctctccccgcgatacactacccgatatagcgatctgcccacggttaaatga

SEQ ID NO: 88524 - DNA, 540 bp, Enterobacter aerogenes
gtgttgcatatcacttcgcttaaactatccgcactgattcttctgccgttcatgctggcgggttgtgggctaacacagaaaatcagcgacggcgcttcgtccgccgtaaagtcagtattttatcgccaggtgaaaacgctgcgtctggattttagcgcgcgcaatgcgttaaacaccgataaccgcgaggataacagcgcctcccagccggtgatggtgcgggtctatgtgctgaaggatcgcaagactttcgataagacggtttaccagcaactggcggcggaaggagaggacatattaaaagacgaccaactggccagtcgcagcctggtgctcaaaccgggaacggcgatgagtctcaccatgccgctggatgaacaggcgcagtatgttgccgtggtggcgctgttccgggcgccggatctgacgaaaaacgactggaagctggtgcttgcccgtgtggatcttgacccggaccgcgcgcgcgtcattgaggccagccatcatcaacttgttctgcaaccgcggaaggagaagtga

SEQ ID NO: 88525 - DNA, 1086 bp, Enterobacter aerogenes
atggcaggagaaccacaaacgccgcattcccggctgagcccgcggctggagcgggatattcagcgcataaacttttaccgtttctgccagttactggaaaaatcgcgacctggcgcgccggcattaggcagcacgctaaacccggcggatgatccggtacgctttcgcccgcatccggggatgggttttccggtcagcgaactcaaagcggtggagtatgatgaggcgcatcccgacgcgccgccgacgctgcgcaccaccttcatggggctatacggtgtcgattcgccgttgcccaccgcctggctggatgatattgcgcagcaaagagaagggcatgaggcgcaggaagcatttctcgatatttttaaccaccgcattctgagccagttttatcgcatctggcgcaaatactcgtatccggcaacctttgaagacggcggtcgcgaccgtacttcacagagcctgctggggctgatcgggctgggcattcccggcaccgctcagcatattgccgcgccggtatctcgctttctggcattactcagcgtgatgcgcctgcccgcgcgtaccgaagaggggattcaggcgctggtacgattgttggcgccccatacgcgggcggaagcgtcgccgcactgcccacggacggtgtacccggcgcagccgctgggtttttacggcgataacgatttcctgcttgatggctacacggtgctgggcgatgaaacgaccgagattgccagccagttgctgatcgcgctgtacaccgatgatatcgccgaggccgcaggctggatgccggaggggcaaatctatgcggactttctggttctgctgcgggtttatctcggctggcgctataaggccaaaatcaccttaacgcttcccacgccgctgttacccgcgccggtacttggcgaaacgccgtttatgctcggcataagcggcgttctgggcatggagggggacgcggttccgccggatttaccggccacgtttaccacggaactgggcggctaccgcggcatgccgcttgcatcattatcacaaggaaaccaacgtgttgcatatcacttcgcttaa

SEQ ID NO: 88526 - DNA, 1761 bp, Enterobacter aerogenes
atggacgatttaactctgcgttattttgacgctgaaatgcgctatctgcgtgaggctggcgaggagtttgcccgcgcccatcccgatcgcgccgcggcgttaaacctcgataaagccggcgcccgtgatccctatgttgagcgcctgttcgaaggctttgctttcctgatggggcggctgcgcgaaaagctcgacgacgacctgccggagctgaccggcgggctggtgagtatgatctggccgcattatctccgtaccattccgtcgctggcgatggtggagttcagcgtcgactggcgggagatgaaagagccgcagcggctgaagaagggaacggaagtgatctcccggcccatcggcgagacgggcacccgctgccgttacaccacgacccagccgctaaccttacagccgctcgcgctctcccgcgccagcgtcagggcgcaggccgacggccgccaggcgatttgtctgcgttttgactgtagcgcgctggtggactggcgggcgctcgacctgagccgtattccgttgtatctgaatgccgatgcgccattggcctgcgcgctgcatgaagcgctgaccctgaatgtggcgcacatcggcatacgtctggcgggggaggccgatagcaggccgctggcggcccattttgccgtttgcggttttggccatgatgatgcgctgctgccccaaagcggcgggttcagcggctaccagttgctgctggagtatttcagctttcgtgaaaagtttatgtcggtcgcgctgtgcgggctggagaatatgacgtttcctgatgcgccgggatggtttgagatcgaggtcgtgctggataaaccgtggccgcaggagtatgcgttgtcagagaaacatctgcgcttacactgcaccccggttattaacctgtttccgctggagtcggacccgctgcatctggattcactacaaagtgagtatctgctgcgccccatgcgcgtccaggatggacacaccgaaatctattcggtggagtccgtcacctcttcacgtctttccggcacccaagtgtatgtgccgtttaccagttttcgccacaaaggcggcatgttgcgccatgatgcgccggaatattattaccacacgcgcgttaaacgtggcccgtccgggctgcatgatacctggctgacgctgggcggcgaggcgtttgaccagcatcgcgtgccgcagaatgaaaccctgtcattgagcctgatcggcaccaacggccagttgccgcggcgggcgctgcaaagcacgctgctggacacggtggtcaaatccacaacgtcgcgactccaggtgtgcaatctcagcgcgccgacgttgccgtgttatccaccggatcgcgaccgttttcactggcgggtgctgagccatctcggtagcagcttcctgtggatgatggataacgccgaggtgttgcgcggcgcgctggcgttgtacgactggacggacaacgaaatgaaccgccgtcgcctgcaggcgatcgtcgacgtgagccactgtgaggtggaacgttttgccgaggggcactttctacgcggcgtgcagatagaggtgacgctcgacggtaacggcttcgccgggcacggcgacatctgcctgtttggcgagatgctcaaccgcttctttgccctgtataccgacatccatctgtttaatcgtctgattctgatactgcaacctaccggagagcgtctcgaatggcaggagaaccacaaacgccgcattcccggctga

SEQ ID NO: 88527 - DNA, 987 bp, Enterobacter aerogenes
atgtctattttaagttacctttggctccagcaggtggcaaacgcccccgacccgcaggcgatgatgcagcagctggcgcagaccgtgttccagggtaaaagcgtcgacctgaccgacacccaggagtacggcagcctggtggcggccagcctcggcgaagagtggagcggtttcggccagaccatgttcgtccagccgctgacgcaggcctgggaaacggtgctgcagccatcggctgccagcctgaacgaggcgtggcagcgttctgtggtcgctaactggcattcggctttcgacggccgctatccgtttgccgcgggcaaaaacgatgtctcgctaccgatgctggcggcattcatccgtcgcgatagcgggcgaatcgaccagtttcttgcccgacagttgggcggcgtgctcaaccgggagggtagccgctgggtggccgatagcgcgcacagtcaggggctgactttcaatccggccttcctgaaggcgattaatcaactgagttccttgtccgacatcctgtttaccgacggcagtcagggaatggggtttgaactacagggggtggcgacgccggggatcgttgaaacgcaactcaccctcgacggccagaatctgcactactttaaccagcttgccgaatggaaaagtttccgctggccggggactatcaacaaacccggcgcgatgctgagctggagctcagtggcggcgggcgcccggctattggcgaacgacagcggcccgtggggcacgctgcgtatgctggagagaatgaagcgccagcagatcggcgatgggctgtttcgtctgacggtcaatacgccggataaccggcaactgcagtggctgctgcgtaccgaactcggcgatggcccgctggcgttgctgaaactgcgaaacttcacgttgccgacacagattttcatcgtggaggcctcccgtgcggaaccgtttgctgacggtgacgtagaggaataa

SEQ ID NO: 88528 - DNA, 792 bp, Enterobacter aerogenes
atgacaaccattattcgcaataaagacgtaatcatcgctaaccctcaacttaaaccgatttataccccgttcgtggctgagccaggcttgttggctgcatggcggtttggtgatggtatggatgacctgagcggcaatgccaataccctgacggcgattggctccccgacaaaaggggagtattttatcagcggtgacaaagataacggctttattacctccgtacctgacggactgcagcgtacgttaatcgccgtatggcgaaatcattcaactaccgacgcatacgcctacccggtaggaaatctgtcgcagcagtcggctgcatcaggtgtcggcattggtctgaaaagtaacagtagttcttcggctaacctggctcgctacagtggcaatgctggtggggtaacctactcaggaaatctgtacgccgttgcagatggaccggctgacagctacgcgaacagaacgaatttccgctgggctgcgttttctgttgatggggctggcaacgttgccaacttatatctgccaaagcttaatgcatctcttatcccggcaacaattgctgctggcgctaatctggccactcgcgatattacggaagcgggggtaagtagcctgtatcggttgattgctttccgttccccaacgaacccgccaaatctaccgggaactgatatcgatgtagctgaggtacttgtttttgacaatgctcttaaccttgctgcattgcaaaggacttatgctcgttcacaggcatacctggcttcgttcgggcaagctatttag

SEQ ID NO: 88529 - DNA, 408 bp, Enterobacter aerogenes
atgcactggctggataaaatcggcgaaacacggcagggaaacattatcaatcttcagttcaatgtccctcatccaccccttgtaattgataccacctgggttaccgaagcagaaaattacggtttctacatccgggatatgacgactcagaattttgatgttgtggatatcatttctgcggttgaaatagcgggaccggatcgcgtcaggattatctgtagccgggcccctacagttaatgaacaggtgacgtatggttggggaaaagccggggatcctttaacgaccgggagaactaccggcccacgcggaaaccttcgtgatagtgaaggtgatttgcctggcgaaagctacaccgatacatccgggacgttgagaaagctccataactggtgcgtaattttttaa

SEQ ID NO: 88530 - DNA, 1083 bp, Enterobacter aerogenes
atggaaaagcgttcactgaataaaaatattgatttactactgcgcggatttactgaattaaaagataacgggcggtttaatgaacccaatcttgacggtagcgccggagattatatttcattttccagttgggaatggccgcagggcgtagggctatttggtctggtacgtttatgggaaaatacgaagtctgatgagctatatcaaattatcgaccagtggtttcagggaaatatcgaaaaaggtctaccaggcctcaacgtcaataccaccgcgccgatgcttcccctttcgcttttctggtcccataaccgccaaccgcactaccagcaggtgctggatcgctgggcaaatcgcgtgatgacggaactaccgcgcacgccggaacaaggctttcagcatgtggtttccgacggtattaacgacatggagatctgggacgatacgctgtttatggtagtactgtttctcgcgcactacggcacggtatccgggcgccaggagctggtagatgaagccgttcggcagttcctgctgcatgcgcgctatctcaacgatccgcaaaccgggctgtggtaccacggctggagctttgtcgagaacagcaacttcgctaaagcccgctgggcgcgcggtaatgcgtggattaccgtcggtatactcgaattactggaactagccgacgtaggcgcgggcgttcgggagtacctgatagagtgcctgaaaaagcaggttaatacgttaatcgacctgcaggccgctaatggcgcctggcacaccctgctcgaccatcctgactcttacatcgaaatttccgcgactgccggttttggctatggcttattaaaaggcgcgcgtcttggcattggcgatgaacgatggctacaggcgggtatgaaagcgctggagattgttcaggataatattgatgccgaaggaacggtacacaatgtttcttatggcacgcgaatggggcgcaccctgcaattttataaagatattccattacaacctaccggctatggacaggcattagcaatattatgcctgagcgaaggtttgcgcctcgctgataaaaaataa

SEQ ID NO: 88531 - DNA, 2484 bp, Enterobacter aerogenes
atggctatcgaatatagtatttttaatttaacggcgggtaacgccgtgcgctactggcagctatccgatattaccagtttacgctatgacacgacggacacgccgatggctggcgaaatggacccgtttttctttttaagtaaacataaaaacttcattcctcatacctacccgtgccgcgacgattttcgccagcactttgctgaaaaaaaaccgcagcctttcgccagcgcaaactactctcgctggtggttcccttttgcttccgacagagtcgatctctccggcttttggtttcgcccaacccgcgtcggcgcctgggccagaacgcttctcgattgcccacaggctggcgagtatcgttttcgcctcgccacctgcggaggcgcgctgctgaagctgaacggcgaagaagtactctggatggcggattatcagcgcaacctggaaaaccagcgtgaattcagcctgtcgctacaggcggggaaaaacgagctggagctgtggtttgatgacttagccgaacgcgatattcgcttctttttccagttcgactacctcgccggtgagccgctgcgtattgcgttggcaacgccgctcaccgacgcgcaggtcaaagaaatggagcagttactggacggcgtctcctttgaacatccggtatataaccgcggcaccattcgcctcgtctttcctcaacccgcgtcgacggactacagcctgcacgtcaacgtgctgggggattttatctcgctggatgaaccggtcacgctcgatagccgactctccgccggcgagtcgctggtcgccattgctgaaagcgaagctattccggcggacttccgcaatttcaacatcacgctgcagcgtgaagggttcaagataagccgcacgctgggcgtcgaaatctgccacgccgaccgccagacggcgatcccggcaacgctggaagcacggattgtggaagcgctggaggtggtcgctcatgaaggtgaatacagcagcgtcaaagcgctggcgcgcctggcctgcggcctgaacgatgagcaaacccagcagatgctggatggggtcctgccatcggtgctcgactgtcacgattgcgccgactttacgcttgtgccgctgctgtggtgccgcacggtatggggcgacaagatcgacccagaggttcgcggccgcatcgatgacgccatactgcgttttcgctactggatggacgaacccggcaacgatgtacagtggtatttctctgagaaccacgccctgttattccacaccgcggcgctgctggcgggcaacctcttcccggacgcgactttcacccgctccgggcgcagcgggcgcgagcaggcggcagcgggtaaagcgcgggtcatcagttggctggaccatttcgagcagtgtgaaatggccgaatggaactcagctccctacttccctattgatttaaagggtctcaccgcactggcggcgctgtccggcgacgcgcaaataagccagcgcgccatcacggcaatcacgcgtttactggcgcagattgcccgctccgcccaccagggttttctgaccgcctcgcagggacgttcttacgaacacaccctacgcgccggacgctctctggaactggcggcgatttcgcgtctgctgtggggcaaaggtaactatggctgtcgtttccatgcgctaccgcaattagccctgctgctgcgtgatggcctgctcacccttccggcggaactagcagaagttgccgcctggcaaaaagagagcgccatcgagtggtgttttgcccagggcgctaaccggatcgccaaactctatcactacaaaaaccgccatgcggcgatggggtccatcgccggctatcgctggggagaatggggctatcaggagacgccgttccatttacgtcttggcaaccaacccgaagcgcagatctggataaaccatccaggcgagaccctgcacggcgggttcggtcgcccctcttactggggcgggtgcggcacgctgccgcgcgtgcagcaatatcgcgggctggcggtgctgactttcaatctgcacgccgatcagcctgactttactcacgcctggctgccgcaaagccagtttgatgaggtcgttattagcggccagcgcgcggcggtacgcagcggtgacggtatggcgctgctggtgggtaatcagccatttgaaacggtgaatacggggccaacccgcggctgcgaaattcgccttaacgggcaacaaacccgctggctggttcgcatcaacgatcgggtcgatagctccctggaatccttcagcgcatgtttcagcggcctgaccctcatccagcacgacgacggcagtatcgaagtgaacgacccgctgtacggaacggtgcgcttcctggccgatggacgagtgagcgccgaaaaccgcacgctggacccacagcaatggagcgtcgtgggcagcagccgtgaacttcctctgtaa

SEQ ID NO: 88532 - DNA, 1347 bp, Enterobacter aerogenes
atggatacgcaaatcgacaaacaggctgtgccctccgggcaggccgctgatgatgttaatccgaatacgctgcacaatcccgctcgcgaaatggctaaaccgaaaagcaactatcgctgggtcatctgctccatgctggtgtttgccacaacggtcaactatatggatcgacagatcctcggtctgctggcgccgatgctgcaaaaagatatcggctggacgcaaatggaatatagctggctggtcaatgcgtttaccgtcgcgtatggcgtcggcacgctggtatgcgggcgaattattgacaaactgggaaccaaaatcagctatgcggcggcgatggtcgtctggagcgtcgcggcgatggcgcatgccgtcgtcgggtcggtagcgggattcgcgctggttcgcgtcctgcttgggctaggtgaatccgctaacttcccggcggcgatgaaggtgattgccgaatggcatcctaaaaagaaacgcacgctggcgaccggcattcttggcgtcgcggtcaatatcggcgtggttatctcgcctgcgctgattccgcttatcgcagtgcattacggctggcacggcgcgtttttaattctcggcgccattggtttactgtggctgattccctggttcatcgcctttggcccggtgaaagcgaaagccagcgccgaagagcaggcgtggattgctcaggataaagaagaagccgtcagcgtttcggccattaaatggacgcatctgctgggctatcgccaactgtgggccgtggcattaggcaaaatgttgaccgacccaatctggtggttcttcctcttctggctaccgaagtggctcaacgaatcccgcggtatcaacatggaaggtctgggtctgccgctgatcgttatttatctcttcgccattgtcggcagcctcggcgcaggctggttaccaggcaaactcatgagtaaaggatttagcaccgccagcgcacgtaaactcacgatgctgatctgcgcctgcctggtcctgccgattttcgccgccacccaggtcgaaaatctgtgggccgccgtcgcgctggtcgggttagctgcggcggcgcaccaggggtggtctgccaacattctgacctcggtatccgatctgttcccgagcgcagccgtcggttcggtcgtggggattggcagtaccttcgggatgatcggcagcgtgatcttctctacggtgattggcgccgtgcttgaagcctctggtaactattgggcgctgttcgccatcagctcggtggcttatctgctggcatgggcgattatgtatctcctgttagtgccgaagatggagcgggctaaattcgactaa

SEQ ID NO: 88533 - DNA, 1041 bp, Enterobacter aerogenes
atgagtaaatcagataatcagacagagcgcgatgcaggctatcgccgcgtgcggctggaggatatcgctacccgttgtcgaacctcgctcagtaccgtgtcgcgggcgctatcgggcgaaaaaggggtcagccacgaactgcgcacgcgtattcaggaagtggcgcgggccatgcgatatacgccggctcaggagctgggcggcgcgcgaattgtgctggctatttcacaagtggcgatgctggattacaaccgctaccagtttagctggtacgtcctgcaagggttaaaagagcgagcgaaggtgctgggcgttgatctcattactcatcagctcagtgataatgacaacggtgctctgcaggcgctgctggaagaagcggacgtaggtggcgtactggcgctgacggtagatgacagcggctttctgaatacggtggcgaacctgaaaaaaccggcggtgttggtgaatactgacgatccgttaatgcgcttgtccagcgtgctgccctgcaaccgttcggccacgcgcatggcctgtgaatatttgctcgagcgcggccaccgcgacattctttttttaacccaccctggcaggcgaaccattgaacagcgtgaggatggctggcgggaagcgatgcgcgctcgccagctgttgtgcgacgattcgcggatcctgacggtaaccgactggctaccggagctggcggagcaggcggtgatcgcgcgtttccgtgataatccgcgcgagtgtacggcgatactgtgcgccaatgattcgctggcgatcggcgcgatcaacggcgtgcgggccttaggactgcgcgtgccggaagatatctcggtggtgggtatgaataacctgccgcaggcggagtttgctacaccgccgttaactaccgttcaccttccggtgcacgaaatcggcacgctggcgctggagctgctgcaggatatgattgcgggtagtgtcgaaattccaaggcgggttgagctggcgtgcgccatcgtcgaacgtcaatcggtggcccgtatcgcctga

SEQ ID NO: 88534 - DNA, 297 bp, Enterobacter aerogenes
atggaacatttactcagacattgtgaacaggttgccgttggcccctatagccgcgatgcccgggcgctggcgcatgaagtgatcgataccatttcggcgggcgtaccgccggagcaactgattctcccctggatgtcggttaaagaggcgctgcccgacgccaatagcgggcgctacgtgtgcgcttatacacccgcgaaatctcaggaccgccgctatcagctggtctccgctgccatgttccgcaccgtttgtcgggacgccacccactggttttatatgtgggaagcactgtga

SEQ ID NO: 88535 - DNA, 369 bp, Enterobacter aerogenes
gtgttcaatggtgcagtgcgctctgacgtaaacaatttcgttaatatagaaaagggaaggcgcggtagaaagagtcagccgtttatctctttctccaaaaatggggggcatgtcaggatcgcggctttcattgctcgtcacggagaacatgttgatattcaaatagattattccaccagaaccatccgggttaagaaggtggaacatcacggcgtgcgtattaacgtcggcggcgtctttactcgtaaggtactggtgaagcagtttctgtttggcgagaagaagaccatccgcgtcgatctcacccaacaggacgatggctggttttatggcgacttgccggtagagttcacggccaattgcgcatag

SEQ ID NO: 88536 - DNA, 693 bp, Enterobacter aerogenes
atgaaaacgacttattccgatgttattgatcaatataaccatgttgtcgccagcgatcttgagttgattcaaccgctgatctcggcaaatcagccacgaatcatcaaagataacggtgtgtttaaaatagaacccggcgaagtggttattgttgttgaaggcattattgcgatagaagtggaatacaatgtgggttttggctccgcgggtaaacgcggtgtcctgagcaaaacgcgagatatgctgcaggtcggcaaagggatccgcggtatgattttaggtattattgaaaactatggcccggcgctatcgctaaaatatacggcaaagaaaaatgtcaaaatagtgacctgcagtaaagaagcctttgaacactattttattcaacgcgatcggtttgcttatctgatggaaatcatggcatttcagctatcgttgattattgatgcgcatcacgaaaagaatttaccttcacgctacgatacgattaagtcaatgatttatcggtacaaaaaacagcaggatgcaggagtattgcatgatagaagcctggctagctttattctgaaaagaactaaaatgtcacgcagctatctttttaaaattttagcggagttaaaagaggggggatatatcaaaatggagaacggtgaactgatcgatattgcgcacgaactgccggagaaattttaa

SEQ ID NO: 88537 - DNA, 1569 bp, Enterobacter aerogenes
atgtttaaaaacattccctttaagagaacaatgttagccagtatgctgacattagcctccggcgcggtgaccgttgctcacgcagccgacgccgcagcgccgaagcaggatgctaaaaagcctaacatcgtagttatttttggcgatgatatcggctacctgaacctgagcacctacaatcagggtctgatgggctaccagacgccaaacatcgacagcatcgccgcccagggcgcgaagtttacctcctactacgccgagcagagctccaccgcgggtcgttccgccttcattaccggccagatgccgttccgtaccgggatgagtaaagtcgggatgccgggagcgccgcagggtctgcagaaagaagatccgaccatcgccaacgtcctcaaacaactgggttacgccaccggccagttcggaaaaaaccacctgggcgaccgtgatgaattcctgcctaccgcgcatggtttcgatgagttccttggcaacctgtatcacctgaatgctgaagaagagccggaaaacccggattacccgaaagatccgaacttccgtaaacagtttggcccgcgcggcgtgatcaagagtaccgctgacggcaagattgaagataccggtccgctgaccgtgaagcgtatgggcaccgtggatgaagaaaccctggccgccaacaacgactttatggcgcgccaggtgaaagccggtaaaccattctttacctggttcaacaccacccgtatgcacaataaaacccacctcaaagacgacagcgttggcgtcaccgggctgggaacctatgccgatggcatggttgagcacgataaaatcgtcggccaggtgctgcagaaaattaaagatctcggcatcgaagataacaccatcgttatctacaccaccgataacggcccgatgaccgccacctggccagacgcaggcgaaaccccgttccgcggtgagaaaaacaccggctgggaaggcggcttccgcgtaccggcgatgatcaaatggccgggccacatcaaaccgggcaccgtggtgaacgatatgttcgccagctacgactggttcccgacgctggttgccgctgccggcgacagcaacatcaagcaagagatgctgaaaggttataaaacgccgtccatcacctacaaggttcaccttgatggctataaccagctcgacttcctgcagggcaaagggaaagaccagcgtaacgaattcttctactggagcgatgacggcgatctgctggcgatgcgtcagggccgctggaagatccactttatgatccaggaacacactggtctcgatctgtggcgctatccgttcaccaaactgcgtaccccgctgatcttcgatctgaaagtcgatccgctggagaaaggttccgacggcatgggctacgacacctggttctacgatcgtctgttcctgctgggcggcgcgcagaagtcggcaaaagatatgctggcgacgtttaaagaattcccgccgcgtcagaagccgggctccttcaccgtctccgatgtcagcgcgatgcttgaccagggcgcgcacaaataa

SEQ ID NO: 88538 - DNA, 1296 bp, Enterobacter aerogenes
atgaaacacagcaccaccgtgcctgttaacgcattaccttcggcagaaaagtacgcgggtaacggccccgcctaccaacgtcgctttcatgtgatggcgaaacccaccggctccgcctgtaatctcgattgtagctactgcttttacctgcacaaagaacacttactccagcaggaaaagcgcagctatatgagcgatgaaacgctggaaaactttatccgccagtacatcgatggacaggatggcgaacaggtggtcttctcctggcagggcggcgaaccgaccctgatgggactggagtttttccacaaagtggtgaaattccagcagcaatataaaaagcccggccagcggatcgaaaacgatctgcaaaccaacggtatcctgattaacgatgcctgggctgaattcctcaaagcgaatcatttccttgtcggcctgtcgattgacggcccgcgagagctgcacgaccgttatcgcatcacccgcagcggcaaaccgacgtttgataaagtgatggccggcgtcgacgccctgaagcgccacggcgtaccattcaatgcgctggtgaccgtcaaccgtaccaacgcccgtttcccattagaggtttaccgctttgttacccgcgaactgggggcgacctacgtgcagtttaacccctgcgtcgaaccggtggactttacccagaccgcgccccatttctggcgtgatgacagcatccctaccgtcggcagccgccgcgcgcgccccggcgatttagactccatcgtcaccgactggtcggtcgacccggacgactggggacgcttcctgatcgccactttcgaagagtgggtgaacaacgatcttggccgcgtccaggtcaatctgttcgaaaccgccgtcgcccagatgatgggcatgccggcgcaaatttgcaccaccgcggagttttgcggcaaagggctcgcggtcgagaaaaacggcgatgttttctcctgcgaccactatgtctatcccgaatatcaaatcggcaatattaccgataacagcctggcgcgaatggctttctccgaacgtcagcaggctttcggtatgggtaaatgcgacacgctgccgcagcagtgcaagcagtgcccttacctgaagctttgccacggcgagtgcccgaaaaaccgtctggtgctcaccgccgacggcgaagccgggctgaactatctctgcccgggcattaaagcctttttcaactatgccgagccgattctggcgggcatcgtcaccctggtgaaacgcgattttaaaggagttagccgatga

SEQ ID NO: 88539 - DNA, 999 bp, Enterobacter aerogenes
atgaaccttcgcgataaaatgttacagctggagcagcgcatgaacgcgcaggtgctcggccaggaaaacgttgtgcggatgctgctcattgccctgctctgcgatgggcatatcctgctcgaagggctgccggggctggcgaagacccgcgccgtccgcgagctggcgcgacatatcgccggcgagtttcgccgtatccagttcactccggatctgctgccctcggatatcaccggcagcgagatttatcagcaaaatgccagccgcgaagaggagcagtttcgttttcgcccgggaccggtattcggcaacgtgattctggcggacgaaatcaaccgcgcctcggcccgcgtgcagtcggcgctgctggaggcgatggaagagcgccacgtcaccgtggcgggcaaaagctggccgctgccgggcgtgtttatggtgctggcgacgcagaaccccgtcgaccaggaaggcacctggccgctaccggaagcccagctcgaccgctttctgatgaaagtacaggtcgactatccatcaaaagagcatgagcagcaggtgatgcagctggttcgcgccgagcaacaggcgaaatatggcgtagcggcaaaaaccgcccccgcgccggaagcggaatcactgcggttcagccaacaggagatcgcctcctgctggcaggagataagcgccatccacgtcgcgccgattatcgaaacctggatagtcgaactggtcaacgccacccgccagccgcagcacatcagcgagcagttagccagctatctggcttacggcctgagcccgcgaggcaccttagcgctggagcgctgcgcccgcgcgcaggcctggctcgcgggacgtgacgcggttcgcccggaagacgtgcgttttatcgccccggcggtgatgcgccaccgcttgatgctgagctatcaggccagcgccgatggttgcagcgccgacgatgtgattaccatgctgctgaacgccgtggtgatctaa

SEQ ID NO: 88540 - DNA, 903 bp, Enterobacter aerogenes
atgaacgaactctgcgtgaatcgccagatgctgctcgacctcgggccgcaggcgcggttgatggctaacccgccggggcagatcccgccgggcgcgctgtccggcgaacgcgcctcccgccagcagggccgtgggctcaacttcgacagcctgcgtcgttatcaacccggcgacgacgtacgcatgatcgactggcagacgaccgcccgtctgcgtacgccgtgggtgcgccagtacaatgaagagcgcgaacgcccggtctttttgctggtcgaccaacgattagatatgcatttcgccacccgcgggcaaactaaagcgagcgccgcggccaaaaccgccgcgctactggcctggcgtagccatcatgatggcgatcgtctcggcagcctggtgtttaacgataccacgctggcgctgcaaccatgcagcgcgccacggcgcacgctgccagcgctgctggataatctgacgcattacaaccagctactggcgcagcaatatcctctcgagccggagcgtacgcagacgctttcgcaggcgctacagcgcgcggtcagcacgattccgcgcggcgcctgggttgcgatcctcagcgattttcacgatctcgacgcccaagcgaaggccatgctggcgcatctgcgccgtcgctgcgaggtcagcgcatttgtgctgttcgacgacttacaccttcgcctgccgcgctccggcacgctggccgcctgctacggcgggcgcagcgccagcgtcaccctcacctccgcgctcagcgccgatattcgtcaacacatcatcggtcggctggcgcgtcagcagcagcaactcaaccagttgggtattcgggttaatcatctgacggtaactcaggacctgctgcgccagttacaaaaagggctttaa

SEQ ID NO: 88541 - DNA, 441 bp, Enterobacter aerogenes
atgtttgagaaaggctatgcggtgccggagctactaacgcccgcgctgccccccgcccccagctggtttccgctaccaatcggctggctgattctgctcgcgattgccgtaggcctggcggcgctgttcctgcttatccgctacgcccgctggcggcgcaaccgctggcgacgagaagcgctgctggcgctcaatcatccgcataccgtcgatagctggatgcagctgattaaacgcgtgcagctggtccaccagccgcgccaaaccgttagccaaacgctggcgccggaagccgtgctggtgtcgttgacgctggatgctgacctgcgcaaccagctcatcgcccgctactgccgggccgacaacgccctgaacgaccagcagacggcgcggcttcgcgctcagctggcgcagtggctaaaggagcttccacatgtctga

SEQ ID NO: 88542 - DNA, 978 bp, Enterobacter aerogenes
atgtctgaatggctcgcccacattgatttcgcctggccctgggccgcgctactgctggcactgccgctgctcactcgttttctcccgctaccggcaaaaaccaccgacgagcgcgtgcgggtaccgtttttaccctcactcattgacgcgctacagctcgatacccggccaaaacgcggaaatggggccagcgccgtgctgttctggcttatctggtcactgctggtttgcgcgctggcgcggccggaatacctgacgccaccacaatatattaccaggccgatgcgcgacatcgtgctgatcctcgatgtctccgggtcaatggcgaaaaatgacgtccagggcggtaatacgcgcctgcaggcggtacagcaatcggtgcgcaagtttgtcgccgcccgccaatccgaccgcatcggcatggtcatcttcgccagcaaagcctggcccttcgccccgataagcgaagataaacaggcgctgcaaacgcgcatcaatcagctggcgccgggcatgattggccagcaaaccgctatcggcgatgcgctgggcgtggcggttaaggtgctggataatggccccgataagcaggccgataagctggcgattttactcaccgacggcaatgataccgcttcgcagctgtcgcctgaactggcggcaaagcttgctgccgaccaccatgtccgggttcataccatcgccttcggcgacctcagcgataccagcaaagacaaagtcgatttgccgctactgcagcgcatcgcgaaaaccaccggcggccagagctggaccgccgcgcattccggcagcgcgctggatagcgtctggcaacaaatcgacgccctcactccggcgcaggtcaaaagcctcggctggtcctggcatcagccgctctatccgtggccgctcgccgtcgcgctgctattgctactgctggccgcctgcggccgtgtcctcagggagaaaatggcatga

SEQ ID NO: 88543 - DNA, 1524 bp, Enterobacter aerogenes
atgagcgattttcacttcctctatccgtggcgcttaaccgcgctgctgctgtgtctgctggtggcctggcttcctggctacggcgcttccgcctggtcaacgctaatggataaaccttttcgcgcgttgattattcaacgccgtcgcaggttaacccggctgctgccgtggctactcacactcggtgtcatcgcactggcgggcccaagctggcagcgcgaactcccggcggcgctgacgccgcaaagcaacgtgatggtgattctgcagcaggatctggcgatgtatgcccaggatcttcccccctcgcgtcatcagcgcatgcagcataaaatcgccgcgctgatgcaacagcagcccggttcgcatttcggtctggtggtctacagtagccaggcctttctcaccacgccgttaacccaggatccgcagttttatcagctatttctcaacgcccagtcgccctctttgctgccggaaggtagcggttccgccctgccgcaggccgtcgcactggcgttaaaaaatctgcctacagacaaagacagcccgcgtagcctaatcctcgttgccgataccctgtcgcctgccgatgtcacctggctgaaagggcaacatctaccgctgcaaatttgggtacccggcaccgccgcgggtggaacgctgccggataagtatgccagcctcggcatcgatacccggctgaacgtcgatcgtttccgccagttgcgcgacgccgggatcccggtgacgctggccagcgatgatggcgacgatctgccgatcatcgccagccacattcaacaatcggtgactcagcaaaataacgcccgcgaggatctgcactggaaaaacagcggctacctgctgatcgcgccgatgctgttcctgctgctgttctggcgacgccagttactgatggtagcgctactatttcccgcgctgctgtggtcgccgcacagcgatgccgcctggctcgatgcctgggttcgccccgatattcaggggcagcacgcctttcgccgcggcgactacgccgctgccgccgggcattatcgcgatccgttatggcaaggtatcgcctggtatcgggcgggcgactatcctgccgccgccagcgcgtttcgcgccgcgccgccaaccgcggaaaccttgctgtggctgggcaacagctatgctcagcaaaagcagtggcagcaggcgctcgacagctacgatcgcgccctctacctacatcctgactggtccatggcgctgcaaaatcgcgataaaatctcgcagattgtgatgggcattcgccagcaagagcgcgagcgccaacaggcgcagggcgatgcgatggacgacggcccggataagctggtccacgacctgcagaaaaaccagggcatcaatcagcagcaaatcggcgctatcgccggggagagtccgcaggttaatcaatggtttgatgcgctggaggtttcgccaacggggctactgaaaagcctgtatcgcaacggctcgggagataccacgccatga

SEQ ID NO: 88544 - DNA, 999 bp, Enterobacter aerogenes
atgaacaaagcgctactttttctgctggccgccaccctgccggcgcatgcggcgatggacatcacccgtgaactggaagcgccggcgcagatcgtccccggccagccggttcgggtggcgatcacctggtggaccgatagctggtttaacccgccgccgcagtggcccgagtttgccgtcaaaaacggcgaactcctgaataccgcgttgccttcacagctggtgacgcgcaagaagaacgggatcgtctggagcggcattcgccttgaacgtcagatcagcgcctggcagcagggcgtgctacgcctgccggcgatcgacattaccgcgacctccgccaatcaggctccggtcacggtacatcttccggcgctggaacgcccggtaaactggccggccaataccactcaggcggaccattttttaccggccagccagctgacgctcagccagcaaattcaacagtaccacgcggggaaagacgccacgctgcgggttggtgatgtcgttgaccgtatcgtgaccgtcgaggcgcgggatgcgctaccggggcaaattccaccgctgctgtacgccattaacggtagcgaaagccagcgtctggcgccggtcagtgaggcattaaaaagcgagcgcggcgatatcataggcgctcatcgggtggagcggctgcgttatctgcccagccatagcggcacgctgacgctaccaccgattagcttgcgctggtgggataccgttaatcatcaatggcaaacggcaaagctggcgggagaaacgttgaacgtcgccgcggcgcgacagggcggcgcggagcaagcgctgcgcggtaccacgggaatggtcacctggcagagcctgatgtggatagtgattgccgccgccgcggtcggaggcggatggtttggccgccgctggtgttatcgaacgcttctcggcattagtcgacgctggcggcgtttctggcagccgcagccgttgccgccgctggccccttag

SEQ ID NO: 88545 - DNA, 996 bp, Enterobacter aerogenes
atgaaaaaaacagtactgctcagcatgctgctattgagcttcaccagcgcggcagccaccgatatgctgccggcatggaaagatacccctgctaaacaggcgattgagcaatgggtgcagggggcgacgcgtgaaggcggggcggactttattccgctggataagcgctacgtggtttttgataatgacggcaccctgtggccggaagcgccgctgactttccaactacagttcgcggtggatgaagtgaaacggctggcgcccgaccatccggagtggaaaaaggatccgctggtggcggcggtactgaacaacgatttgaaaacggtagcggcgggcggcgaaaaagggttgctcaagctgctggcgttaacccatagcggcatgaccaccgaagagtttagtcagcgggtcagcgcatggtttgacagccatcaggataaacgtaccggctgtcgctacgaccagttgggatatcagccgatgcgccaactgctggactatctgcgcgccaatggttttaaaacgtggatcgtttcaggcggcgggattgattttatgcgggtggtatcggaaaaaatgtacgatatcccgccggagcaggttatcggttcgttcgcgctcagcgagtttagtctgacggacgatggcaccgagcttcgcaagacgatgaaaggcgcatttaatgatgatgccgcggccaagccggtggcgatccacctgtttatggggcagcgcccggttgcggctttcggcaacagcgatggcgatctggcgatgctgcagtacaccgctgccaacccaaactataaaaccttcgagctgctggtacaccataccgatgcggcgcgggagtatgcctacgacagccatccttccgccagcggcaagctggtgaaaggattgacagaggcgaaacagaagggctggacggttgtcgatatgcagcaggactggaagacgatatacgacccggcgcagtgtcaggcgaaataa

SEQ ID NO: 88546 - DNA, 1263 bp, Enterobacter aerogenes
atgaaaaaaagcaccaccattccattaacgccattacagaaccaggggcgctatctgcccgcctataaacgccgctatcacatgatggcgaaacccagcggctccacctgcaacctggactgtcaatactgtttttatctgcataaagagcagcttttacatcagccgcacgacaaaggaatgagcgacgaggtactggagaatttcattcgtcagtacatccaaagccaggacggcgaagagattattttctcctggcagggcggcgagccaaccctgatgggactggagtttttcgaaaaggtcgttgagctgcaaaagaaatatcagccgaagcaccagcgcattgagaacgatctgcagaccaatggcgtgctgattaacgataagtgggccgccttcttgaaggcgcataacttcctggtcggggtatcgatcgatggcccgcgcgagatccacgatcgcttccgcgtgacgcgcagcggcaagccgaccttcgataaggttatggaagggatcgcggcactgaagcgccacggcgtgccgttcaacgcactggcagtcgttaaccgggtgaatgcccgtttcccgcgcgaggtatatcgttttcttacccgtgaactcggcgccacctatatccagtttacgccctgcgtagaggccgccgagtttaaaaccaccgcgccgcagttctggcgcgaagagacgatccccatcaccggcagccgccgggcgaaaccgggggatctggattcaatcgtcactgactggtcggtggatccggacgattgggggcattttctgaccgaagcttttgatgagtgggtgacctgtgatctgggccgcgtgcaggtaaatttgttcgaaaccgccgtggtacagactatggggcttccatcccagttatgcatcaccgcgccgttttgcggcaaggcgctggcgattgagaaaaacggcgacgtctactcctgcgatcactacgtctacccggaatataagcttggcaatattaaggcgcataagctggcgcatatggtcttttccgagcggcagaaagtgtttggcatgggcaagaaagagacgctgcccgcctactgcaaaagctgcccgcatctgaatttatgctggggcgaatgcccgaaaaaccgcatcgtgcgcgccccggacggcgaagaagggctcaattatttgtgtcctggctttcgccatttttacgcgacggttaaaccgacgcttgagaagattgccgccatgctgaagtag

SEQ ID NO: 88547 - DNA, 1689 bp, Enterobacter aerogenes
atgaataaaaaatacaagggtatcggcgtgctggcttttgccgccggttcgttattacccggcgcgacggccaatgccgccgatcaaaatgcggctggccccagcgatggtgcggcaaagaagcccaatattatcctgatcgtctctgacgataccggctatggcgacctcggcgtctacggcggcggcgaaggccgcggtatgccgacgccaaacctcgacagaatggccgatgaggggatgacctttttcgacttctacggccagccgagcagtacgccgggccgcgcggcgatgcagaccgggcgcattcccaaccgcagcggtatgaccaccgtggctttccaggggcagggcggcggtttaccgaaagaagagtggacgctggcctcggtactgaaaaccggcggctataaaaccttctttaccggtaagtggcacctcggcgaagccgattacgcgttacctaatgctcagggctacgacgaaatgaaatacgtcggcctctaccacctgaacgcctatacctatgccgacccgacctggttcccggatatggatccgcaactgcgtgaaatgtttacccgtgtcacccgcggcgcgctctccggcaaggcgggcgaagcgccgaaggaagagttcaaaattaacggccagtatgtgaataccccggtcgttgatggcaaagagggcgtggtcgggatcccattcttcgaccgctacgtcgagaaggcctcgctggactatctcgaagcaaacgcaaaatcttccgaaccgttcttcatgagcatcaactttatgaagaaccaccagccgaacatgccggatccggattacgtcggcaagtcgatgtcgaagagcaaatacgccgactcgatggtggaaatggatgcccgcgttggccatatcatggataagctgcgcgagttggggatcgataaaaacacccttgtggtatggaccaccgataacggcgcctggcaggacgtctatccggatgccggctatacgccattccgcggcaccaaaggcaccgaccgcgagggcggcagccgcgttccggctatcgcctggtggccgggcaagattaaagagcacagccgtaaccacgatatcgttggcggcctcgatctgatggcgacctttgcttcggtggccgggattaaattacccaccaaagaccgtgccgggcagccgattatcttcgatagctacgatatttcaccggtactgtttggcaccggtaaagatccgcgtacctcctggttctacttcactgaaaatgagctgaccccgggggcggcgcgcgtcggtcactataaggcggtgtttaacctgcgcggcgataacggcgcgaaaaccggcggcctggcggtggattccaacctcggctggaaagggccggagtcgtatgtcgcaacggtgccgcagattttcgacctctggcaggatccgcaggaacgctacgatatctttatgaacaactataccgagcatacctggacgctggtgaccttcaatgaagccatcactaagttgatgaaaacctacgtcgagtatccgccgcgtaagccgcagagcgaagcctacagtgggccgattaccctgtcgcagtatcaacgctttagtaatatccgcgagcagttacaaaaagaagggttccagttggcgatgccgaccggtaattaa

SEQ ID NO: 88548 - DNA, 696 bp, Enterobacter aerogenes
atgagtcgtattcaaacgccctattcccacatcatcgatgaatataataagatgatttcaaagaatataaaggcgatagactcattaagtcatagcagtaatatacgccagattgccgatgatacgtctttcaccctgagtacaggcgagattattattgttcttgagggcgttattgccgttgagatgcaggagcacaactttattctcgccccaggaaaagcgaaaacccaggcgaaaaagttgtttcaggtcggcaaaggcatcaaaggaatgttttttggtattgtcgaaagttatggcccgggtattcagctgcactataccgccaaaaaaaatgtcaaagtgttcagctgtaatctcgaatactttgagaaacattttactcagcccgataaattcaccttcctgatgaacatgatggccatcacgctggcgtttttgctcgatgcgcatgacgaaagagctattggcacccgctattttgtcattcgctccatgatttatcgctatctcaagcagaaaaatgagggtgtattacacgacccgagcctggcgaactttatcctgcgacgcacaaaaatgtcgcgtagctatctgtttcaggtactttccgatctgaaaaacggcggctatatcacgatgaaaaacggcgagctcgtcgatattgtcaacgagctgccggaaaaatattaa

SEQ ID NO: 88549 - DNA, 1932 bp, Enterobacter aerogenes
atgacagctcagactcagggtgcggaaaatgaagtttcagccgttatcagccagtcgtggcatcgctgcagcaaatttatgcagcgtgaaacctggcaggcgccgcatcaggcgcaggggctgacctttgaatcgatctgccgtcgcaaaaccgcgctgctgaccatcggccaggcggcgctggaagatgcgtgggagtttatggccaaccgttcctgcgcgctgttcatccttgatgagtcggcctgtattctgagccgctgtggcaatccgcagaccctggaacagctggcggaactgggatttcgcgacggcagctactgcgcggagagcattatcggcacctgcgcgctgtcgctggcttcgatgctcggacagccggtcaacaccgcgggcgacgagcactttaagcaggcgctgcggcgctggtcgttcagttcgacgccggtgttcgataaccatggccgcctgtttggatcgatttcgctatgctgtctgcgcgaagagtgggccccggcggatctgtcgctgacgttggccatcgcccgcgaagtgggtaactcgctgcttaccgacagcctgctggcggaatctaaccgccaccttaatcaaatgtacggcctgctggaaagtatggacgacggggtgatggcgtggaacgagcagggagtgctgcagtttctcaacgtgcaggcggccacgctgctgcatctcgatacccaggccagccaggggcggaatatcaatgagctgttgaccctgccggcgttgctgcgccgtgcgattaaacaggcccgcggccttaatcatgtggaagtgactttcgagagccagcatcagtttattgacgcggtgatcaccctgaagcctatcgtggaagagcagggcaatagcttcattttactgctccacccggtggagcagatgcgtcaattaatgaccagccaattgggcaaagtgagccataccttcgaacagatgtcggcggatgacccggaaacccgcaggctgatccactttggccgccaggcggcgcgcggcgctttcccggtgctgctgtgcggcgaggaaggggtgggtaaagaattactgagccaggcgatccataacgaaagcgagcgggcgccgggcccatatatttcggttaactgccagctgtacgccgacagcgtactgggccaggattttatgggcagcgcgccaaccgacgatgaaaatggccgcctcagccgccttgagctggccaacggcggcacgctgttcctggaaaaaatagagtatctggcccccgagctgcagtcagcgctgctgcaggtgataaaacagggcgtgctgacgcgtcttgatgcccggcggctgattccggtggatgtgaaagtgatcgccaccaccaccgtcgacctcgcgaacctggtggagcagaaccgctttagccgccagctgtactatgcgctacattcgtttgagatagtcattccgccgctgcgggcgcgacgcggcagtattccttcgctggtgcatagccgtctgcgtcggctggagaaacgcttttcatcgcggctgaaggtcgatgacgacgcgctggcccaactgaccgcctattcgtggccgggcaacgattttgagcttaatagcattattgagaatatcgcgatgagcagcgataacgggcatattcgcttaagcaatctccccgaacatctcttctctacccggccgggcagcgaaacggcctcatcgctactgccgtcgagcctctccttcagcgccatcgagaaagaggcgattatccaggcggcgcgagtgactaacggccgggtacaggagatgtcgcagttgctgaatattggccgtaccacgctgtggcgcaagatgaagcagtacgatatcgacgccgggcagtttaagcgccgggggcaggataagagttaa

SEQ ID NO: 88550 - DNA, 1098 bp, Enterobacter aerogenes
atgctaaaagttattcaatctccagccaaatatctccagggacctgatgccgccatgctgtttggcgaatacgctaaaaacctggccgacagcttttttgttatcgccgatgacttcgtgatgaagctggcgggcgacaaagtattgaacggcctgcatagccacaatattagctgccatgcggaacggtttaacggcgagtgcagccatgcggaaatcaaccgcctgatcgccattcttaagcagcacggctgccgtggcgtggtgggtatcggcggcgggaaaaccctcgataccgcgaaggcgatcggctattaccagaagctgccggtggtggtgatcccgacaattgcttcaaccgatgcgccgaccagcgcgctgtcggttatctacaccgaggcgggcgagtttgaagagtatctgatctacccgaaaaacccggatatggtggtgatggacacggcgattatcgccaaagcgccggtacgcttgctggtggccgggatgggcgatgcgctctccacctggtttgaagccaaggcctgcttcgatgcgcgagccaccagcatggcgggcgggcagtccacggcggcggccttgagcctggcgcgcctgtgctatgatacgctgctggcggaaggcgaaaaagcacgcctggcggctcaggctggagtggtgaccgatgcgctggagcgtattgtcgaagccaacacctatctgagcggtatcggttttgagagcagcggcctggccggcgcgcacgcgattcacaacggtttcaccatccttgaagagtgccaccatctgtatcacggcgaaaaagtcgctttcggcaccctggcgcagctggtactgcaaaatagcccgctggaagagatcgaaaccgtgatgggcttctgtgaaaaagtcggcctgccgatcacccttgcccagatgggcgtgaaagagggtatcgaaagcaaaatccacgcggtggcgaaagccacctgcgcggaaggcgaaaccatccacaatatgccgttcccggtcaccgcggatagcgtctacgccgccatccttaccgcggacctgcttgggcagcagtggctggcgcgttaa

SEQ ID NO: 88551 - DNA, 1071 bp, Enterobacter aerogenes
atgaaaaaactgattaaccgtgtggaagatgtactgagtgaacagcttatcggcctggcgaaggcgcatcctgaactgacgctgcaccaggacccggtctatgtcacccgcgctgatgcgccggtcgccggcaaagtggcgctgctctccggcggcggcagcggacacgaaccgatgcactgcggctacatcggccagggcatgctctccggcgcctgtccgggggaaattttcacctcgccgacgccggacaaaatgttcgaatgcgcgatgcagattgacggcggcgaaggcgtcctgctgattatcaaaaactataccggcgacatcctgaattttgagaccgccaccgagctgctgcacgaaagcggcgttaaggtcgccaccgtcgtggtggatgacgacgtggcggtaaaagacagcctctataccgccggacgccgcggcgtcgccaataccgtgctgattgaaaaactggtcggcgccgccgccgaacgcggcgactcgctggaagcctgcgctgaactgggccgccgtttaaataaccttggtcactcgattggcatcgcgctgggcgcctgcaccgtaccggccgccggacagccctcctttaccctgaaagatgatgagatggagttcggcgtcggcatccatggcgagccgggtatcgaccgccgccgcttcagctcgctcgaccaaaccgtcgatgagatgttcgataccctgctggaaaacggcgcatacagccgcacgctgcgccagtgggataacgtcaagggagcgtggcaggaagtgaaacagagcaaaaccgcgctgcaaaacggcgatcgggttatcgcgctggtcaataacctcggcgccacgccgctttccgaactgtacggcgtttataaccgcctcgcccagcgctgcgaagcgtccggcattgtgattgaacgcaacctcatcggcagctactgcacctcgctggatatggcgggtttctccatcaccctgctgaaagcggatgatgacacgctggcgttatgggacgccccggtccataccccggcgctgaactggggaaaataa

SEQ ID NO: 88552 - DNA, 633 bp, Enterobacter aerogenes
atgtcactgaacagaacgcaaatcgtcgactggctgtaccgctgcggcgacattttcaccaaacagagcgattttctcaccggccttgataaagagatcggcgatgccgaccacggcctcaatatgcatcgcggcttcagcacagtcgtcgaaaagctgccgtcgatcgccgataaagacatcggttttattctcaagaataccgggatgacgctgctttccaacgtcggcggcgccagcggcccgctgttcggcaccttctttatccgcgccgcccaggtcacccaggcgcatcagagcctgaccctcgacgagctttatcagatgatccgcgaaggcgcggacggcgtcgtcaaccgcggtaaagcggagccgggcgataagaccatgtgcgacgtctggctgccggtggtggaatccctgcgtcattccagcgagcaacatctgtctatccctgccgcgctggatgccgcctgcgaagtggccgagcgtgccgcccacgccaccatcaccatgcaggcgcgtaaaggccgcgccagctatctcggcgagcgcagcatcgggcatcaggatcccggcgcgacctcggtgctgtttatggttcagatgctggctgccgccgccaaagagtaa

SEQ ID NO: 88553 - DNA, 1419 bp, Enterobacter aerogenes
atggtaaacctggttattgtttctcatagcgcccggctgggcgaaggtgtcggagaactggcccggcagatgttaatgaacgatggctgtaagctggcgatcgccgccgggatcgacgatcccgacaacccaatcggcaccgatccgattaaagttatggaggcgatcgaatccgtcgccgataccgaccatgtactggtgatgatggatatcggcagcgccctgctcagcgccgaaaccgcactcgatctgctcgatccggcgatggcggcaaaagtgcggctgtgcgccgcgcctctggtcgaagggacgctggcggccaccgtcagcgccgcctccggcgccggaatcgacaaagttatcgccgatgccatgaacgccctggaagccaagcgggttcagctgggtttaccttcgcacacgcctgacgccgccgccccaacgcttgctgacgacggcgatgctaaatcggtttcagtcattattaacaatcacaacggcctgcacgtgcgtccggcatcaaagctggtcgccgcgctggcgggttttaacgccgacctggtgctggagaaaaacggcaaatgcgtcaccccggacagtctgaatcaaatcgctctgctgcaggtgcgccgccacgataagctgcgcctgctggcccgcggtccggacgccgatgccgcgctggcggcgtttcaggcgctagccgccgataacttcggcgagtcgccggaggcgcagccgacagcggaacccgccatacctgcgcgtgttgaaggcgcggcgctgctttatccgctggcgccgatccaaccggcgctccccgccgccgccgacgttgctcgcgagcagcagcgcctgcgccaggcgatcgaccagacgctggccgatctcaatgcgctcaccgagctggcggaaaacaaatttaacgccgatatcgcggcgatcttcgccggtcatcacaccttgctcgacgatgaagatctgtttgatgccgccaacgatcgcctgctcaccgaacagtgctcggcggaatgggcgtggcatcaggtgctgatggagctcagccagcagtatcgtcagctggatgacgcctatctgcaggcccgttatatcgatgtcgacgatattctgcagcgcacgctgcgccatctgcagggtataaaggagacgctgccattcgccagtgagccgacgattattatcgccgacaatatttatccctcgaccgtactccaactggatgccagccaggtcaccggcctgtgcctgcgcgacggcagcgaacaggcccacggcgcgattatcgcccgtgcggcggggatcgcctggctatgccagcagggcgaagcgctgaatgatattcagcctggcgaagccatcacgctcgatatgcgtcagcaacgccttattcgtcgctaa

SEQ ID NO: 88554 - DNA, 1650 bp, Enterobacter aerogenes
atgtctcaattcttttttaaccagcgcgccagcctcgttaacgacgtgatcgagggtaccattattgccagcccgtggaacaacctcgcccgcctggagagcgacccggcgatccgtgtagtggtgcgccgcgatctgaataaaaacaacgtggcggtgatttccggcggcggctccggccatgaaccggcgcacgtcggctttattggtaaaggcatgctgaccgccgcggtctgcggcgatctgttcgcctcgccgagcgtcgatgcggtactcaccgcgattcaggcggtgaccggcgaggcgggctgtctgctgatcgttaaaaactacaccggcgatcggcttaacttcggcctcgcggcggagaaagcgcgccgtcttggctacaacgtggagatgctgatcgtcggcgacgatatttcgctgccggataacaaacagccgcgcggcatcgccgggaccattctggtgcataaggtggcgggctatttcgccgagcgcggcttcaacctcgccaccgtcctgcgtgaagcgcaatacgccgccaaccataccgccagcatcggggtggcgctggccagctgtcacctgccgcaggaagcggaaagcgcgccgcgccatcagcccggccacgccgagctgggaatgggcatccacggcgagccgggagcttcgacgatcgcgacccacaacagcgcggaaatcatgcagattatggtagagaagctgaccgccgtcctacccgaaaccggccgcctggcggtgatgctcaataatctcggcggcgtgtcggtggccgagatggcgattctgacccgcgaactggccaataccccactccatgcgcgcgttgactggttgattggcccggcttcgctggtaacggcgctggatatgaaaggcttctcgctgaccactatcgtgctggaagagggcatcgaaaaggcgctgctgtcggatgtcgaaaccgccagttggcagaagccggtgcagccgcgggctgttaatattatgccgtccgcgctcgccagcgcacgcgtctcctttacgccatcggccaacccgcaggtgggcgattacgtggcgcaggtgaccagcaccctctccggcctcgaaacccatctcaacgcgcttgacgccaaagtgggcgacggcgataccggctccactttcgccgccggcgcgcgtgagattgccgctctattgcaacgccagcaactgccgctcaatgatttacccacgctgttcgcgctaattggcgaacgcctgacggtggtgatgggcggctcaagcggcgtattgatgtcgattttcttcaccgccgccgggcagaagctggagcaaggcgccagcatggcggaagcgctgaacgccggtctggggcagatgaaattttacggcggcgccgatgagggagaccggacgatgattgatgctctacagccggcgctggcggcgctgttggccgaaccggataatctgcaggccgctttcgccgcggcgcaggccggcgcggatcgcacctgccagtcgagcaaagccggcgccggacgcgcctcctatctcaatagcgagagcctgctcggcaatatggaccccggcgcccacgcggtggcgatggtgtttaaggcgctggcggaacgctaa

SEQ ID NO: 88555 - DNA, 774 bp, Enterobacter aerogenes
atgacaataatcaaacaaactaaatacccgcaacgcgtgcgtaacgaagtacgttttcgcgaattaaccgtgctgcgcgttgagcgtatcggccaggcgttccagcggatcgtgctggggggcgaggcgctggatggctttgtttcacaaggttttgacgaccacaccaaactatttttcccgcaggcgggcagcgtatttacgccgccggaagtgaccgacgaaggcattaactggggcgagggcgtgcgcccggcgacccgcgactacacgccgctgtacgatgccgaacgccacgagctggcttacgatttttatatccacgatggcggtattgccagccgctgggcgctggaagccaacgtcggcgataagctggtgatcggcgggccgcgcggttcgctggtggtgccggaagattacgcctggcagctttatgtctgtgacgagtcgggcatgccggcgctacgccgtcgcctgctgggattacgtcagctgccggtgacgccgcaggtgacggccatcgtcaccgtcgcggatgcttcgtataaagattatctggcggatctcgacggctttaatatcgaatgggtggtaggccacaacccggcgttcgtcgccgagcggctggctcagattaaggtaccgtcagaagattattttatctggctgaccggagaaggcggcgtggtgaaatcgctgctggcgcgctttgaggtgccgagtatcgatcagcaactggtgcgttcgcaggcgtactggcatagcaaataa

SEQ ID NO: 88556 - DNA, 519 bp, Enterobacter aerogenes
atgcgacatcatcacgaagagggccacggcgaacagggccgtcgcggcggcggacgccgccagcgtttctttggccatggcgaactaaggctagtgatcctcgatatcctttcgcgcaacgccagccacggctatgagctgattaaagagattgaggcgctgacgcagggcaattacagccccagccccggcgttatctatccgacgctcgacctgctgcaggatcagggattgattagcgtagaagaggaaaatgggcgtaaaaaaatcgctatcactgaagagggacgccgcctgtgcgccgaaagcggcgagcagttaagccaaattcagacgcgcctgcaggaacgcatggtcggctgcgaattgcgcaaaaatccgcagatgaaacgcgcgctggaaaactttaaagcggtcctggacctgaaggtcaaccagcagagcatcagcgatgcgcagttgaaacagatcatcggcgtgattgacctcgcggcgatggaaatctcccagctcgattaa

SEQ ID NO: 88557 - DNA, 1380 bp, Enterobacter aerogenes
ttgaacaggttaccttccagcgcatcggctctggcctgcagcgcgcacgcactgaatctcatcgagaagcaatcgctctcccatgacgaaatgaaagcactgaaccaggaggtgagagaatactttaaagaacatgtgaacccggggtttctggagtatagaaaatcggtcacagccggcggggattacggagccgtagagtggcaagcgggagggttaaatacgcttgtcgacacccagggacaggagtttatcgactgccttggtgggtttggcatcttcaatgtagggcaccgtaatccagttgtggtatccgccgtcgaaaatcaactcgcgaaacaaccgcttcacagccaggagctgctggacccgctaagggcgatgctggcgaaaacgctggcggccttaacgcctggcaagctcaaatacagtttcttctgcaacagcggcacggaatccgtggaagcggcgctgaagctggcaaaagcctatcagtctccgcgcggcaaatttaccttcgtcgctaccagcggcgcgttccacggtaaatcgctgggcgcgctgtcggccaccgcgaaatcgaccttccgtaaaccgtttatgccgctactgccgggcttccgccacgtaccgttcggtgatatcaacgccatgcgttccatactgagcgagtgcaagaaaaccggcgatgacgtcgcggcggtgatccttgagcctatccagggcgaaggcggcgtgatcctgccgccgacgggttacttaccggcggtccgtaaactgtgcgacgagtttggcgcgttgttgatcctcgacgaggtacagaccggcatgggccgcaccggcaaaatgttcgcctgcgagcatgaaaacgtgcagccggatattctgtgtctggctaaagcgctcggcggcggcgtaatgccgatcggtgcaacggtagcgacggaagaggtcttctcggtgctgttcgataacccattcctgcacaccaccaccttcggcggcaacccgctggcctgcgcggcggcgctggcgacgatcaacgtcttgctctcacagaacctgccggcgcaggctgagcagaaaggcgatctgttgctggacggcttccgtcaactggcgcgcgaatatccggatctggtgaatgaagtccgcgggaaaggcatgttgatggctattgagtttgtcgataacgagattggctataactttgccagcgagatgttcagacagcgggtgctggtcgccgggacgttaaacaacgccaagacgatccgcgttgaaccgccgctgacgctcaccctcgagcagtgcgaacaggtgctgaaggcggcgcgcaaggcgctggcggcactgcgcatttcggtcgaagagacataa

SEQ ID NO: 88558 - DNA, 333 bp, Enterobacter aerogenes
atggataccgtagcttacgctgattttgccaaactggagatgcgcgtcggcaagattgtcgaggtgaagcgccatgacaatgctgacaaactgtacatcgctcgaattgatgtcggcgaccgtacgctgcagacggtcactagcctggtgccctactacagcgaagaggagatgctggggaaaacggtggtggtgctgtgtaatctggcgaaagccaaaatgcgtggcgaaacttctgagtgcatgctgttatgcgcggaaaccgaggatgaaagcgaaagcgtgctgttgacgccggagcgcgtcatgccagcaggcgtgcgggtggtataa

SEQ ID NO: 88559 - DNA, 984 bp, Enterobacter aerogenes
atggcaacgctaaaagacattgcgaccgaagcgggtgtttcgctggcgacggtttcccgggtgttaaacgacgatcccaccctgaacgtaaaagaagagactaagcatcgcattctcgaaattgcggagaagcttgaatataaaagcagcagcgcgcgtaaaacgcaggtccttcccgtcggccatcatcatatcctggcgctgtacagctaccagcaagagctggaaattaacgacccttactatctcgccattcgccacggtattgaaacccagtgcgaaaagctcgccatcgagctcaccaactgctatctcaataacaccctgcccgagctgaaaaaggtcaccggcgtattgattatcggccagccgacgcgcgagctgcgcgagaccgccagcgcgctgaccgacaatatctgctttattgatttccacgaagccggcagcccgtacgatgcggtggatatcgacctggtacgtatcgccaaagaggtggtcgacttctttatccagcagggcgcgtcgcgcattggatttatcggcggtcaggaccagcccggcaaggccgatattcgcgaagtggcgtttgtggagtacggccagttgaaaggcgtggtttcagccgatgatatctggcgcggcggtttttccagctcgtccggttatgagctggcgaagcagatgctggcgcaagcggagtttccgcgggcgctgtttgtcgcctcggactccatcgccatcggcgtgctgcgcgccatccacgaacgcgggctggcgatcccggaagatatttcgctgattagcgtcaacgatatccccaccgcgcgctttaccttcccgccgctgtcgacggtgcggatccactccgaaatgatgggcagccagggggtgaacctgctgatcgagaaggcccgcgatggccgcgccctgccgcttaacgtttttgttcccagcgtgttgaagctgcgcggcaccacccgttaa

SEQ ID NO: 88560 - DNA, 3093 bp, Enterobacter aerogenes
atgaatcgctgggaaaaccttcaactcactcatgaaaacaggctgccgccgcgggcgtatttcttctcttacgactcactggcccaggcgcggaccttcgcccgcgaaaccagcagccgcttcctgtccctcagcgggcagtggaacttccgcttcttcaccaacccgttgctggtaccggagagctttacctcatgctatcagaacgagtgggggccgattaccgtaccgggcatgtggcagatggaaggccacggccagctgcagtacaccgacgaaggtttccccttccccatcgacgtgccctatgtcccgaccgataacccgaccggcgcctaccagcgcctgttcaccctcggcgacggctggcagggcaaacaaaccatcattaaattcgatggcgtcgaaacctatttcgaagtctacgttaacggccagtacatcggctttagcaaaggcagccgcctgaccgccgagttcgatatcagcgcggcggtgaaaaccggcgacaacctgctgtgcgtgcgcgtgatgcagtgggcggactccacctatattgaagatcaggacatgtggtggtcggcgggcattttccgcgacgtctatctggtggggaaaaatccgctgcacgtgcaggatttcaccgtgcgcaccgattttaacgatgactacatcgacgcgaccctctcctgccagctgacgctggaaaacctggctccgcagacggcggcggcaacgctggaatataccctgttcgacggcgaaaaagcgctttattcgggcaacgtcggtcaactgcaggtcagccagcagctaaataccggcttcacaattgatgtgagcgcgccgcagcagtggtcggcggaaagcccgtatctctatcatctggtgctgacgttaaagaacgccgccggcgaggtgctggaaatcattccgcagcgcgtcggtttccgcgatatcaaagtgcgtgacggcttgttctacatcaacaaccgctacgtaatgctgcacggcgtgaaccgccacgataacgaccatctgaaaggccgcgcggtcggcatggatcgcgtggaaaaagatctgctgttgatgaagcagcacaacatcaactcggtacgcaccgctcactatccgaacgacccgcgtttctatgaaatgtgcgacatctacggattgttcgtgatggcggaaaccgacgtggagtcccacggtttcgccaacgtcggcaacctcagcgccatcaccgacgacccggcctgggaacacatctacgttgagcgcatcgtgcgccacgtgcacgcgcagaaaaaccatccgtcgatcgtcatctggtcgctgggtaacgaatccggctatggctgcaacatccgcgccatgtaccacgccaccaaagcgctggatgatacccggctggtgcactacgaagaggatcgcgacgccgaggtggtggatatcatctccaccatgtacacccgcgtgccgctgatgaacgaatttggcgagcatccgcatgaaaaaccacgcattatctgtgagtacgcccatgcgatgggcaacggtcccggcggattaactgaatatcagaacgtcttctaccagcatgactgcatccagggccactacgtgtgggaatggtgcgaccacgggattcaggccagcgacgaaaacggcgcggtgtggtacaaattcggcggcgattatggcgactacccgaacaactacaacttctgcctcgatgggctgattttctccgaccagacgccggggccgggcctgcgcgaatacaagcaggtcatcgccccggtgaaagtacaggcacgggatatctgccgcggcgaactgcgggtggaaaacaaactgtggttctccactctcgatgactacaccctgcgcgttgaagtgcgcgccgaaggcgaaacgctctcgagtcagttgctgaaagtgaaagacctggcgccgaacagcggccgcgacctgcaaatcgtcctgccgcagctcgacgaacgtgaagctttcgtcaacatcatggtgaccaaagattcgcgcactccgtatagcgaagccaatcacgatatcgccgtctatcagttcccacttaaagcgcgaaccgccgcgcgaaccccgctgttaaacgccagcgccacgccgctgcagattgtcgatgaacgcctcagctacaccatctgcggccataacttccgggtggtgttcagcaaggttagcggcaaactgagcgaatggcaggtcaacggcgtcgaccaggtaacccgcgagccgaagattaacttcttcaaaccaatgattgataaccataaacaggaatacgaaggactgtggcagccggcccacctgcagataatgcaggagcatctgcgcgaattcagcgctgaaatagagggcgaaacggtggtgatcaccacccgcagcgtgattgcgccgccggtgttcgacttcggtatgcgctgtacctatcgctggcagattaccccgcagggccacatcaacgttgagctggccggcgagcgctacggcgactatccacacattgtcccgtgcatcggctttatgctgggcattaacggtgagttcgaccaggtgaactactatggccgcgggccgggcgagaactacgccgacagccagcaaagcaacatcattgatatctggcataccaccgtcgacgatatgttcgtcaattatccattcccgcagaacaacggtaatcgtcagcacgtgcgctgggcatcgttcagcgaccgccacggcagcggtctgctggtcgttccgcgcaatccgctcaacgtcagcgcatggcactttacggcagaaaacctgcacgccgcccagcacagcaacgaactgcagcgcagcgatgacatcaccctgaatatcgatgcgcaactgctcggcctcggctccaactcctggggcagcgaagtgctggatagctggcgcgtctggctcaacaccttcaactatggctttacgctgctgccgctggagggcggatgcggcacctcgcaggtactggcgaaccatagcttcggcgccggtttcttttcccccgttgcacacagcgaggctgaacaatga

SEQ ID NO: 88561 - DNA, 450 bp, Enterobacter aerogenes
atgagaattctcgataatttagaacagtttaagcaggtttatcatagcggccgcaaatggcagcgctgcgtggaagccatcaataacatcgacaacatccgcccgggcgtggcgcattccattggcgattcgctctcctatcgggtggaaaccgatagtacgaccgacgcgctatttgtcggcaatcgccgctactttgaggtgcactattacctgcaggggcagcagaaaatcgagtttgccgccaaagaaaatctgcaaaccgtcgcctgctaccgcgacgaaaccgatcgcgagtacctgaaagggatcggtgaaacggtgaaggttcacgaagggcagatggtgatttgcgatatcgacgaagcctaccgctttatctgcgatgcgccggtaaaaaaagtggtgctgcgagtcacggttgaagacggatacttcctcaataagtaa

SEQ ID NO: 88562 - DNA, 1434 bp, Enterobacter aerogenes
atgtccgagtctgtacgtgccaaaatcggcaagttcgcgctgctatcgatggcctttaccgccgtctttaacgtgcgaaatatcgtcaataataacatcgagttaggtctcagttccgcgcctatcttcttattcgccactatcgtttactttatcccgttcgtgtttatcatcgccgaattcgtctcggccaataaacactccgaatccgggatgtacgcgtggctgaagcagccgctgggtacccgcgccgcctatcttggttccttcctctactggtttgtgaacctgttctttttcctctcgctgttgccgaacgtagtggcctacgcctcatacgcgatcaccgggtacgcgatccccttctcgccgatggtgacctcgcttatctccatcgtgctgttcgccatggccacccatatatccaccaaaggggcgacctggctgggtaaaatttccgaatgcgtggcctacggcgtgttcgctttgttcgcgatttacgtcgtcggcgcgctgaccgcactgggttccggtcacgtcccggcgcagccgattaccctggcggcgatggagccgaccatcaactgggcgacgctcggtatcatgtgctggattttccaggccgctggcggcgcggaaaccgttgccgcctacctcaacgacaccaagggcgggcagaaatcctttattaaagtcatcatcaccgccggggtgctgattggcggtatgtatgccttaggttcgctgctggttaacgtctttgtcgcccgtgaaaacctgacctacgccggcggaatggtggaaatctttaccggtctcggcgcctacttccacatttctgaagcgctgatgggccgcttcgtcggcatcattctgtttatcgccatcttcggcagcatgatgatgtggaccgccgcgccggtcaaaatccacttctcggaaatcccgaaaggtatctacggccagaaaaccaccgagctgaacgcccacggcgtgccggtacgcgccgcctggtggcagttcctgttcgttttcctgatgttgattgttaacggcttcggctccgccagcgtgcagcagatgatgaacaccgccattaatctcaccgccggtaccgccatgctgccgccgctgttcatcatggccgcctacttcgtcttccgctggaaacacgatgacacgccgcgcgacttccgtatgggctcaaggaaagtgggcatgagcgtggtatcgatgctgatagtgattttcgtggttagcatgaccgcttccgccttcccgccgggcgtcgatctggttaacgctttctttatcaacgtctttatgaccgcggtcttctccggcctggcgtggtggtggatcacccgctttgaaaaaaagcagcaacgtctgcgcgccgcggcgccggttaacgctgccgccgccggtaaataa

SEQ ID NO: 88563 - DNA, 1434 bp, Enterobacter aerogenes
atgtctgatactaaacgtaataccatcggcaagttcggcctgttatcgctgacctttgccgccgtttacagtttcaataacgtcatcaacaacaatatcgaactggggctggcgtcggcgccgatgttcttcctcgctaccctgttctacttcattccgttttgcctgattatcgccgagttcgtgtcactgaataaaaactccgaggccggggtttacgcctgggtgaagagttcgctcggcggccgttgggcgtttatcaccgcctatacctactggttcgtaaacctgtttttcttcacctcgctgctgccgcgcgtgatcgcctatgcctcttacgccttcctcggctacgaatacattctgacgccgttcgccactaccgtgctgagcatggcgctgttcgccttctccacctggatctccaccaacggcgcgaaaatgctggggcctatcacctccgttacctcatcgctgatgctgctgctgacgctctcctatattttgctggccggtaccgcgctggtgggcggcgtgcagccagcggatccgatcaccgtcgaggcgatgatccctaacttcaactgggcgttccttggtattaccacgtggatttttatggcggcgggcggcgcggaatcggtggcggtatacgtcaacgatgtgaaaggcggctcgaaatccttcgtcaaagtgatcatcctcgccgggatcttcatcggcgtgctgtactcgatctcctccgtgctgatcaacgtcttcgtcagcagtaaagagctgaagtttaccggcggatcggtgcaggtgttccacggcctggcggcttactttggcctgccggaaattctgatgaaccgcttcgtcggcctcgtttcgtttaccgcgatgtttggctcgctgctgatgtggaccgccaccccggttaaaattttcttctcggaaattccctccggcatctttggtaagaaaaccgtcgagctcaatgagaacggcgtcccggcgcgcgcggcctggatccagtatctgatcgtcattccgctgatgatcatcccgacgctgggatccaacaccgtgcaggatctgatgaacaccatcatcaacatgaccgccgccgcttccatgctgccgccgctgttcatcatgctggcctaccttaacctgcgccgcaagctcgaccatctgccgcgcgatttccgcatgggctcgcgtactaccggcatcgtggtggtatccatgctgattgtgattttcgccatcggcttcgtcgcctcaaccttcccaaccggcggcaacatcctgaccatcattttctacaacgtcggcgggatcgtgattttccttggcttcgcgtggtggaaatacagcagatacgtcaaaggattaacccaggaacaacaacaaatagaagcggctccggcttcccatacctcttaa

SEQ ID NO: 88564 - DNA, 1059 bp, Enterobacter aerogenes
atgaaaactaactcttacttatacggggcactcgttgccctggctttttgcgcccctgcggcggccgctgagactgtccatccggccgagcacgacgataccaaaacgccggaattaaccaccacctcctatcgcttttacggcgagttgggggttggcggatatatggatttagaaggcgaggacaaacataaatacagcgatggcacctatatcgagggcgggctggaggtcaaaaacggccactggttcgggctgatttacggcgaagcctggacggtacaggccgatagccagggcaatgcctggacgccgggccacagctggggcggcgtggaaggcggccttaaccgcctctatggcggctataaaaccgataacaacaccgagatcatgctcagcctgcgccaggactcgtcgctggacgacctgcagtggtggggcgactttacccccgatctgggttacgtgatccccaatacccgcgacatcatgtacgcgctgaaggtacaaaaccgcagcggcgatttccgctatagcgtcaccgccacgccggccgggcatcacgatgaaagcaaggcctggctgcacttcggcaaatacgatcgctatgacgataagtacacctatccggcgatgatcaacggctacgtacagtacgacatcgtcaaagatgtcacctggatgaacggccttgaggtgaccgacggcaccgggcagctattcctgaccggcgttctgtcgcccaatctggccttccgcgcctggcaccataccggccgcgccaaagggctggatgttcccggcagtgaaaccggctttatggccagcgccatgtatgaagccttaagcgggctctacttctccaccgcatacagctacgccaaacaccgcccggaccacgccgctgatgaaaccaccgcatttatgcaatttggcatctggtacgaatacggcggcgggcgtttcgccaccgccgccgacagccgtttctataccagcaacgccagcggcgacccgagcgacaaaattttcctgatgcaatacttctactggtaa

SEQ ID NO: 88565 - DNA, 2352 bp, Enterobacter aerogenes
atgaacttcaccactacgctgacgccgctggcctgcgcgctgatgctgagtttttccgcccatgccgtcaccgcgcaggcgtttaaaaacgtcatcgaccgcagcggcgcgccgcagtatatgcaggatttcgacgccgatgaccaccagcgcttcaacccctttttcgacctcggggcgtggcacggccacctgctgcccgacggcccggcgaccatgggcggcttccccggcccggcgctgctgaccgaagagtacatcaactttatggccaccaacttcgatcgcctgactgtgtatcagaacggcaaaaaggtcgatttcaccctgcaggcctggagcctgccgggcgcgctgaaacaaacgctgaccgcccccggcgtgaaggtggagatgacgctgcgcttcgccagcgcccacacttcactgctggagaccaaaatcaccagcaacactccgctgaagctggtgtgggatggcgaactgctggaaaaactggccgccaaagagggtaaagcgctatcgaacaaaaccattgatgaagccttcccggactatcagcgccgtctgagcgccacgcccgacggcctgacggtcagctttggcaaggttcgcgccgcctccgacctgatgacctccggcgaatcgcagtatcagatccaccgttcgctggtaaccgagacccgtatcgacggccaccgctttaccagcagcgcggagatccgcggctccaccaccctctacaccacctattcgcacctactcactgcggagcaagcgcggcgggaaaaagcgcagatccgcgatattctggcgcggccggcttactatctcgccgcctccgaacagcgctgggacggttatctgcaaaaagggctcagcaaccccgacgctaccgccgaacagacccgcgtggcggtgaaagctattgagacgctcaacggcaactggcgcgcgccgggcggcgcggtgcattaccataccgtcaccccatccgtaaccggccgctggttctccggcaaccagacctggccgtgggatacctggaaacaggcctacgccatggcccacttcaacccggatatcgccaaagagaatatccgcgccgtcttctcctggcagataaaagccaatgataaggtgcgcccgcaggatgccggatttgtgcccgatctgatcgcctggaacctgagccccgagcgcggcggcgacggcggcaactggaacgaacgcaacaccaagccaagcctcgcggcctggtcggtgatggaggtatataacgtcaccaaagataaagcgtggctggaagagatgtatccgaagctggtggcctatcacgactggtggctacgcaaccgcgaccataacggtaacggcgtgccggaatatggcgcgacccgcgataaggcgcacaacaccgccgacggcgccatgctgttcacggtgaaaaaagggcaaaccgagcagacgctttccggccttcgcgcctacgagcaggtgacggccaaaggcgattacgacagcctcgaaattccggcgcaggtagcggcgtcgtgggagtccgggctcgacgatgcggcggtatttggttttatcgataaagaacagctggataaatacgtcaccaacggcggcaaacgcagcgactggacggtgaaattcgccgaaaaccgcgaccgcgacggcaacctgctggggtattcgctgctccaggaatcggtcgatcaggccagctatatgtacagcgataaccactatctggcgcagatggcgaccattcttggcaaagcggaagaggcaaggcgctatcaggcgctggcgacgaagctggcggattatatcaatacctgcatgttcgacccgcagactcgtttctattacgacattcgtatcgaagaacaaccgctggccaacggctgcgccggtaaaccgatcgtcgagcgcggcaaggggccggaaggctggtcgccgctgtttaacggcgcggcgacgcagcaacatgctgacgatgtggtttcggtgatgctcgacccgaaagagttcaacacctttgtgccgctgggtaccgccgcgctgaccaacccggcctttggcgccgatatttactggcgcggacgggtgtgggtggatcagttctggttcggcctgaagggaatggagcgctacggtcatcgcgatgaggcgctgaagctggcggacgccttcttccagcacgccaaaggcttaaccgccgatggccctattcaggagaactacaatccgctgaccggcgcccagcagggggcgcctaacttctcgtggagcgcggcgcatttatatatgttgtataacgagtttttccgtaagccctag

SEQ ID NO: 88566 - DNA, 297 bp, Enterobacter aerogenes
atgaacgtaacgctggtggagatcaatattaaacccgagcgggtggatgagtttctcgaagtgtttcgcgccaaccacgagggcgcgctgcgggaacctggcaacctgcgctttgatgtcctgcaggatcccgaggtgaaaacccgcttttttatctacgaagcctataaagacgatgaggcggtgctggcgcataagaagacgccgcactatttagcctgcgtcgaaaagctggaggagatgatgtcgcagccgcggcagaagcgcagctttatcggcctgttaccgcaggtgtga

SEQ ID NO: 88567 - DNA, 888 bp, Enterobacter aerogenes
atggctgatttagacgatatcaaagagggtaaggacttcggcatcgatcgcccgcagcagaatacgctgtataccctgaaaggctgtggttcactggattggggcatgcagtcacggctggcgcgcatctttaatccgcgcagcaaccgcacggtgatgctggccttcgatcacggttactttcaggggccaacgaccgggcttgagcgtatcgacctgtcgattgcgccgctgtttgccgacaccgacgtgctgatgtgcacccgcggcgtactgcgtagccaggtgccggcggccaccaataagccggtggtgctacgcgcctccggcggcaattcgattttgagcgaactctccaacgaatgcgtggcggtggcgatggaagacgcgctgcgtctcaacgtatgcgcggtggcggcgcaggtttatatcggcagcgaatacgaacatcagtcgatcaataacatcatcaaactggtggatgccggtaatcgctacggtatgccggtactggcggttaccggcgtcggcaaagagatgacccgcgacgcgcgctacttctcgctggccagccggattgccgccgaaatgggggcgcagtttgtgaagacctatttcgttgaggaaggctttgaaaaagtaaccgccagctgtccggtgccgatcgttatcgccggcggtaaaaaactgccggagcatgaggcgctggagatgtgctggcgggcgatcgaccagggggcgtccggggtggatatggggcgcaatattttccagtccagcgccccgcgtgcgatgctgaaggcggtgaaaaaggtggtgcatgagaatctgaacgcgcgcgaagcgtatcagttctggcaggaagagaaacagggagagctgaaatga

SEQ ID NO: 88568 - DNA, 1002 bp, Enterobacter aerogenes
atgaaattaaaactgatcgtgctggcgctggcgatgagcgtagtcaccgcacaggcggcggaccgcatcgcctttattcctaagctggtcggcgtcggcttctttaccagcggcggcaacggcgcgaaagaggcggggaaagcgctgggcgtggatgttacctatgacggtcccaccgagcccagcgtctccggccaggtgcagcttatcaacaacttcgtcaaccagggctacaacgcgattatcgtctccgccgtctcgccggacggcctgtgtccggcgctgaagcgggcgatgcagcgcggggtgaaagtcctgacctgggattccgataccaagccggagtgccgcagcatctatatcaaccagggcacgccgcagcagctcggcggcctgctggtcgagatggcggaaaagcaggtcagcaaacctgccgccaaagtcgcgtttttctactccagcccgacggtgaccgaccagaaccagtgggtgaaggaagccaaagccaaaatcgaaaaagaacatccgcagtggcaaatcgttaccacccagtttggctataacgatgccaccaaatcgctgcaaaccgccgaggggatcttaaaagcgtatccggatctcgacgccattatcgcgccggatgccaatgcgctgccagcggcggcgcaggcggcggagaacctcaagcgtcagggcgtggcgatcgtcggctttagtactccgaacgtgatgcgcccgtacgttgagcgcggcacggtgaaagcgttcggcctgtgggatgtggttcagcagggcaaaattgcggttaacgtcgccgatcgattgttgaaaaagggcgatcttaacgtcggcgacagcgttgaggtgaaagatatcggctcgctgaaggtcgaaccgaatagcgtgcagggctaccagtatgaggcgaagggcaacggtatcgtgctgctgccggagcgcgtggtgttcagcaaagagaacatcaacaactacgacttctga

SEQ ID NO: 88569 - DNA, 999 bp, Enterobacter aerogenes
atgaagctgaagcttaactgggaaagcgcgctgctggcgttgctgatcgcggaaatcctgctattcggcgctttgaatccgcgcatgctggatatcaatatgctgctctttagcaccagcgactttatctgcatcggcatcgtcgcgctgccgctgacgctggtgatcatcagcggcgggatcgatatttcgctgggctcgaccatcggcctgtgcgccatcgccctcggggtgatgacccaggcgggctggccgctgtggctcgcggtatcgctgacgttgctcttggggctgctatgcgggttattcaacgccgcgctgattcactacaccggcatcagcccgctggtgatcacgcttggtacgctatatctgtacggcggcggcgcgctgttgctttccgggatggccggcgcgaccggttacgaggggattggcggttttcccgatagcttcaccgccttcgccaatttaaccctcgccggactgccgctgccgctggtgctattcgcgattatcacctttttcttctggctactggcccatcgcgggcgctttggccgccacctctttttgctcgggcaaaacccgcgcgccgcgcgctatgccgcgctgtcggtgaacggcatcccgtacgtgctgtatggcctggttggcgtcgcctcggcggtcgcggcgctggtgatggtctcctatttcggctcggcgcgttcggatttgggccgcgacctgctgatgccggcgctgaccgcggcggtgctcggcggggccaatatttacggcggctcgggatcgatactgggtaccgcgctggcggcattgctggtggggtatctgcaacagggtttacagatggtcggcatccccaaccaggtgtcgagcgcgctgtcaggggcgctgttggttgtggtggtgatggggcgttcgctgagcctgcaccgtgaatgggtgcgcgcgacctggcggcgtcttttctcgcataaaacaatcggagcataa

SEQ ID NO: 88570 - DNA, 1035 bp, Enterobacter aerogenes
atgaaaacgttactgaagaatcgcgaactgagcgccttctttgccatcgtggcgctctttgtcgtgctggtggcgctcaatccagcctatttcagcctgcagaccctggcgattattttcgccagctcgcagatcctctgcctgctggcattgggcgcgacgctggtgatgctgacccgcaatattgacgtgtcggtaggttcgaccgttgggctgtgcgccatcgccgtcggtgtggcgttgaacaacggttacgggctggcgacggctatcgccttcgcgctggcgattggcgcgctggccggagcttttaacggcctgctggtcgtggggctgcgcatcccggcgatcgtcgcgacgctcggtacgctggggttgtatcgcggggtgatgctgttgtggaccggcgggaaatggatcgagggtttgcccgacagcctgaaatcgctctcggagcccgcgtttatcggcgtgtcgccgctgggctggctggtgctggcgctgctgctggcaggcggctggctgttgtcgcgtacctcctttggtcgtgatttttacgccgttggcgataacctcgccgccgcgcgccagctgggggtggcggtcaaccgtacgcggatgctggcctttaccctcaacggtatgctggcggcctgcgccgggatcgtcttcgccgcgcagattggttttgtgcctaatcagaccggcagcggcctggagatgaaagccatcgccgcctgcgtattgggcgggatctcgctgctcggcggcactggcacgttgcttggcgcgtttctcggcgcctttttcctcacccaaattgacaccgtactggtgctgttccgccttcccgcctggtggaatgactttatcgccggcctggtgctgctcggcgtgctggtgctcgatggccgcctgcgtcaggcgctgacccgccatcagcgggcgctgaagtacagccgttttcagccaggtaacaaaggaagcaaacaggttgcccgctttcccgaacgcaaaagcaaagaggtggcttaa

SEQ ID NO: 88571 - DNA, 1488 bp, Enterobacter aerogenes
atgaagccactgcttgaagctcgccagatttgcaaacagttctccggcgttgcggtgctcaagggcattgatttcacgctaggcgcgggccaggtgcatgcgctgatgggcggcaacggcgcgggtaaatcgacgctgatgaagatcatcgccggcgtcgaaacgccggatagcggtgaactgacgatcggcgaacgcgcgtttgcgcgcctcaatccggcgctggctcatcagttaggcatctatttggtgccgcaggagccgatgctgtttcccaacctcagcgtgcgcgagaacattcttttccgcctgccgaagcgggcggataccgtcgcgcggttgcaggacaaactgcagcagttgaactgccagatcaacctcgacgccagcgccagcacgctcgaggtagccgatcaacagatggtcgagatcctgcgcgggctgatgcgcgaggccaggatcctgatcctggatgaacccaccgcctctttaacgccgggtgaaaccgagagactgtttagccagatccgcgcgttacaggcgctggacgttgggatcgtctttatctcacacaaattgcccgaaatccgccagcttgccagccatatttcggtgatgcgcgacggcgcggtggtgctgagcggcgagaccgcggcataccgcgatgagcaactgattaacgcgatgacgccggtcagccgcgaccatgcgctgagcgacacgcaaaagctgtggctgtcgctaccgggcaaccgccgtactcaaccgcaggactttcccgtgctgcgggtggaagatcttaccggcgaaggctttatcgatctcaatctggagatccgcgccggagagatcgtcggtctggccgggttggtgggatccgggcgcaccgaatttgctgaaaccttatacggcctgcgtacaccgcgcgccgggcgaatctggctggagaaccgcgagattagccgcgacagcacccgcgccaggttggccagcgggctggtctatctgccggaagaccgccaggtctcggggctgtttctcgatgcgccggtgcgctggaacacggtgatgttcaatcagccgtcgtggtggcagcaggggaaacgggaggcggcggtggttgaacgctatcaccgggcactggggatcaagctggccgatggcgatcagccggtgcgcactctctctggcggtaaccagcagaaggtgctgctggcgcgctgtctggaagctaatccgttactgctgattgtcgatgagccgacgcgcggcgtggatgtctccgcccgcgccgatatctatcaactgctaaaaagcgttgccgcgcaaaacgtggcggtgctgatgatctcttccgatgtggatgagttcgtcgatcttgccgaccgggtgttggtgatgcatcagggccgctacagcggtgagctggcgcggcaggcggtgaccgtcgatcgcatgatgaccctggccttcggaggacaggcatga

SEQ ID NO: 88572 - DNA, 972 bp, Enterobacter aerogenes
atgagcgaaaaacgcattacggaagagaaccgctacgccgggctggcgttagccgaggaagagctggtggcgcgggtggcgtggtgctactaccacgacggcctgacgcaaaatgacatcggcgagcgtttggggctgccgcggctgaagatttcccgtctgctggagaaaggccgccagtccggggtgatccgcgtgcagatcaactcgcgctatgagggctgtctggcgctggaaagtgaactccagcagcgttttggcctcaagattgcccgcgtgctgccggcgctcaacaccccgccgatgaatacccggctgggtatcggcgcggcgcagtcgctgatgggcattctgcaaccggggcaattattggcagtcggtttcggcgaagccaccatgagctgcctgcagcatctcagcggctttatcggctcgcagcaggtgcggctggtgaccctctccggcggcgtcggcccctatatgaccggcatcggccagcttgatgccgcctgcagcgtcagcattattccggcgccgctgcgggtctcttcggcggaggtcgccgagatcctgcgccgcgagtcgagcgtgcgcgacgtgatgctggcggcgacggcggcggacgcggcggtggttggcattggcgccatcgatcagcggcgcgacgccaccattttacgctccggctatatcagcgagggcgaacagctgatgtacgcgcgcaaaggcgcggtcggcgacattttaggttatttcctgcaggccgacggccggccggtagaaggactggagatccatcgggaactgctcggcgtaacccttgatgagctggcgcagctgccaaccatcgtcggcgtcgccgggggagaacaaaaagcgcaggcgattcatgccgctctgattggcaagcgcattaatggcctggtaacggaagagacaacagcacgcgcggtgctcgcactggcctcctga

SEQ ID NO: 88573 - DNA, 1599 bp, Enterobacter aerogenes
atgagttacctgttagcgttagatgccgggaccggcagcattcgggcggtcattttcgatcttaatggccgccagttggcggtaggccaggccgaatggaaacacctgagcgtcgataacgtccccggctcgatggagttcgaccttaccaccaactggcagctggcctgccagtgcattcgccaggcgctcgatgccgcccggctctctgccgccgatattcagtccgtcgcctgctgttcgatgcgcgaagggatcgtcctctatgaccgcgacggcgaggccatctgggcctgcgccaacgtcgatgcccgcgccagccgcgaagtggcggagcttaaggagatccacgactatcgttttgaatccgaggtatacgaggtctcgggacaaaccctggcgcttagcgccatgccgcgcctgctgtggctggcgcaccaccgccccgatatctaccgcaaagcggcaaccatcaccatgatcagcgactggctggcggcgaagctatccggcgagctggcggtcgacccgtcaaacgccggcaccaccggcatgctcgacctgttcagccgcgactggcgtccggcgctgctggatatggccgggctgcgcgccgatatgctgtcgccggtcaaagagaccggtaccctgctgggcgccgtcaccgaagcggcggcgcagcagagcggcctgcgcgccgggacaccggtggtgatgggcggcggcgacgtccagctcggctgcctgggccttggggtggtgcgcgccgggcaaaccgcagtactcggcggcaccttctggcagcaggtggtcaacctgccgcaggtgcgtaccgatccgcagatgaatattcgcgttaatcctcatgtcattcccggcatggcgcaggcggaatcgatcagcttctttaccgggctgaccatgcgctggttccgcgacgccttctgcgctgaagaaaaactgattgccgagcggctcggcgttgatgcctattcactactggaagagatggccagccgcgtgccagccggttcccatggcgtgatgcctattttttccgacgccatgcactttaagcagtggtaccacgccgcgccgtcgtttattaacctctccatcgatccggagaagtgcaacaaagcgaccctgttccgcgcgctggaggagaacgcggcgattgtctccgcctgcaacctggcgcagatttcacagttctccggggtgacattcgagagcctggtgtttgccggcggcggctctaaaggcgcgctgtggagccagatcctcagcgacgtcatcggcctgccggtgcgggtgccggtcgtccgcgaagccaccgctctgggctgcgccatcgccgccggaaccggcgccggactgtatggcgatatggccagtacaggagaacggttagtgagctggcaccgcgagttcaccccaaatccgcagcatcgcgagctgtatcaggagatgatgagcaagtggcagacggtgtacgccgatcagcttggccttgtcgatagcgggctgacaacatcgatgtggcaggcaccgggcctggagcgccgccagcgcgtagcgtcttccccgtcaccctaa

SEQ ID NO: 88574 - DNA, 2022 bp, Enterobacter aerogenes
atgagccgctatccgtcgcttttcgccccgcttgagctgggcttcacaacgctcaaaaaccgcgtgttgatgggctcaatgcacaccgggctggaagagctgccggacggcgcacagcggctggcggccttttacgccgaacgcgcccgtcacggcgtggcgctgatcgtcaccggcggcatcgctccggcgccctctggcgtcaccatggccggcggcgcgctactcaacgatgccagccatctggcccaccatcgccatattaccgacgcggtacatcaggaaggcggcaaaatcgccctgcagatcctgcacaccgggcgctacagctaccagcccgcgctagtagccccttcggcgctacaggcgccgattaaccgttttacaccccatgaactgagccacgatgagatcctgacgctgatcgatgattttgcccactgcgcccaactggcgcgtgaagcgggatatgacggcgtcgaagtgatgggctctgagggctatctgattaacgaatttctcgccgcgcgcaccaaccagcgcgacgaccaatggggcggcgattatgtcaggcgcatgcgtttcgccgtagaggtggttaaggcggtacgccagcgcgccggccacgatttcattatcatctaccgtctgtcgatgctcgatctggtcaacgacggcagcacgctggcggaagtcaccgaactggccaaagcgattgaagcggcgggggcgacaattatcaacaccgggattggctggcacgaagcgcgcattccgaccatcgccacgccggtaccgcgcggagctttcagttgggtcacccgcaagctgaaaggcgcggtgtcgatcccgttgatcaccaccaaccgcatcaacgatccgcaggtcgcggaggatattctcgcccgcggcgatgccgatatggtatcgatggcccgcccgttcctcgccgacgccgaatttatgtcgaaagcgcagcgcgatcgcgccagggagatcaatacctgcatcggttgcaaccaggcgtgtctcgatcggatcttcgccggcaaagtcacctcttgtctggtcaacccgcgcgcctgtcatgaaaccctgatgccggtcctgcctgccaacgcgcctaaacggctggcggtggtcggcgccgggccggccggtctggccttctccgttaacgtcgccgcccgcggtcatcatgtcacgttgttcgatgcgctcccggagatcggcggccagtttaatatcgccaaacagatccccggcaaagaggagtttcacgagacgttgcgttactaccgcaccatgctcgatcttcatggtgtcgatctacgcctgaacacccgcgtcacgacagacgatctgctggcgttcgatgagacgatcctcgccaccggtatcgccccgcgcctgccggcgatcgacgggatcgatcatcccaaagtgctgagctaccttaatgtcttgcgtgataaagcgccggttggcgcgaaggtggctattatcggctgcggcggcatcggcttcgataccgccatgtatttaagccagtcgggcgtggccaccagccaggatatcggcgagttctgccgcgaatggggtatcgataccagcctgcaaacggcgggagggctgagtcctgagggcccacagctgagtaaaagcccgcgacagattgtgatgctacagcgcaaagccagcaaaccgggcgaagggctcggcaaaaccaccggttggatccaccgcgcgacgctgctggcgcgcggcgtgaaaatgatcccagcggtcagctatgaaaagatcgatgatgaagggttacatgtcactatcggcggcgagcgccaactgttggcggtcgatcaggtggtgatctgcgccggtcaggaaccgcgccgcgagctggcggatccgctgcgcgcggcggggaaaacggtacatctcatcggcggttgcgacgtggcggcggagctggatgcgcgccgggcgattgcccagggcacaaaactggcgctggcgatttag

SEQ ID NO: 88575 - DNA, 1131 bp, Enterobacter aerogenes
atgagccaggtagagttaaacggtgagttattcacattagagcggttcccacctaacgctgaagaagaagcgcttcaggcatgggaagcggcggatgaatatctgctgcaacaggtgaatgacgtcgacggcctgacgctcatcttcaacgacggcttcggcgcgctctcctgcgcgttggctgagcgcaacccggtcagcatcaacgattcctttatttccgagctggcgacccgccacaacctgcggatgaacggtatcgatgaagagagcgtgcgctttcaggatagcctgagcccgctgcccgccgcgccggcgctggtgctgattaaggtgccaaaacagctggcgctgctggaacagcagctgcgcgcgctgcgcgaagtggtgacgccggagacccgcattatcgccgcggcgaaagcccgagatgtgcataactcgacgctggcgctgtttgaaaaaatcctcggcactaccaccacctcgctggcgtggaaaaaagcgcgtctgatccactgcgttttcaccgcccctaagcttgccgatgcgccgcaaacctacagctggaagctggacggcacgccgtggaccatccataaccacgccaacgtttttgcccgcagcggcctggacatcggcgcgcgtttcttccttcagcatttaccgtctgatttagaaggcgagatcgccgatctcggctgcggcaatggggtgattggcctgcaggcgctggcgcaaaatccaaacgccagcgtgatgttcaccgatgagtcgcacatggcggtggcttccagccgtttgaacgtcgagcgcaacctgccggacgatatcgcacgctgtgaatttatggtcaacaattcgctttccggcattgagcccgaccgctttacggcgattctgtgtaatccgccgttccatcagcagcatgctattaccgaccatatcgcctggcagatgtttaacgatgcccgccgcagcctgaaatacggcggcgagctgtacgtcgtcggcaaccgccacctcgattacttccgtaagctgaagcgcgcttttggtaattgcacgacgattgcgacgaacaataagtttgtcattttgaaagcaacgaaggtgcgtaagcagcgctga

SEQ ID NO: 88576 - DNA, 501 bp, Enterobacter aerogenes
atgaacacgctaccttaccttcagggctaccccgaatcgctgctgtcgcaggtgaccaccttaatcgagcaagaccgtctcggcgaggtactgcaaaagcgctatccgcaggggcatgatgtcaacagcgataaggcgttatatcaatacacccaggatctgaaggcccgctatctgcgcggggcggcgccaatcaataaggtgatgtacgacagtaagatccacgtgctgaagaatgcgcttggcctgcataccgccatttcccgcgttcagggcggcaaactgaaagctaaagcggaaattcgcgtagcgacggtgtttcgcgacgcgccggaagcgtttctgcgtatgatcgtggttcatgaactggcgcatttaaaagagaaggatcacaacaaggccttctatcagctgtgctgtcatatggagccgcagtaccaccagctagagtttgatacccgcctgtggctgacgcacctttcgttaaaccgttctgcgtga

SEQ ID NO: 88577 - DNA, 990 bp, Enterobacter aerogenes
atgatacgtttcgcagttgttggcacaaactggattactaagcagtttgtcgatgccgcccatgaaaccggtaaatttaaactcaccgcgatttattcccgcagccttgaacaggcgcaagctttcgctaatgactacccggtcgagcatctgtttacctcgctcgatgaactggcgcagagccctgacgttgacgcggtctatattgccagcccgaactcgctacacttcccgcaaacccgcctgttcctgagccataaaaagcacgtgatttgcgaaaagccgctggcatcgaacctgcaagaggttgaagcggcgattgccgtggctaaagaaaacaacgtggtgctgtttgaagccttcaaaaccgccagcctgcccaacttcctgctgctgcgcgaagcgctcgataaagtgggcaaattacgtaaagccttcatcaactactgtcagtactcttcgcgttatcagcgctatctcgacggcgaaaatccaaataccttcaacccagccttttccaatggctcgattatggatatcggtttttactgcctcgcctcggcggtcgcgctgtggggcgaaccgcaagcggtccatgccagcgccagcctgctggagagcggcgttgatggccagggtacggtggtgctgagctacggcgatttcgatgtcaccctgcaccactcgaaggtcagcgactccactatccctagcgaaatccagggtgaagaaggcgcgctggtgattgagaaaatctccgaatgccagaaggtagcctttattccacgcggcggaaaagcgcaggatctcactcagcctcagcacatcaatactatgctgtatgaagcggaagcgttcgcgcggctggtggaaaccaacgacgtcgctcatccagggcttgaagtcagccgcattacggcaaaactgcttagcgaaatccgtcgccagaccggcgtggtcttcccggcggatactcaacctataccctaa

SEQ ID NO: 88578 - DNA, 969 bp, Enterobacter aerogenes
atgaatagtgtcggcacgccgttgttatggggcggattcgctgtagtcgtggccatcatgctggcgatcgatttactgcttcagggaaggcgcggtgcgcataccatgaccatgaagcaggccgccggttggtccatcctgtgggtcaccctctccctgctgtttaacgccgctttctggtggtatttggtgcaaacgcagggccgcgccgtcgccgatccgcaggcgttagccttcctcaccggttatctgatcgaaaaatcactggcggtcgataacgtcttcgtctggctaatgctctttagctactttgccgtgccgccagcgctacagcgccgggtactggtgtatggcgtcctcggggcgattgtcctgcgtaccattatgatcttcaccggcagctggctgatttcgcagttcgaatggctactgtacgtgttcggcgcgttcctgctgtttaccggggtgaaaatggcgctggcgaaagaagatgattccgggatcggcgataagccgctggtgcgttggatccgcggccatctacggatgacggataaaatcgagagcgagcgcttcttcacccgtaaaaatggcgtactgttcgccacgccgctgctgctggtgctgatcctggttgagctgagcgacgtgattttcgccgttgatagcatcccggcgattttcgcggtgaccaccgacccgtttatcgtgctgacctctaacctgtttgcgattctcggcctgcgtgcgatgtatttcctgttggcgggcgtcgccgaacgcttctcgatgctgaaatatggtctgtcggtgatcctggtgtttatcggtatcaagatgctaatcgtcgatttctaccacattccgatcgccgtttccctcggcgtggtgggcggtatcctggcggcgacgctgctgattaacgcctgggtgaacaaacagaacgataagaagaaacagctgcaataa

SEQ ID NO: 88579 - DNA, 1248 bp, Enterobacter aerogenes
atgacaacacaaacccgcccgtcggggctgctgcagcgcctggcgcagggcagtctggtgaaacaaatcctgttgggactggtacttggcgtggtactggcgctggtctcgaaaccggccgctatcgcggtcgggctgctgggaacgctgttcgtcggcgcgctgaaagccgtcgcgccggtactggtattaatgctggtgatggcgtcgatcgcaaaccatcagcacggacaaaaaaccagtatccgcccgattctgtttctctatctgctggggaccttcagcgcggcgctcaccgcggtgctgtttagctttgttttcccttctacgctgcatctgaccagcgcggcggacagcatcaccccgccatcggggattgtagaggtgctacgcggactgctgatgagcatggtggctaaccctatcgacgcgctgctgaacgccaactatatcggtattctggtgtgggcggtggggctgggcttcgcgctgcgccacggtaacgacagcactaaaaacctgattaacgacgtttcgcacgcggtgacctttatcgtcaagctggtgatccgctttgcgccgctgggtatttttggcctggtctcctcaacgctggcgacgactggtttcgataccctgtggggctacgcccagttgctgctggtgctgatcggctgcatgctactggtggcgctggtgattaacccgctgctggtattctggaaaatccgccgtaacccgtatccgctggtgctgacctgcctgcgtgaaagcggcgtctacgccttctttacccgcagctccgccgccaacattccggtgaatatggcgctgtgcgagaagctgaatctggatcgcgatacctattcggtatctattccgctgggggcgaccatcaatatggcaggcgcggcgattactatcaccgtgctgacgctggcggcggtacatacgttgaatattccggtggatctaccgacggcgctgctgctgagcgtagtggcctcgctgtgcgcctgcggcgcttccggggtggcaggcggttcgctgctgctgatcccgctggcctgtaacatgttcggtattccgaacgatgtcgccatgcaggtcgtcgccgtcggctttattatcggcgtgctgcaggattcctgcgaaacggcgctcaactcgtcaaccgatgcgctgttcaccgccgcggcctgtatggccgaagacgaacagctggcgaagaacgccctgcgtagttag

SEQ ID NO: 88580 - DNA, 1488 bp, Enterobacter aerogenes
atgcaatacatcaaaatccattcgcaggataacgtcgcggtggcgctggcggatatgacgtcaggcagcgtggtgacgattgataacgataccgtcacccttagccaggatgttgtccgcggtcataagttcgcgctgcgggccattgcgaaaggtgaaaacgtcattaagtacgggttgccgattggtcatgcgctggcggatatcgcgccgggcgagcatgttcatgcgcacaatacgcgtaccaatctgagcgatcttgacgcgtatcgctatcaaccagaccgggttgaacaaccggcgcaacctgcggatcgcgacgtcgagatttatcgtcgcgccagcggtgaagtcggcgtgcgtaacgaattatggatcctgccgaccgtgggctgtgttaacggcatcgcccggcagatccagaatcgtttcctgaaagagaccaatgacgcggaaggcaccgacggcgtcttccttttcagccacacctacggctgctcgcagttgggagatgaccatatcaacacccgtaccatgctgcaaaacatgggccgccacccgaatgccggggcggtgttggtgattggtcttggctgcgagaacaaccaggttgataccttccgtgaaacgctgggggattttgacccggaacgcgtgcacttcatgatttgccaacatcaggaagatgaagtggaagcgggaattgagcatcttcatcagctctatgaagtgatgcgccatgataaacgcgaagcgggtaaactgagcgaactgaagtttggccttgagtgtggcggctcggacggcctgtccggcattaccgctaacccaatgctggggcgtttttctgactacctgattgcgaacggcggcactacggtgttgaccgaagtgccggaaatgttcggcgctgagcaactactgatgagccactgtcgcgacgaagagactttcggcaaactggtcaccatggtcaatgattttaaacagtattttatcgcccacgaccagcctatctacgagaacccgtcgccgggtaacaaagcgggcggtatcacgacgctggaagataagtcgcttggctgcacgcagaaagcgggttccagcgaggtggttgacgttctgcgctacggtgaacgtttgaaagtccacgggttgaatctgttgagcgcgccgggtaacgacgcggtggcgaccagcgcgctggcgggcgccggctgccatatggtgctgttcagtaccggccgcggcaccccttatggcggtttcgttccgacggtaaaaatcgctaccaacagcgagctggcggcgaagaaaaagcactggattgatttcgatgccgggcagttaattcacgggaaagcgatgccgcaggtgttggaggagtttgtcgatctgatcgtcgatatcgccaacggcaagcagacctgcaacgaacgcaatgatttccgcgaactggcaatctttaaaagcggcgtcacgctgtaa

SEQ ID NO: 88581 - DNA, 1413 bp, Enterobacter aerogenes
atgacaccgtttatgaccgaagattttctgcttgataccgagtttgcccgccgtctgtaccacgattacgccaaagatcagccgattttcgactaccactgccaccttccgccgcagcaggttgccgaaaattatcgttttaagaacctgtatgacatctggctgaaaggcgaccattacaaatggcgcgcgatgcgtaccaacggcgtggcggagcgcctgtgtaccggcgatgctgccgatcgcgagaaatttgacgcctgggcggcaaccgttcctcataccatcggtaacccgctataccactggacgcatttagagctgcgccgtccttttggtattacaggtaagttgttgtcgccagccacggcggatgaaatctggaaccagtgtaatgagttgctggctcaggagtcgttctccgcccgtggaatcatgaagcagatgaatgtgaagatggtggggacgaccgacgatccgattgattcactggagcatcatgctgcggtcgctaaagatagtacttttgatatcaaggtattgccgagctggcgcccggataaagcgttcaacatcgagcaggccacttttaacgattacatgagcaagcttggcgaagtctccgataccgagattcgccgttttgccgatctgcaaagcgcgctgactaagcgtctggatcactttgccgctcacggctgtaaagtttccgaccacgcgctggacgtggtgctgttcgctgaagcgagcgataacgaactggatagcattctggcgcgccgtctggcgggcgaaacgctcagcgagcatgaagtcgcgcagttcaaaacggcggtactggtgttcctcggtgcggaatacgcgcgccgtggctgggtacagcagtaccacatcggcgcgctgcgtaataacaacctgcgtcagttcaaactgttagggccggatgttggcttcgactccatcaacgaccgtccgatggccgaagagttatcgaagctgctgagcaagcagaacgaagaaaacctgctgccgaaaactattctgtactgcctgaacccacgcgataacgaagtgctgggcactatgatcggtaacttccagggcgaaggcatgccgggcaagatgcagttcggttccggctggtggttcaatgatcagaaagacggcatggaacgtcagatgacccaactggcgcagcttggcctgttgagccgctttgtcggcatgctgaccgacagccgcagcttcctctcctacacccgccacgaatacttccgccgtattctgtgccagatgatcggccgctgggtggctgctggcgaagcgcctgcggatatcgcgctgctgggcgagatggtgaaaaacatctgctttaacaatgcgcgtgattacttcgccattgaattgaactaa

SEQ ID NO: 88582 - DNA, 1302 bp, Enterobacter aerogenes
atgcgtaaaattaaagggttacgttggtatatgatcgcactggtgacgctgggcaccgtgctgggttacctgactcgtaacaccgtagcggcggctgcgccgacgctgatggaagagttgcacatttcaacccaacaatattcttatatcatcgccgcctactccgctgcatataccgttatgcagccggttgccggctatgtgctcgatgtgcttggcaccaaaattggctacgccttctttgctatcgcctgggcggtattctgcggttcaacggcgctggcaggcagctggggcggcctggcgctggcccgcggcgcggtcggcgcagcggaagcagcgatgatccctgccggtctgaaagccagctccgaatggttcccggcgaaagagcgttccatcgccgtcggctatttcaacgtcggctcttctatcggcgcgatgatagctccgccgctggtggtatgggcgattgtcatgcatagctggcagatggcatttattatttccggggtactgagcttcgcctgggcaatggcctggctgattttctacaaacacccgcgcgatcagaaaaaactcaccgatgaagaacgtgactacatcatcggcggccaggaatctcagcatcagaccaataacgcgaagaaaatgtcgccgtggcagatcctgcgtaaccgtcagttctggggtattgcgctgccgcgcttcctcgcagaaccggcctggggtaccttcaacgcctggatcccgctgttcatgtttaaggtttacggctttaacctgaaagagatcgccatgttcgcctggatgccgatgctgttcgccgacctcggctgcatcgtcggcggctacctgccgccgctgttccagcgctggtttggcgtgaatcttatcgtctcacgtaaaatggtcgtgacgatgggcgccctgctgatgattggtcctggcatgattggcctgttcaccagcccgtatgtggcgattgcgctgctgtgcgtcggcggttttgctcaccaggccttgtcgggtgcgctgatcaccctctcttccgacgtctttggtcgtaacgaagtggcgaccgccaacggtctgaccgggatggcggcatggctggcgagcaccatgttcgcgctggtcgtcggcgcactggcggataccatcggcttcagcccgctgttcgcggtgctggcggtctttgacctgctgggcgcgctggttatctggacggtgctgaaaaacaaatcggccgacgatgactcgacgccgctcaataccagtaaaccggtgacgcaaagctaa

SEQ ID NO: 88583 - DNA, 777 bp, Enterobacter aerogenes
atggaaatcagtgaaccgcgccgtctctatcagcagcttgccgctgagctaaagacgcgtatcgaacaaggcgtttaccttgtaggggataagctgccagcagagcgcttcatcgccgatgaaaaaagcgtcagccgcaccgtggttcgcgaagccatcatcatgctggaagtcgaaggctatgttgaagtccgcaaaggctccggcatccacgttatttccaaccacccgaaataccagcaggtggtggatgaatcgctggagttcgccaactatggtccgtttgaattactccaggcccgtcagttgattgagagcaatatcgctgaattcgccgcgactcaggtgaccaaacaggacatcatgaagctaatggaaattcaggagaaagcccgcaacgagaagtgcttccgtgattccgaatgggacctgcagttccatgtccaggtcgcgctggctacccagaacaccgcccttgccgccatcgttgaaaaaatgtggacccagcgggtacacaacccgtactggaaaaaactgcacgaccacatcgacctgcgcaccgtcgacaactggtgcgacgatcatgaccaaatcctcaaggcgttaattcgtaaagatcctcacgcggcgaagctggcgatgtggcagcatctggaaaataccaagctgatgctgtttaacgaaaccagcgatgactttgaattcaatgccgatcgctacctgtttgccgaaaatccggtggttcatctcgataccgcggcgaacggggcaaaataa

SEQ ID NO: 88584 - DNA, 663 bp, Enterobacter aerogenes
atggaactactaacccaattactgaatgccttatgggcccaggattacgaaacgctcgctaatccctccatgattggcatgctctattatgtcttatttatgattttgttccttgagaacggtttactgccggcggcgtttttaccgggtgatagcctgctggtgctggtcggcgttttgatcgccaaaggggcgatgggcttcccggaaacgctactgcttttgacggcggcggccagcctcggctgctgggtgagctacatccagggacgctggctgggcaatacgcggatcgtgcaaaactggctatcgcatttaccgtcgcattatcaccagcgagcccatcacctgttccacaagcacgggttatcagcgctgctaattggccgctttatcgccttcgtacgtaccctactgccaacgattgccggtatctccggtctgaataacgcgcgtttccagttctttaactggatgagcggtctgctgtgggtgttgattcttacctctctcggctatctgctgggtaaaacaccggtattcctgaagtatgaagatcagctgatgtcgtgcctgatgctgctgccggttgcgctgctggtcttcggtctgatcggctccctggttgtactgtggaagaaaaaacacagcagtcggagctga

SEQ ID NO: 88585 - DNA, 384 bp, Enterobacter aerogenes
atggtcatcaaacgtccttcctggcgccagctgcggtggatgctgggcggctcactgctgctttgcgccatcgtctggctgtggctgaccgtcagtcagcatgagtccactctggccatccgtcccgtcagccagggcgtcgctatgccggacggtttttccgtctggcatcatcttgacgccaacggcatccgttttaagagcatcaccccgcaaaaagacggcctgctgatcaaattcgattccaacgctcagggcgccgcggcaaaagaagtattgggccgggctctgcctcacggttatattattgctctggtggatgaagaaaattctgccaccgcctggttatcccgcctgcgcgatgctccgcgccgttttggataa

SEQ ID NO: 88586 - DNA, 369 bp, Enterobacter aerogenes
atgaaataccgcatcgcactattactggcactgacctcacttagcgccagcgccttcgcagcctctccttgtcaggaaaaagaacagagtatccaacgggagatcagctatgccgaaaaacaccataatcagcatcgcattgacggcctgaacagagcgctgcaggaagttcgcgctaactgcagcgacagtaaagtcagggctgatcatcagcggaaaatcgctaaacagaaggccgaagttgccgaacgtcagcgcgatctgagcgaggcgaagcagaaaggcgatgcagacaaaattagcaaacgggaacgcaaactggatgaagcgcagcaggaactgaaagcgcttgagtcacgcgattattaa

SEQ ID NO: 88587 - DNA, 306 bp, Enterobacter aerogenes
atggctaaagataacgttgcagaagatctacgcgctgagctgaaaaatctggctgatacgctggaagaagttctgaactcctcaaccgataaatcaaaagaagaactcggcaaactgcgtagcaaagcggaaagcgtgctgaaagacagccgtgtgcgtctcagcgacaccagcgatgccatcgttaagcagacgcgtgaaaccgctgctcgcgccgatgagtacgttcgcgagaatccgtggaccggcgtgggtattggcgcagctgtcgggctggtggtcggcgtactgctgtcgcgccgttaa

SEQ ID NO: 88588 - DNA, 399 bp, Enterobacter aerogenes
atggcaaactctcaacacacgcagggcccgggacagagcgtattcggcatcggccagcggatcattacgctgctggtcgaaatggtggaaacgcgtttgcgcctggtcgtcgtggagctggaagaggagaaagcgaacctcttccagctgttgctgatgctcgggctaacgctgctattcgccgcttttgggctgatgagcctgctagtgctgatcatctgggccgtcgatccgcagtaccgtctgcatgtaatgatcgcgaccaccagcgtcctgttgctcgcctcgctaatagggggaatttggaccctcaggaaagctcgccgctcaacgtttttacgtcatacccgcgacgaactggcgaacgatcgcgcgctgcttgaggacgatcgtcgatga

SEQ ID NO: 88589 - DNA, 297 bp, Enterobacter aerogenes
atgagcggccaacaggaacgcgaccagcgaaaagcgctgctgctgcgccaaatccagcaacagcggctggatttggccgccagccatcgtcactggctggaagccacctcgcctatcgatcgcggctggcaaacgctgaaacacctgcgttcatgggcgatggtcggcagcggggtaatggctatctggtcagtgcgccatccgcgctttttaatccgctggggcaaacgcggcctcggcatctggagcacctggcggatggtcaaagggattctgcgtcagtccgcatcgcgttaa

SEQ ID NO: 88590 - DNA, 198 bp, Enterobacter aerogenes
atgacattagcagaatggtttgaagagcgtgggcgcacaaagggaagaaaacagggtcgtgaagaaggtagagaagaaggcgaacgtcaggcgacgcgtaaaatagctcttgcgatgcttcgtaacggcgttgatagcgcgctggtcagtaaaaccaccggtttaagcgaacaagagctcagcgcgctggcgcactga

SEQ ID NO: 88591 - DNA, 393 bp, Enterobacter aerogenes
atgaaaaaattagaagatgttggtgtactggtagcgcgtattctgatgccgattctgttcattaccgctggttggggaaaaatcaccgggtatgcaggtacgcagcagtatatggaagcaatgggtgttccgggagcgctgctgccgctgactattctgcttgagtttggcggcggtctggcgattctgttcggtttcctgactcgcactaccgcgctgttcaccgcaggctttaccctgctgaccgcgttcctgttccacagcaactttgctgaaggcgtgaactcgctgatgttcatgaaaaacctgaccatcgctggtggttatctgctgctggccgtgacgggtccgggcgcattcagcatcgaccgcgtgctgaataaaaagtggtaa

SEQ ID NO: 88592 - DNA, 987 bp, Enterobacter aerogenes
atgggacaattagtcgacggcgtctggcaagatacctggtatgacaccaaatccaccggaggacggttcaagcgttccgtttcagccttccgcaactggctcaccgccgatggcgcgccaggccctgcgggcgaaggtggcttcgccgcagagaaagaccgctatcatctgtacgtttcactggcctgtccgtgggcccatcgcaccctgattctgcgcaagttgaaaggattagagccctttatatccgtctcagtggtgaatcccctgatgctggaaaacggctggaccttcgccgacgatttcccggatgctaccggcgaccagctctatcatcatcagttcctctatcagctttatctgcaggccgatccgcattacaccggccgggtgaccgttccggtgctgtgggataaaaaacaacagaccatcgtcagcaatgagtcggctgaaattatccgcatgttcaataccgcgtttgatggcctgggggcgcgcgcgggcgactattatccgccggcgttgcgagaaaagatcgacgatctcaatagctggatctacgacaacgttaacaacggggtatataaagccggtttcgccaccagccagcaggcctacgacgaagccgttgacgcgctgtttacctcgctcgaacgccttgagcagatcctcggtcagcaccgctacctgaccgggaaccagttaacggaagcggatatccgcctgtggacaacgctggtccgtttcgacccggtgtatgttacccactttaaatgcgataagcgccgtatcagcgactatctcaacctgtacggtttcctgcgcgatatctaccagatgccggggattgcggaaacggtgaatttcccacatatccgcaatcactattatcgcagccacaaaaccatcaacccgacggggatcatctccgtgggcccgcagcaggatctcaacgaaccgcacgggcgggatcgtttttcccgctga

SEQ ID NO: 88593 - DNA, 369 bp, Enterobacter aerogenes
atggactggtatctaaaagtattacgaaactatattggctttggcggtcgcgcccggcgcaaagagtactggatgtttattctggtcaacatcattctcaccgcagtgctaagcatcattgataagatgctcggctggcaacgtgctgggggtgaaggcatcctgacgaccatttacggcgtgctggtttttttaccctggtgggcggtccagtttcgtcgcctgcatgacaccgaccgctcggcgtggtggctactgctgctgctgatcccggtcatcggctggctggtgattttgattttcaattgtcagaacggcacgcccggcaacaatcgctttgggccaaatccaaaaccctactcctactga

SEQ ID NO: 88594 - DNA, 897 bp, Enterobacter aerogenes
atggcgaaagagagagcattaacgctggaagcgttacgcgtaatggatgcaatagaccgacgcgggagctttgccgctgcggctgacgagctggggcgtgtgccttcagccctaagctacaccatgcaaaaactggaagaagaactggatgtggtgttgtttgaccgttccggccatcgcacaaaatttacgaacgttggccgcatgctgctggaacgcggccgcgtgctgctggaagcggcggacaagctgactaccgatgccgaagcgctgtcgcgcggctgggaaactcacctgaccatcgtgaccgaagccttggttcctaccaccgatctgtttccgctgattgagaaactggcgactaaatccaatacccagctgtcgattattaccgaagtgctggccggtgcctgggaacggctggagcagggacgtgctgatattgtcgtcgcgccggatatgcattttcgttcatcgtcagaaattaactcgcgtaagctctattcggttttaagcgtttatgttgccgcgccggatcacccgattcatcaggagccagaaccgctttctgaggtgacgcgggtgaaatatcgcggcgtcgcggtggcggataccgcgcgcgagcgtccggttctgacggtgcagctactggataagcagccgcgtttaaccgtcagcactattgaagataaacgccaggcgctgctggcggggctcggcgtggcaaccatgccgtatccgttggttgagaaggatattgccgaagggcgcttgcgggtcgtaagccctgaatataccaacgaaatcgatatcattatggcctggcgccgcgacagcatgggcgaagccaaatcctggtgtctgcgggagatcccgaaactgtttaccggaagataa

SEQ ID NO: 88595 - DNA, 702 bp, Enterobacter aerogenes
atgattacaacccgaacagccaaacaatgcggtcaagcagacttcggctggctgcaggcccgctacaccttttcctttggccactacttcgaccctaaattgctgggttacgcctcattgcgcgtactcaatcaagaagtgctggcgccgggcgcgtcatttcagccgcgcacctacccaaaggtcgatatcctgaatctgattctggaaggtgaagcggaataccgcgatagcgacggcaaccatgtacaggcaaaagctggcgaagccctgcagctctccacccaaccgggggtcagctacagcgagcataatctcagtaaagagcagtcgttgacgcgcatgcagctatggctcgacgcctgtccggagcgcgaaaacccgctggtacagaaaatgacggttggcgattcgccgattcagctattagcctcaccggacggcagcggcgacagtttacagctgcgtcagcaggtgtggattcatcatctgcagctggcgaagggcgaagagatcaacgttcaactgcacggcccgcgcgcctatctgcagtcgattcacgggacggtacatgccgtggcaaaaaaggaagagaaacaggcattaacctgcggcgatggcgcgtttattcgtgacgaagctaacattaccctcgtcgccgatacgccgctgcgcgctttgctgatagatttaccggtgtaa

SEQ ID NO: 88596 - DNA, 162 bp, Enterobacter aerogenes
gtgagcaagaaaaaaagcaaaaaggcaaaatcgttagaccagccagtcgctgtggaaaccatgagcccaatcggctttggctatgaagagatgctgagtgaactggaagccatcgtggaagatgcgcaaacgcggttgcaggatgaagataacgccgcctga

SEQ ID NO: 88597 - DNA, 411 bp, Enterobacter aerogenes
atgaacaaactttctcggatggtattaatgacggctgtagccgcagggttctccatggcggcacaggccgctgaggttaccgccgcgccggcgccggctcaggatcctatcgttcagcatttaaaattgagccaggatcaggtcgcaaaaattaagagcctgcatcaggaaatggaaaagaacgtccagcagatttcacagaaagatattaaagatggcgtgttatttgacgtgatcgattctggtaagtggaatgaaaaagcggttaaagatcagctggcggcctttagcaaggttgagcaacaggtgcgctattatcgcgtgaagtactatttcggcgtaaatcaggtactgacgccggaacaacgtactcaggtgaaaaaagatctctctcaggcattgagcgagtaa

SEQ ID NO: 88598 - DNA, 789 bp, Enterobacter aerogenes
atgcagtttgcctggaatatcgtggcggcgctgattattctttttatcgggagaatgcttgcaaaagtcctcgccaaaaccttcgagaaaattctgctgcgacgcaacgtagatgcgacaatcgtccacttcttcgccgcgctggtgcgctatatcaccatggcttttgcgattatcgccgcgttaggccgggtagggatcgaaacttcttccatcatcgcggttattggtgcggcgggtctggccattggcctggcgctgcagggctcgctgtcaaattttgccgctggcgtactgctggtgactctgcgtccattcagggcgggtaatttcgtgcaggttggttcggtatcggggatggtgcaatcggtacatgttttttctacgacgctgcttactgtagataataaagaagtcattatcccgaacggtaaaattattgccgatagcatcgttaactactcccgccatccctatcgccgcatcgatcttacgctcggcgtagcgtgtcatagccaaatatcgcacgttaaacaggttatccagacgctcatcgataatgaaaagcgcatcgatcattctcgcggtaccaccgttcgcctgattgagctggcgcccggttcgcttaactttaccattcgcgtatgggtgaaaaatgctgagtattgggacacctatttcgattttctggaaaatatcaaaaatgcgctcgatgaaaataatatcttgctggccgcaccgcgcatggatattaatttaacatcagcggatttagcacgtgttcaataa

SEQ ID NO: 88599 - DNA, 1146 bp, Enterobacter aerogenes
atgaaaatcgtaattgccccagactcttataaagaaagtctttctgccagcgaggtagctcaggcgatagaaaaaggatttcgggaaattttccccgatgcgcaatatgtttctgttccgcttgccgatggcggcgagggaacggttgaggccatgattgccgccacgcagggtacggcgcatacggcgctggtcaccgggccgctgggggaaaaagtgaatgcccgctggggcatgtccggggacggcacaaccgcatttattgagatggccgcggccagcgggctggcactggtaccgcctgaaaaacgtaatcctctgatcaccacttcacgcggaaccggcgagctaattttacaggcgctggagcacggcgcgaccagcattattatcggtattgacggcagcgcgaccaacgacggcggcgccggaatgatgcaggcgctgggcgcaaagctctgtgatgccaacggcagcgacatcggtaatggcggtggttcccttaactgcctgaattcaattgatgtttcgtccatggacccacgtcttaaacactgtgctattcgcgtggcttgcgacgtgacaaatccgttgattggcgaacagggggcatcgcgcatttttggcccgcaaaaaggggcgaccgaagcgctcattgacgagcttgataataatcttgcccactacgcctcggttatcaaaaaatcgctgcgcgtggaggtgaaagatgttcccggcgccggagcggcggggggaatgggggccgcgctaatggcttttctgggggctgaactgcgcagcgggattgagattgtgacgacggcgcttaacctggaagaacatattcacgactgcacgctggtggtaaccggcgaagggcgactcgatagccagagcatcaacggcaaagtaccggtaggcgtagccaatgtggcgaagaaataccataaaccggtgattgctattgccggcagcctcacccgcgatgtcggcgtggtacatcaatatggcatcgatgcggtgttcagcgtactgaccagcatcggctcgctggaagaggcattccgcggcgcattcgacaatatttatcgcgcttcgcgaaatattgccgcgacgctggcgatcggaatgcgttgtgcggggtga

SEQ ID NO: 88600 - DNA, 891 bp, Enterobacter aerogenes
atgacaatcaaagtgggttttattggtcttggcatcatgggcaagccgatgagcaaaaatttgctgaaggcgggttattcgctggtggtatccgaccgtaaccccgaagccattgctgacgtgattgccgcgggcgcagagactgcgagcacggcgaaggccattgctgagcagtgcgatgtaattatcaccatgctgccaaactctccgcacgtgaaagacgttgcgttgggtgaaaacggcattatcgaaggcgcgaaaccgggcaccgtggtgattgatatgagctccattgcgccgctggcgagtcgcgaaatcagcgaagcgctgaaggccaaaggcatcgatatgctggatgcgccggtgagcggcggcgaacccaaagcgatcgacggcaccctgtcggtgatggttggcggcgacaaggcgattttcgataaatactacgacctgatgaaagcgatggcgggatccgtggtgcataccggcgagattggcgcaggcaacgtcaccaagttggccaaccaggtgattgtggcgctgaacatcgcggcaatgtcggaggcgttaactctggccaccaaagccggcgttaacccggaactggtttatcaggcgattcgtggcggcctggcaggtagcaccgtgctcgatgctaaagcgccgatggtgatggatcgcaacttcaaaccgggcttccgtatcgatctgcatattaaagatctggccaatgcgctggatacgtctcacggcgtcggcgcccagctaccgctgacggcggcggtgatggagatgatgcaggcgctgcgcgcggatggcctgggcaccgctgaccatagcgctctggcgtgttactacgaaaaactggcgaaagtggaagtgactcgttaa

SEQ ID NO: 88601 - DNA, 771 bp, Enterobacter aerogenes
atggataacgcaattttcccgaacaaatttaaggccgcgctggcggcccaccaggtacaaatcggctgctggtgcgctctggcgaatccgattagcaccgaggtattagggcttgctggtttcgactggctggtgcttgacgcggagcatgcgccgaatgatgtgaccacacttatcccgcaactgatggcgttgaagggcagccacagcgcgccggtggtccgcgtgccgaccaatgaaccgattatcatcaagcgcatgctggacatcggtttctacaacttcctcgtgccgtttgtcgaaaccgctgaacaggcggcgcaggcggtagcatcgacccgctatccgccggaaggcatccgcggggtctccgtttctcatcgcggcaatatgttcggcatcgtaccggactacttcactcagtcgaataacaacatcgccattctggtgcaaattgagagccagaccggggtggacaatgtcgacgcgatcgccgcgaccgagggcgttgatggccttttcgtggggccaagcgacctggccgcagcattaggccatctgggcaatgccgcacatcctgacgtccagcgcgccatccagcatatcttcgccagcgcgaagaaacacggtaagccgagcggcattcttgcaccggtggaagccgatgcgcgccgctatctggagtggggcgcgaccttcgtcgccgtcggtagcgatttaggtgtcttccgttcagcaacccagaaacttgctgattcttttaaaaaataa

SEQ ID NO: 88602 - DNA, 1572 bp, Enterobacter aerogenes
atggctgagattgagattcgacaacagtcgccgacggcgttttatataaaagtgcaccctaccgataatgtggcgattattgttaacgatcgcggtttacccgccggaacgcgttttccggatggcctgaccctcgttgaacatatcccgcaaggtcataaagtcgcccttgtcgatattcctgcccatggtgaaatcatccgctacggcgaagtgattggcttcgccgttcgcgatataccaaagggaagctggattgatgagtcgttggttgagctgccgaccgcgccgccgctcaacaccttaccgctggcgaccaaagtcccggaaccgctgccgccactggaaggatacacttttgaaggctatcgcaatgccgatggcagcgtgggaactaagaatttgctggggatcagcaccagcgtgcactgcgtcgccggtgtggtggattatgtggtcaagatcatcgaacgcgatctgctcccaaaataccccaacgtcgacggcgtggtcggcctaaaccatctgtacggctgcggcgtggcgattaacgccccggcggcgatcgtaccgattcgcaccatccacaatatcgcgctgaaccccaactttggcggtgaggtgatggtgattggtctgggctgtgaaaagctgcagccggaacgtctgctgcagggaaccgaagacgtgcagccgatcgccgtcgatagcgcaagcgtagtgcgtttgcaggacgaacagcatgtcggctttaaatcgatggtcgatgatattctgcaggttgccgagcgccacctggccaaactcaatgctcgtcagcgtgagacctgcccggcttcggacttagtggtcggtatgcagtgcggcggcagcgacgccttctccggcgtgaccgccaacccggcggtgggctatgcctcagatctgctggtgcgctgcggcgcgacggtaatgttctcggaagtgaccgaggtgcgcgatgctatccatctgttaaccccgcgcgccatcaacgaagaagttggcaagcgcctgctggaagagatggcctggtacgataactatctggagctggggaaaaccgaccgcagcgccaacccgtcaccgggtaataagaaaggcggtctggccaacgtagtggaaaaagcgctgggttcaattgccaaatcaggtaaaagcgccatcgtcgaagtcctttcgccgggtcagcgcccgacgaaacgcgggcttatctatgcggcgacaccggccagcgattttgtctgcggtactcaacaggtggcttccggcattaccgttcaggtgttcaccaccgggcgcggcaccccttacgggctgatggcggtaccggtgattaaaatggcgacccgtaccgagcttgccaaccgctggtacgacttaatggatatcaatgccggtactatcgcgaccggcgaagagacgattgaggaggttgggcagaaactgttcgagttcattctcgacgtcgccagcggacgtaagaaaaccttctccgatcaatggggtctgcataaccagctggcggtgtttaacccggcgccggtgacgtga

SEQ ID NO: 88603 - DNA, 810 bp, Enterobacter aerogenes
atgaacagcagcgagtcatctgccgaaaagcgcattgcgggaacaagtgaaaggcgtgagcagatcatccagcggttgcgacagcagggaagcgtccaggttaatgacctggcggaggcgtatggtgtatcgacggtcacgatacgcaacgatctggcgtttctggaaaaacagggcattgcggtgcgagcatacggcggcgcgctgatttgcgatagtcatactccaggcgttgaaccttcagttgaagataaaagcgcgcttaatacggccatcaaacgccaaattgccagcgccgccgctgagctgataaaaccgggacaccgaattattctcgactcaggcactaccacctgtgaaatcgcgcgccagctccgacagcatagcgatgttatcgcgatgactaatggaatgaatgtcgccaacgcgttgttagaagctgaaggcgtagaattactgatgacgggggggcacctgcgtcgccagtcgcagtcattctatggcgatcaggctgagcagtccttgcagaactaccactttgatatgcttttcctcggggtggatgcgatagatctggaacgtgggatcagcactcataatgaggatgaagcccgcctgaaccgtaaaatgtgcgaagtcgcggagtgtatcgtcgttgtgactgattccagtaaattcaatcgttccagtttacataaaatcatcgatacgcagcgcattgatatcattattgtcgatgacgggattccgcaagaaagtctggaggggttacgtaagggcgggattgacgttattctcgtcaaatcataa

SEQ ID NO: 88604 - DNA, 1296 bp, Enterobacter aerogenes
gtgaaacatcttacacaattggtggtgcgacacaaacagggtgaagcgaatggtatttacgcggtgtgctccgcgcatccactggtactggagtccgccattcgttttgcccaggcaaaccatacgcccctgctcgttgaagcgacctccaatcaggttgatcagtttggcggttataccggtatgacccccgctgatttctgcggctttatctatcatcttgccgatacactggggttcccccgcgacgggctcatcctcggcggcgatcatctggggccaaaccgctggcaacatcttccggtcgcacaagccatggcccacgccgacgatctgattaaaagctatgtcgccgccgggtttaaaaaaatccacctcgattgcagtatgtcatgcaaagacgatcccattcccttaactgatgaccttgtcgctgaacgcgccgcaaggctggcaaaaatcgcagaagaaacctgtattgccctgaaaggcaaatcggatctcgtttacgttatcggcactgaggttcccgtgcccggtggcgctcacgaaaccctcaacaccctacaagtcaccaccccggatgcggctcgcgccactctcgatgcacacagggtcgcctttaccagtgtggggcttgagggtatttggccgcgaattatcgcgctcgtggtacagcctggcgtggaattcgatcatgcacaagtcattgattacgaatctgaaaaagcaaaatccctcagcgctatggtagaagactatgccacattgctctttgaagcgcattccacggattatcagaccccgcatgcgctacgccaactggtagtcgatcatttcgcgattttgaaagtcggcccggcgttgactttcgcgctgcgtgaagcgcttttcgctttagcagcgattgaagaagaaatcgtaccggcaaaatcctgttcgggattacgcatggtactggaaaacgtcatgctcgatcgtccggaatactggcaaagccactaccacggcgatggccacgcacggcggttagcacgcggctacagctattccgatcgcgttcgctactactggccggacagccagatagacaccgctttagcgcatctggtgcgcaatctggccgatgaagccattccacttccgctcattagccagtatctgcctttacagtacgtaaaagttcgcgagggggcgctcagcgctacgccgcatgaactcatcattagccacgtccaggacatcttgcagcaataccatgacgcctgtcagggcatgacatctcataacggataa

SEQ ID NO: 88605 - DNA, 474 bp, Enterobacter aerogenes
atgccaaatattgtgttaagtcgcattgatgaacgtttaatccacggccaggttggcgtgcagtgggtcgggttcgcgggggcgaatctggtcctggttgccaatgacgaggttgctgaagaccccgtacaacagaacctgatggagatggtgctggcagaggggattgccgtgcgcttctggtcgctgcagaaagtcatcgacaacattcatcgcgccgccgatcggcaaaaaatattgctggtatgtaaatcgcccgccgattttctgacgctggtttccggcggggtgccggtatcgcgcatcaacgtcggcaatatgcactatgccgacgggaagcgacaaattgcgaaaacggtctctgtcgacggcaacgatattgtcgcctttaacggtctgaaatctgctggcgttgagtgtttcattcaaggggttccgacggaaccggcaacggatctttataaactgctctaa

SEQ ID NO: 88606 - DNA, 780 bp, Enterobacter aerogenes
atggaaatctcgctttttcaagccattgcattgggtatcctcgcctttatcgccggtctggatatgtttaacggtttaacccatatgcatcgtccggtggtccttggccccttagtgggcctgatcctcggcgatcttcataccggtatattaaccggcggcacactggagctggtgtggatgggtctggcgccgctggctggcgcgcaaccgccgaacgtcattatcgggaccattgtcggcaccaccttcgctattaccaccggcgttaaacccgatgtcgccgtcggcgttgcggttcccttcgccgtcgcggttcagatggggataacgttccttttctcagtgatgtcaggggttatgtcgcgctgcgatcgcatggcggcaaatgccgatacccgcggtattgagcgtgtgaattacctggcgttgctggcattaggtaccttttattttctctgtgcttttctgcctatctacttcggcgcagaacacgccaaaaccgcaatagatgtgctccctgagcgcctaatcgatggccttggcgtcgctggcggcatcatgccggcaatcggttttgccgtactgctaaaaatcatgatgaaaaacgtctatatcccctatttcatcatcgggttcgtcgcggcggcctggctcaagctcccggtgttagccattgctgccgccgcgctggccatggcgcttatcgacctgctacgcaaatctcccgaaccgactcaacctgctgcgcctaaagaggaattcgaagatggcatctaa

SEQ ID NO: 88607 - DNA, 879 bp, Enterobacter aerogenes
atggcatctaatcaacacacgctgcccaacgtggccgaaagcgaaacgacgctgctcactggcgttaatgaaaacgtttatgaagatcaaagcattggggccgacctgacaagaaaagacattaatcgggtggcctggcgttcaatgctattacaggcgtccttcaactacgaacgtatgcaggcttccggctggctgtacggactattgccggcattaaagaaaatccacactaatccgcgcgatctggcacgggcaatgaaaggacatatgggcttctttaatacccatccgttcctcgtgacctttgtcatcggcataattctggcgatggagcgctcgaagcaggacgttaacagtatccagaacaccaaaatcgccgttggcgcgccgctcggcggtatcggcgatgctatgttctggttaacgttattgccgatttgcggcggcattggcgccagcctggcgctacaagggtcgatcctcggcgcggttgtttttatcgttctgttcaacgtggtccatctcggcctgcgcttcggtctggcgcactatgcctaccggatgggggtagcggcgattccgctcattaaagccaataccaaaaaagtcggccatgccgcctctatcgtcgggatgacggtgattggcgcgctggtagcgacttatgttcgtttaagcacaacgcttgaaatcactgccggcgatgccgtggttaaactgcaaacggatgtcatcgataagctgatgcccgcctttttaccgctggtttataccctggtgatgttctggctggtgcgccgcggctggaacccgctccgccttatcggcatcaccgtcgcgctgggcattgtaggtaaattctgtcacttcctgtaa

SEQ ID NO: 88608 - DNA, 435 bp, Enterobacter aerogenes
atgttaggaatcattttgaccgggcatggcggatttgccagcggcatggaaaaggcaatgaaacagatccttggcgaacagtcgcaattcattgcgatagattttcctgaatcctccacgaccgccctgctgaccgcacaactggagcaggcggtaaacgagctggatggcgaagaagatattgtttttctgactgatttacttggcggcacgccatttcgcgtcgcctccacgctggcgatgcaaaaacgcggacgagaagtcattaccggcactaacctgcagctactgctggagatggtgctggaacgagaaggattaaccagcgaagcctttcgtcttcaggcactggaatgcggtcatcgcgggttaacatgtctggtcgatgagctgggacgctgccgggaagatcatgctgttgaggaaggtatatga

SEQ ID NO: 88609 - DNA, 1134 bp, Enterobacter aerogenes
atgagccgcatactgcgcgccaggcgcttactcacagagcaaggctggcttgatgaccatcagctacggtttgaaaatgacgttatcgtggcgctggagccgatccccgcgggtgttctcactcgcgacgccgagctgctgtgtcccgcatatatcgatattcatgtccacggcggcgcaggcgtagatgtcatggatgacgcaccggatacgttagacctccttgcgaaacataaagcgcgtgagggggtcgccaactggttgccgaccaccgtcaccgcgccgttagcggaaatccatgcgacgctggaacgtattgcgcgacgcgttcacgcaggcggtccgggagcgcaaattcttggcagctatcttgaaggcccctacttcacgccgccgcataaaggcgctcatccggcacaatggttcagagaactggatcttgccgaattcgatcggttgattgcggtttctcgcgagacgctacgcgtcgtcgcccttgccccggaaaaagagggggcactgcaggcgatccgtcatctcaaacggcaaggtgtacgggtgatgctgggtcatagtgcggctacctgggaacaaacctgttccgccttcgatgccggtgcagatggcctggtgcattgttacaacggcatgagcggtttacatcatcgcgaacctggcatggtcggcgctggattaaccgataaccgcacctggcttgaacttattgccgacggtcatcacgtacatcctgcggcaatgcagctatgttgccgttgcgctggagatcgtatcgtgctgataaccgacgctatgcaggcggcgggtatgcctgacggtaattacaccttatgtggcgaaagggtagaaatgcgtgatgggatcgttcgtaccctcagcggtagcctggcggggagtaccctgtcactggattccgccgtgcgcaccatcagttcattacccgggatgacggctgaacgggctatacatatggcttctctacacccggcgcgtctattagggctggatcggcaattaggatcgttacagccgggaaaaatggccgacatgattgcagttgataacgagctgcgggtggaaaacatttggatccgcggcgaagcgttttcgctttaa

SEQ ID NO: 88610 - DNA, 1155 bp, Enterobacter aerogenes
atgtcagaaagatacacccctgcgccatcaaccactggtacctggaccgaagaagagatccgccagcaaccaggcagctggatccaatctttaaagcatatcgatcgtttacgagcggagattgacggctttctcacgccgctactacgaaaaaacgatctccgtatcgtccttaccggcgctggaacttcagcatttattggcgacatcattgcgccatggttatcccgtcatagcggtaaaaattttagcgccgttccaactaccgatctggtgaccaatccgatggattatctggatcccgcacatccactgctgctggtctcattcgcccgttcaggtaatagcccggagagcgtggccgcagtgaaattggcgaatcagtttgttacagagtgttatcacttacccattacctgcaacgaagcaggtagcctgtatcaaaccgcgctggatagcgacaacgctctgccgctattaatgccgccagaaactcacgatcgcggctttgcgatgaccagcagtattaccaccatgatggccagctgccttgcagtgttcgcacccaacctcattaatagccatacattcagcgatgtcgctgactgctgccagacgattcttaactcgctgctcgatgttaacgctggggttttcggcaacgaagcgtggaaaaggatcgtttacctcggtagtggcgggctacagggcgctgcgcgcgaatccgccctgaaagtacttgagctcacggcaggtaagctaaccgcgttttatgactcgcctaccggcttccgtcacggccctaaatcactggtgaataacgaaacattggtggtgatgtttatctccaaccacccttatacccgccagtacgatctggatcttctcgctgagttgcgtcgcgatcgccaggccatgcggatagtggccatcgccgcaggaaccgatcctgttatcgaggcaggcccgcatatcatcatcccgccatcacgccgtttcagcgatgtcgaactggctttctgcttcctgatgtatgcccagatcttcgcgcttaaccaatctctcgccgtgggtaacaccccggatacgccttccgccagcggtaccgttaatcgcgtcgtacaaggtgttgttattcatccctggcaggcttaa

SEQ ID NO: 88611 - DNA, 873 bp, Enterobacter aerogenes
atgagcattatttccaccaaatatcttctgcaggatgcacagagtaaaggttatgcggttcctgcatttaatattcacaacgccgaaacgatccaggcgatccttgaaacgtgcagtgaaatgcgatcgccggtgatccttgccggcacgccgggaacctttaagcatatcgcgctcgaggaaatttacgcactctgccaggcctactccgccacctacgcgatgccaattgcgctacatctcgaccatcatgaatcgctggcggatattcgtcgtaaggttaatgccggggtccgcagcgcgatgatcgatggcagccattttccgttttcagagaatgtgaagctggtgaaatcggtcgtcgattattgccacgcgctggattgcagcgttgaggcagaactgggacggcttggcgggatggaagacgatcttaacgttgatgcggaaagcgcatttctcacagacccgcaagaggcgaaacgctttgtcgaattgaccggtatcgacagcctcgccgtggcgatcggtaccgctcatgggctatatcaaaaaacgcctaaaatcgatttccaacggctggcagaaattcgggaagtggttgatgtccccctggtgctgcatggcgcaagcgatgtaccggatgactatgtccgccgcgctatcacactgggaatttgcaaggtcaatgttgctacagaactcaaaatcgccttcgccgccgcggtgaaaacatggtttgctgaaaacccgcaagggaacgatccgcgttattacatgcgtgttggcatggatgcgatgaaagaaatcgtgaaaagtaaaattaacgtgtgcggttccgctaaccgactattacaggccgcagaagcctga

SEQ ID NO: 88612 - DNA, 1890 bp, Enterobacter aerogenes
atgaaaaaagcgctcactgtttcgttactggccctgctgatttctcaaggcgccgccgccgctgaatacacattaaataacgcgtcgatggcgctttcatttaacgatgcggattcctccgcgaaggtaaaagatgaaaaatccgcccatcagctttcaccgcaggaactgttttttctcacactacctgatgaaaccatcatccacaccgctgattttaaaataaagcatgtcgagaaacataatgattctattgtcgtcgactacacccgcccggattttaatgtcacggttaagatgaacctgataaagggaaactacgcgagtattgattacactatcgcggcggtgggccaatcaagagacgtagcgaaaataacctttttcccaactaaaaaacaatctcaggcaccctatgtcgatggcgctattaatagttcaccgatcgttgctgattccttttttatactgcccgataaacctatcgtaaatacctgggcttatgaggcaaccacgaatctgaatgtagaattaaaaaccgctatcgaccctgccacaccgctcagctatacgacctacttcggcacctttccagcaaccaatcagcttcgtcgcagcgtaaacctctttattaatgccctgcgtccccgcccctataaaccctatctgcactataacagctggatggatatcggcttcttcaccacctatagcgagcaggatgttctacgccggatggatgagtggaataaggaatttatcaccggacgcggcgtcacattagatgcctttcttctggatgatggttgggacgatcgtactggcagatggctctttggccccgctttcagccaggggttcagtaaggttcgggaaaaagcagccagcatgcaaagttcagtggggctgtggctttcaccatggggtggttataataagcccagagatatccgcgtctctcacgccaaagagtatggttttgaaacggttgatggcaaattcgccctatccgggcgacactatttcaataacttcaatcaacagattattaagctgattaaagacgaacatattacctcttttaagcttgatggtatgggcaacgcgaattcacatattccgggtagccagtttgcttccgattttgatgcatcgattgccttactgcataacatgcgcagcgccaatcccgaccaatttattaatttaaccaccgggaccaatgccagtccttcctggcttttttatgccgacgcgatatggcgccagggcgacgatatcaatctttacgggccggggacgccggtgcagcaatggatgacctatcgggatgccgagacttatcgttcgattgtgcgtaaagggccgctcttcccgcttaactcactgatgtatcatggtattgtcagtgctgaaaatgcctattacgggctggaaaaaccgcaaaccgatagcgattttgccgatcaggtctggagctatttcgcgacaggtacgcaattacaggagctgtacatcacgccgtcgctacttaacaaagtgaagtgggacaccctggcgcaggcggcaaaatggtcgagagcaaatgccgacgtgctggtggatacccattgggtcggcggcgatcctaccgcactggaagtttacggctgggcctcatggaataaagataaggcgattttaggcctgcgtaacccatcagataaaccacagcaattttatctcgatctcgctaaagccttcgagataccgcagggagagacgtcgcgctttacgttaaaaagcgtttacggcagtaacgcgacattccctgctgactatcagcaagcggctattgttacgctacaacccttgcaaacgctggttttcgaagcgacgccgataaaatag

SEQ ID NO: 88613 - DNA, 861 bp, Enterobacter aerogenes
atgaaacaacacgaatcagcggataattctcaggggcaactgtacattgtgcccactccgatagggaatctgtctgatatcacgcagcgcgcactggaagtgttgcaagctgttgatttaattgctgctgaggatacccgccacaccggtttgctgctgcagcattttgcgatcaacgcccgtttatttgcccttcacgaccataacgagcagcaaaaggccgaaacacttttagcgaaattaaaagaggggcagaacatcgcgctggtgtccgatgccggcacgccgctgattaacgatcccggctaccatctggtgcgcacctgccgtgaagccaatatccgcgtcgtgcccctgccgggcccttgtgccgcgattgccgctctgagcgccgccggtttgccgtccgatcgtttctgctatgaaggtttcctgccggcgaaatcgaaaggccgccgcgataccctgaaggcgctggaagaagaaccgcgcactctcatcttctatgagtctacgcaccgcctggtggagagcctggaagatatctgcgcggttctgggcgaatcccgctacgtggtgttggcgcgcgagctgaccaaaacctgggagtctatccacggcgcgccgattggcgagctggtggcatgggtgaaggaagacgaaaatcgccgcaaaggcgagatggtgctgatcgtcgaaggttttaaggcccaggaagaggcgctgccggcagccgcgctgcggactctggcgctgctacaggcggaactgccgctgaagaaagccgccgcgctggccgcggaaatccacggcgtgaaaaagaatgcgctgtataaatacgcgctggagcagcagggataa

SEQ ID NO: 88614 - DNA, 2106 bp, Enterobacter aerogenes
atggtaccgtcaacatttcttcgttctaagcccgcgcgctgtctgcccgtattgctggcgactcttctttttgctggctgcggcacccacacgcaggatcaaagcacggcgtttatgcagggtacgtcgcaggccaactccagtttctacctacagcagatgcagcaaagcacgaatgatagcaagaccaactggcaattactcgccattcgtgcactgctgcaggaaggtaagaagcagcaggctatcgacctgtacaaccaactgccgtcgaacctgaacagcacgcaggcccgcgaacagtcgctgctggcggtggaagtcaaactggcgcaaggcgattaccagggcgcgaaggcattgctgagcaaactcgatcctctcagttttgagaaaaatcagcagccgcgctactggcaggcgcaaattgacgccagccaggggcagccctctctgtccctgctgcgcgcgctgattgcccagcagcccttactaagccaggcgaagcaaaaacaacaaaatatcgacgccacgtggaaagcgctgacggcgatgactccgcagcaggccaacgcgctggtgattaatgccgacgaaaacgtgctgcagggctggttggatctgcagcggatgtggttcgacaaccgtaacgatccggcgatgctgaaagcgggcgttaaagactggcaaatccgttatccgcagaacccgggggcgcagatgctgcccaccgcgctggtgaacatgcaaaactataaaccggcctcgaccaataaaattgccctgctgctgcctctgaacggccaggcagcgattttcggccgcactatccaacagggttttgaagcggcgaagaatggcgccccagcggtccagggcagcgcagtgccggcgcaggtcgcccaggcggcgaatgttgccggcaataatgatgtggtgagcccttcgcaggcggaagtcggcgatctcaccgccaccggcagccaggccgatccggtgcaggcgccagcggaaacgcaggccgcgcctgccgcaaaaccagcagccgctccgctacccgccccggttgccgcaacgccggcagtacaaccgacagcacagccggtgagcgcgccagccgcgcagccgcagcccgcggtagcgaccaccgccaatcctgccgctgagctgaaaatttacgataccacccgccagccgatgagccagcttctggcgcaggtacagcaggacggcgccaccatcgtggttggcccgctgttgaaagaaaacgtcgaagaggtgatgaaaagcaacacctcgctgaacgtgctcgcccttaaccagccgggcaaagtcgagaaccgtccgaacctgtgctacttcgcgctctccccggaagatgaagcccgcgacgcagcgcgtcatattcacaatcagggcaaacaaacgccgttactgctggtgccgcgcggcgcgcttggcgaccgcgtggtcagcgctttcgccgacgagtggctgaagctgggcggcggtacggtgctgcagcagcgtctgggatcgacggcggagctgaaatccggcgtcaacggcggcggcatctcgctgaccggcagcccggtatcgacgctgccctcatctgtagatagctcgttcggcagcccaggcgacgttccggtcagcagcggcggcggcatcgatgccgcctatatcgtcgccaccccggaacaaattggttatatcaagccgctgatcgccatgcgtaacggcagccagagcaacgtcaccctgtacgccagctcccgtagcgcccagggcacctccggcccggatttccgtctggagatggaaggcctgcaatatagcgaaatcccgatgctggcgggcagtaacccggcgctgatgcagcaggcgctctccgcagtgcgtaacgactactcgctggcgcggctgtacgcaatgggcgccgatgcctggtcgctggcgaatcatttcgcgcaaatgcgccagagcccaggttacgagctgaacggcaatacgggcgatctgacggctacgccggactgcgtgattaacaggaagttatcatggctcaagtaccaacaggggcaaatcgtcgcagccaactaa

SEQ ID NO: 88615 - DNA, 387 bp, Enterobacter aerogenes
atggctcaagtaccaacaggggcaaatcgtcgcagccaactaagtaaacagaccggcgacgcctgggaaagccaggcgcgtcggtggttagaacggcatggactgcgttttatcgccgccaacgcccgcgagcgcggcggcgagatcgaccttattatgcgcgacggcgcggttatcgtgttcgtcgaagtgcgctaccggcgcagcgccagctacggcgatgccgccgccagcgtcacgccgcaaaagcaacaacgccttctcaaggccgctcgcctgtggctctcccgacagaatgggagttttgatactgtggattgccgtttcgatgtggtagccttcaccggcaacgacatccaatggctgaaaaacgcctttggcgaatag

SEQ ID NO: 88616 - DNA, 591 bp, Enterobacter aerogenes
gtgctcgacagaattaaagcctgctttaccgaaagcattcaaacccaaatcgccgccgcggaagcgctcccggacgccatctcgcgcgcggctatgacgctcgttcagtcgctgcttaacggcaacaaaatcctctgttgtggtaatggcacctccgccgccaacgcacagcattttgctgccagcatgatcaatcgtttcgaaacagagcgccctggtttacccgccattgcactaaataccgataatgtggtcttaaccgcaatcgccaacgatcgcctgcatgatgaaatctatgctaaacaggtgcgcgcgctgggacacgccggcgacgtactgctggcgatttctacgcgcggcaatagccgggatatcgtgaaagccgtggaagcggcggtcacccgcgatatgactatcgtagcgttaaccggttacgacggcggcgagctggctggcctgttaggtcagcaggacgttgaaatccgcattccttcacaccgcagcgcgcggatccaggaaatgcacatgctcaccgtcaattgtctgtgcgatttgattgataacacgctttttccacaccaggacgaataa

SEQ ID NO: 88617 - DNA, 576 bp, Enterobacter aerogenes
atgaaggctctctcgcccctcgccatcctgctttctgcgctactgctacagggctgcgtcgccgcagcggtagtcggtacggcagccgtcggcaccaaagcggcaacggacccacgtacggtcggtacgcaggttgatgacagcaccctggagctacgcgttaacagcgccttagggaaagatgaacagattaagaaagaagcgcgtattaacgtcaccgcttatcagggcaaagtcctgctgaccggccagtcgccgaccgccgatctctcctctcgcgccaaacaaattgcgatgggggttgaagggactaccgaagtcttcaatgaagtacgtcaaggccagccgattggcttaggcaccgcgtcgtcggatacctggatcaccaccaaagttcgttcccaactgctgggcagcgatcaggtgaagtcttccaatgtgaaagtgacgaccgaaaatagcgaagtgttcctgatgggcctggtcaccgaccgcgaaggccgcgcagcggcggatatcgccagccgggttagcggcgtgagccgcgtcacaaccgcgtttacctatattaaataa

SEQ ID NO: 88618 - DNA, 1044 bp, Enterobacter aerogenes
atggctggtcagtcttcatctcaggcggcatcaccatttcaatggtggaaacccgcgctgttctttctcgtcgttatcgttggtctgtggtacgtcaaatggcagccgtattacggtaaagcctttacggccgcggaaacccacagtatcggtaaatctattctcgcgcaggctgatgtaaacccgttgcaggcggcatgggattacgcgatggtttatttcctcgcggtctggaaagcggcggtgctcggcgtgctgcttggttcgcttattcaggtgttgatcccacgcgactggctgcagaggacgcttgggcaatctcgttttcagggcacgctgctgggagcgattttttcgctgccggggatgatgtgtacctgctgcgccgcgccggtcgccgctggtatgcgtaaacagcaggtgtcgatgggcggagcgctggcgttctggatgggcaacccgctgctgaacccggcaacgctggtctttatgggcttcgtgctcggctggcagtttgctctgatccggctggtggccgggctggcgacggtgctggtggtggcgacgctggtgcaaaaatgggtaaaagaggcggcgacgcagccggtagcggcagaagacgttagccaactgcagcgcgatgagggcacttttatcagccgctggctacgcgcgctgtggtcgctgttctggagtacgatcccggtttacatcctcgcggtgctggtactgggcgcggcgcgggtctggctgttcccgcacgccgagggcgcggtcgataacacgctgttctgggtgatcgcaatggcgatagccggttgcctgttcgttatcccgacggcggcggaaatcccgattgtgcagacgatgatgctggctgggatgggcaccgcgccggcgctggcgctgctgattacgttgccggcggtgagcgtgccgtcgctggttatgttgcgtaaggcgtttccggctaaagcgctgtggctaaccggcgggctggtggcgttgtgcggggcgatcgtcggcgcgctggcgctggtgtaa

SEQ ID NO: 88619 - DNA, 648 bp, Enterobacter aerogenes
atgagtcaggtattattaaccggcgcgactggtttggttggtgggcacttacttcatctgctacagagtgagccgggcattaacgcgattactgcgccaacgcgccgtccccttgctgtggcggagggggtattcaatccacacgatccgcagttgaccgatgcactggcgcaggtggttgatcctgtcgatatcgttttctgctgcctgggcaccacgcgccgggaagcggggagtaaagaagcgtttgtgcatgctgactatacgctggtggtagatacggcgctggtcgggaagcgtctcggagcgcaacatatgctggtggtcagcgcgatgggcgctaatgcgcattcgcccttcttctataaccgcgtgaaaggagaaatggaagaggcgctgatggcgcaggactggccgcggctgaccattgcccgtccttcgatgttgctgggggatcgggagcataaacgcgccaatgaaacgctctttgcaccgctatttcgttttctgcctggagactggaaagctattcaggcccgcgatgtagcgactgccctgctcgcggaggcgctggcgccgagccatgaaggcgtccagatcctgacctcgtctcagctacgggagcacgctgcccggcaggcggattaa

SEQ ID NO: 88620 - DNA, 519 bp, Enterobacter aerogenes
atgagtaaaaagattgccgtactaatcaccgacgactttgaagacgctgaattcacctcacctgccgaggcctttaaacttgccgggcatcaggtcgtgacgattgagaagcaggctggaaaaacggtaagagggaaacaaggcgaggctgaagtggcgatcgataaagcgattgatgacgtgacgccggcgcagtttgacgccctgttgctgcctggtggctattcaccggaccagttgcggggtgatgagcgcttcgtcacttttactcgcgacttcgtgaatagcggtaagccggtctttgccatctgccacggcccgcagctactcatcagcgcagatgtcattcgcgggcgtaaactcacggcggttaaacctatcgtggtcgacgtaaaaaacgccggcggtgagttttacgatcaggaagtggtgcttgataacgatcagttagtcaccagccgaaccccagacgatctgccggcgttcaatcgcgaggcgctacgcctgctcggggcttga

SEQ ID NO: 88621 - DNA, 444 bp, Enterobacter aerogenes
atggatacgcttgccgcgattagccgctggctgggtaaacagcacgtcatcacctggtgcgtcgcgcgtgatgacgagctgtggtgcgccaatgcgttttacgtttacgacccggataacgtcgccttttatctgctgagcgacgaaaaaacccgccacggccagatgaccggcgaacacgcgaaggttgccgggacggttaacggccagccaaagaccgttgccttgatccgcggcgtgcagtttaagggtgagatccgccgccttcacggtgacgaagaggctgaaatgcgcaagcgctacgtcaagcgcttcccggtcgcccgcatgctgtcggcgccggtgtgggagatccgtcccgacgaacttaaatttaccgacaacacgctgggttttggcaaaaagctatattggctgcgcgactcaagccccgagcaggcgtag

SEQ ID NO: 88622 - DNA, 285 bp, Enterobacter aerogenes
gtgtgctggtttctctatcttattcgaaccgctgataaccgcctgtataccggcattaccaccgatgttccgcgccgctttcttcagcatcaggaaggcaaaggagcgaaagcgctgcgcggcaaaggcgaactggcgctggcgtttagtcagaaagttggtgaccactcactcgctctgcggctggagtatcgcatcaagcagctaacgaagcgccagaaagagcgcctcgttgccggggatggttcgttcgagaccctgctggaggggctcagaagcgattga

SEQ ID NO: 88623 - DNA, 504 bp, Enterobacter aerogenes
atgctgattcgagtggaaattgggattgatgcgccgggtatcgacgcgctgctgcgccgtacgttcggcagcgacgcggaagcgaagctggttcatgatctgcgtgaagatggtttgatcacgctgggcttagtcgccactgacgatgaaggccaggtggtgggctacgtcgccttcagcccggtcaccgtcgaaggcgaagagctgcagtgggtcggtctggcgccattggcggtagatgaaagctatcgcggccagggtattggccgacagctggtctacgaagggctggattcattaaatgagtttggctacgccgcggtggtcacgctgggcgaaccggcgctgtatggccgtttgggctttgaacccgccgccgcgttcgatttacgctgccgttggccggacaccgctgaagccttccaggtgcaccgtctggcggatgacgcgctgcagggcgtacacggtctggtcgagtacagcgatcatttcaatcgcttctga

SEQ ID NO: 88624 - DNA, 525 bp, Enterobacter aerogenes
gtgttggatgaactgcgttcccggctggtccgttttggcccgtctttaatgagcgtgccggttaagctggcgccttttgccctcaagcgccaggtgctggaacaagtattgagctggcaatttcgccaggcgctggcggatggagaactggagtttctcgaaggtcgctggttaagtattaatgtgcgcgatattggcctgctgtggtatacctcggtagtcgacggtcgcctggtggtcagccagcaggctgacgccgacgtcagctttagcgccgatgccagcgatctgttgatgattgccgcgcgtaaacaggatccggatacgctattcttccagcgtcgtctggtgattgaaggtgataccgagctgggtctatacgtgaagaacctgatggatgccatcgagctggagcagatgccgaaagcactgcgcgtcatgctgctgcagatggcggattttgtcgaagcaggcctgaagagcccgcagaaacctgaacagacatcggtaggtgaggcatgctga

SEQ ID NO: 88625 - DNA, 996 bp, Enterobacter aerogenes
atggagctgctctgccccgccggtaacctcccggcacttaaggcggccatcgaaaacggcgccgatgccgtctatatcgggctgaaagatgacaccaatgcccgccactttgccggccttaatttcaccgaaaagaaattacaggaagccgtcagctttgtgcaccagcatcgccgcaagctacatatcgcgattaacaccttcgcccatcccgacggttatgcccgttggcagcgtgctgtggatatggccgcgcaattgggcgccgacgcgctgatcctcgccgatatcgccatgctggagtacgctgcggaacgctatccgcacattgaacgtcacgtttcagtgcaggcgtccgccactaacgaagaggcgatacgtttttatcaccgcaactttgacgtcgcccgcgtcgtactaccgcgggtgttatccattcaccaggtgaaacagttagcgcgcgccacgccggttccactggaagtcttcgccttcggtagcttatgcatcatggcggaaggccgctgctatctctcgtcgtatctcaccggcgaatcgccaaataccgtcggagcctgttcgcccgcgcgcttcgtccgctggcagcaaacgccgcaggggctggagtcacgccttaacgaagtgctgatcgatcgttatcaggatggcgagaatgccggttatccgacgctgtgcaaaggccgctacctggtcgacggcgagcgctaccacgcgctggaagaacccaccagcctcaacaccctggaactgttgccagaactgatggccgccaatatcgcttcggtaaaaattgaaggccgccagcgcagcccggcatacgtcacccaggtagcgaaagtctggcgtcaggcgatcgatcgctgtaaagccgatccgcagaacttcgtgccgcaatctgcatggatggaaacccttggttcgatgtccgaaggaacgcaaaccacccttggcgcctatcaccgaaaatggcagtga

SEQ ID NO: 88626 - DNA, 879 bp, Enterobacter aerogenes
atgaaatattcattagggccggtgctgtactactggccaaaagagacgctggaagatttttaccagcaggcggcaaactgtagcgctgacaccatttatctgggcgaagcggtatgcagcaaacgccgcgccactaaagtcggcgattggatcgaaatggcgaaagcgctggccggcagcggcaagcaggtggtgctctccaccctcgcgctggtgcaggcctcatccgaactgggcgagctgaagcgctatgtcgagaacggcgaattcctgattgaagccagcgacctcggcgtggtcaatctctgtgccgaacgcaagctgcccttcgtcgccggtcatgcgctgaactgctacaacgccgtcaccctgcgcctgctgctgaagcagggtatgacgcgctggtgcatgccggtggagctttcccgcgactggctggctaatttactgacccagtgcgaagagctgggtattcgcaaccagtttgaagtcgaagtgctgagctacggccatctgccgctggcctattccgcgcgctgctttaccgcccgctcggaagaccggccaaaagacgaatgcgaaacctgctgcatcaagtacccaaccgggcgcagcatgctgtcgcaggagaaccagcaggtgtttgtgcttaacggcattcagacgatgagcggctacgtctataaccttggcaacgagttaacctcgatgcacggtctggtggatatggtgcgcctgtcgccgatgggtagcgagaccttcgccatgctcgacgccttccgcgccaatgaaaatggcgctgcgccgttggatctcaccgctaacagcgattgcaatggctactggaaacggctggccgggctggagctacaggcgtaa

SEQ ID NO: 88627 - DNA, 1008 bp, Enterobacter aerogenes
atgactgataaaaccattccgttctcggtgctcgatctggcgccgatcccgcagggatcttctgctaaagaagccttttcccattctcttgctctcgcccaactggcggaatcccgcggctaccaccgttattggctggctgagcaccataatatggtgggtattgccagcgcggcgacctcggtgttgattggctatcttgccgccaataccaccaccctgcatctgggatccggaggcgtaatgttgccaaaccattcgccgctggtgatcgccgaacagttcggcaccctgaatacgctgtatcccggacgtatcgatctcggccttggccgcgcgccgggcagcgatcagccgaccatgcgcgcgctgcgtcgccatatgagcggtgatgtcgataatttcccgcgcgatgtggcggagttggtggactggtttgacgcccgcgaggctaatccgcaggtgcgcccggttcccggctatggcgaacgaattccggtgtggctgctgggctcaagcctgtacagcgcgcagctggcggcgcagcttggtctgccgtttgccttcgcctctcacttcgcgccggacatgctattccaggcgctgcatctgtaccgcagcaacttcaaaccttcggcgcggctcgaaaaaccgtacgcgatggtatgtatcaatattatcgccgccgatagtaatcgcgatgcggagttcctctttacctcgatgcagcaggccttcgttaaactgcgccgcggtgaaaccgggcagttgccgccgccggtggaaaatatgcatcaactgtggtcagcgtccgagcagtatggtgtacagcaggcattgagcatgtcgctggttggcgataagaccaaagttcgccatgggttagcgtcgattcttcgcgaaacagaagcggacgaaatcatggtcaacggccagatcttcgaccaccaggcgcgcctgcattcgtttgatttagcgatgcaggttaaagaggaattgttaggttag

SEQ ID NO: 88628 - DNA, 1245 bp, Enterobacter aerogenes
atggcgacactaaccactacggccacccgaccgtctttatttggcggcgtggtgattatcggcggcacaattattggcgcgggcatgttctcgctgccggtggtcatgtccggcgcgtggtttttctggtcgctggcggcgttggtttttacctggttctgcatgctgcactccggtttgatgattctggaagccaaccttaattaccggattggctccagcttcgacaccattaccaaagacctgctcggcaaaggctggaacctggtgaacggcgtgtcgatcgcctttgtgctgtatatcctgacctacgcctatatttcggcgagcggttcgatcctgcaccataccttcagtgaaatgtcgctgaacgtaccggcgcgcgctgcgggcttcggctttgcgctgctggtggcctttatcgtctggatgagcacgaaagcggtgagccgcatgacggctatcgtactgggcgctaaagtgattaccttcttcctgaccttcggcagcctgctggggcacgttgagccgacgacgctgtttaacgtcgtggagaagaatgcctcctatgcgccatacctgctgatgacgctgccgttctgcctggcctcgtttggctatcacggtaacgtgccgagcctgatgaaatattatggtaaggatccgcgcaccattatccgctgtctgatttacggtacgctgctggcgctgggtctgtatgtggtctggctgctggtgacgatgggtaatatccctcgtccgcagtttatcggtatcgcccagaagggcggcaacattgatgtgctggtgcaggcgctgagcggcgtgctgaatagccgcggtctggatctactgctggtggtgttctccaactttgccgtcgccagttccttcctcggcgtgacgctggggctgttcgattatctcgcggatctgtttggctttgacgatagcgcgatgggacgctttaaaaccgcgctgttgacctttatcccgccgatgatcggtgggctggtgaaaccagatggtttcctttacgccatcggctatgccggcctggcggctacggtatgggcggcgattgtgccggcgctgctggctcgcgcttcgcgtaaacgcttcggcagcccacagttccgtgtttggggcggaaaaccgatgattgcgctgatcctgctgttcgggctcggcaacgcggtggtgcatttcctgtcgagctttaatctgttgccggtttatcaataa

SEQ ID NO: 88629 - DNA, 1902 bp, Enterobacter aerogenes
atggctgaattcgaaaccacttttgcagatctgggcctgaaggctcctatccttgaagcgcttaacgatctgggttacgaaaaaccatctccgatccaggctgagtgcattccgcatctgctggacggccgcgacgttctgggtatggcccagaccggtagtggtaagaccgcagcgttctctttaccgctgctgaacaacatcgatcctgagctgagagcaccgcagattctggtgctggcgccgacccgcgaactggcggtacaggttgctgaagcaatgacggaattctctaaacatatgcgcggcgtaaacgtggttgccctgtacggcggccagcgttatgacgtgcagctgcgcgccctgcgtcaggggccgcagatcgttgtcggtaccccgggtcgtctgctggaccacctgaagcgcggtacgctggatctctctaaactgagcggtctggtactggacgaagcagatgaaatgctgcgcatgggctttatcgaagacgtagaaactatcatggcgcagatcccggaaggtcatcagaccgctctgttctccgccacgatgccggaagcgattcgtcgcattacccgccgcttcatgaaagagccgcaggaagtgcgcattcagtccagcgtcaccacgcgcccggacatcagccagagctactggactgcttacggcatgcgtaaaaacgaagcgctggtgcgtttcctggaagcggaagactttgatgcggcgattatcttcgtgcgtaccaaaaacgcgaccctggaagtggcagaagcgctggagcgtagcggctataacagcgccgcgctgaacggcgatatgaaccaggcgctgcgtgagcagactctggagcgcctgaaagacggtcgtctggatatcttgatcgccaccgacgttgcggcccgtggcctggacgttgagcgtatcagcctggttgttaactatgacatcccgatggattctgaatcttacgttcaccgtatcggccgtaccggtcgtgcgggtcgtgcgggtcgcgcgctgctgttcgttgagaaccgtgagcgtcgcctgctgcgtaacatcgaacgtacgatgaagctgacgatccctgaagtagaactgccgaacgcagaactgctgggcaaacgtcgtctggagaaattcgccgctaaagttcagcagcagctggaaagcagcgatctggaccagtaccgtgcgctgctggcgaaaatccagccgaccgcggaaggcgaagagctggacgtggaaacgctggccgctgcgctgctgaaaatggcccagggcgaacgttctctgatcgttccgccggatgcgccgatgcgtccgcgtcgtgaattccgcgatcgtgatgaccgtttcgaacgtcgtggcgaccgtaatgaccgcggcccgcgtggcgatcgtgaagatcgtccgaagcgtgagcgtcgtgacgtgggtgaaatggaactgtaccgcattgaagtgggccgtgatgacggcgttgaagttcgtcatatcgttggcgcgatcgctaacgaaggcgacatcagcagccgctacatcggcaacattaagctgttcggttctcactccaccatcgaattgccgaaaggtatgccgggcgaagtgctgcagcactttactcgtacccgcatcctgaacaagccgatgaacatgcagctgctgggcgatgcgcagccgcgcaccgaacgtcgtggcggcggcgagcgtcgtgaaggcggtcgtagcttcggtggcgaacgtcgtgaaggcggtcgtggtgaaggtcgtcgtttcagcggcgaacgtcgtgaaggcggccgtgggccgcgtcgtgatgatgcttccgcgccgcgccgtgatgattccgcgggtcgtcgtcgtttcggtggcgatgcgtaa

SEQ ID NO: 88630 - DNA, 885 bp, Enterobacter aerogenes
atgaagccttttctgcgctggtgtttcgtggcgacagctctcacgctggcaggatgcagcaactctgcctggcgtaaggacgccgtcctcgcggtaccattgcaaccgactttgcagcaagaagtgattctggcgcgcatggaacaaattcttgccagtcgggctttaaccgatgacgaacgcgcacagcttttatatgagcgcggagtgttgtatgatagtctcggtctgagggcattagcgcgaaatgatttttcacaagcgctggcaatccgacccgatatgcctgaagtattcaattacttaggcatttatttaacgcaggcaggcaattttgatgctgcctatgaagcgtttgattctgtacttgagcttgatccaacttacaactacgcgcacttaaaccgcggcatcgctctgtattacggtggccgtgctaagttagcgcaagatgatctgctggcgttttatcaagacgatcccaatgatcctttccgcagtctgtggttatacctcgccgagcgtaagcttgatgagaagcaggcgcttgaagcactgaaacagcgcttcaacaagtcggacaaagagcaatggggatggaacattgtcgagttctaccttggcgacattagcgaaaaagagctgatgacccgtctgaaggcagacgcaacggataacacctcgctcgctgagcatctcagtgaaaccaacttctatttaggtaagtactacctaagtctgggggacaaggacagcgctacggcactgttcaaactggcggtcgctaacaacgttcataactacgttgagcaccgatacgcattgttggaattatcgctcttgggccaggagcaagatgacctggcagaatcggaccagcaatag

SEQ ID NO: 88631 - DNA, 2136 bp, Enterobacter aerogenes
ttgcttaatccgatcgttcgtaaattccagtacggccagcacaccgtaaccctggaaaccggcatgatggcgcgccaggcaacggccgctgtgatggttagcatggatgacaccgcggtcttcgttaccgttgtgggtcagaaaaaagcgaaaccgggccaggacttcttcccgctgactgttaactaccaggagcgtacctacgctgccggtaaaatcccgggtggcttcttccgtcgtgaaggccgtccaagcgaaggcgaaaccctgatcgcgcgtctgattgaccgcccggttcgtccgctgttcccggaaggcttcgttaacgaagtccaggttatcgctaccgttgtttccgttaacccgcaggttaacccggatatcgtcgcgatgatcggcgcttccgcagcgctgtcgctgtccggtattccgttcaatggcccaatcggcgccgctcgcgtgggttacatcaacgaccagtacgtactgaacccaacccaggaagagctgaagtccagcaaactggatctggtggttgccggtaccgaagcggccgtactgatggttgaatccgaagctgaactgctgagcgaagaccagatgctgggcgcggtggtctttggccacgagcagcagcaggttgttattcagaacatcaacgacctggtgaaagaagccggtaaaccgcgttgggactggcagccggaagtggttgacgccgccctgaacgcgcgcgttgctgcgctggctgaatcccgcctgagcgatgcttaccgtatcaccgacaaacaagagcgttacgctcaggttgacgtgatcaaatctgaaaccatcgcgacgctggttgctgaagatgaaaccctggacgccaacgaactgggtgaaatcctgcacgctatcgagaaaaacgtcgtccgtagccgcgtactggcaggcgagccgcgtatcgatggccgcgaaaaagacatgatccgtggtctggacgttcgtaccggcgtactgccgcgtactcacggttccgcactgtttacccgtggcgaaactcaggcgctggttactgcgactctgggtaccgcacgcgacgcgcagaacatcgacgaactgatgggcgagcgcacggactccttcctgttccactacaacttccctccgtactccgtaggtgaaactggcatggttggttctccgaagcgtcgtgaaatcggtcacggtcgtctggctaagcgcggcgttctggccgtaatgccgacaatcgacgaattcccgtacaccgttcgcgtggtatctgaaatcaccgaatccaacggttcttcttccatggcttccgtctgtggcgcatctctggcgctgatggacgctggcgtgccggtgaaagccgccgttgcgggtatcgcaatgggtctggtgaaagaaggcgataacttcgtcgtactgtccgacattctgggtgacgaagaccaccttggcgatatggacttcaaagttgcgggttctcgcgacggtatctctgcgctgcagatggatattaaaattgaaggtatcaccaaagaaatcatgcaggttgctctgaaccaggctaaaggtgcgcgtctgcacatcctgggcgtgatggaacaggcgattaacgcgccgcgcggcgatatctccgaattcgcaccgcgtatccacaccatcaagatcaacccggacaagatcaaagacgttatcggtaaaggcggttctgttatccgtgccctgaccgaagaaaccggcaccaccatcgaaatcgaagatgacggtaccgtgaagatcgcagcgaccgacggtgacaaagctgagcacgctatccgccgtatcgaagagatcaccgctgagatcgaagttggccgtatctacaatggtaaagtgacccgtatcgttgactttggcgcattcgttgccatcggcggcggtaaagaaggtctggttcacatctctcagatcgctgacaagcgcgttgagaaagtgactgattacctgcagatgggtcaggaagtaccggttaaggttctggaagttgaccgtcagggccgcgtacgtctgagcattaaagaagcaactgagcaggctcagccagctaacgcgccggaagctccggccgcagagcagggcgagtaa

SEQ ID NO: 88632 - DNA, 270 bp, Enterobacter aerogenes
atgtctctaagcgttgaagctaaagcacaaatcgtttctgagttcggtcgtggcgcaaacgacagcggttctactgaagttcaggttgcactgctgactgcacagatcaaccacctgcagggtcactttgcagagcacaaaaaagatcaccacagccgtcgtggtctgctgcgcatggtttctcagcgtcgtaaactgctcgactacctgaaacgtaaagatgttgcacgttactcttcgctgatcgagcgtctgggtctgcgtcgctaa

SEQ ID NO: 88633 - DNA, 945 bp, Enterobacter aerogenes
atgagtcgtcctcgtcgtcgcggccgcgacgtgcacggcgtattgctgctggataagcctcagggcgcctccagcaacgatgtgctgcagaaagtaaaacgtatttataatgccaaccgcgctggccataccggcgcgctggatccgctggcgaccggtatgctgccggtctgccttggcgaagcgactaagttttcccagtatctgctggattctgataagcgttatcgcgtgatcgccaaacttggtcagcgtacggatacctccgacgccgatggccaggtggtggaggaacgcccgctaacctttaacgaagaacagctggcggcggcgctggatagcttccgcggcgagactcagcaggtgccgtcgatgtactcggcgctgaaatatcagggtaaaaagctgtacgaatacgctcgtcagggcattgaggttccgcgtgaagcccggccgattacggtctatgagctgctgtttattcgccatgaaggcgatgaactggagcttgagatccactgttcgaaaggtacctacatccgtacgattatcgatgatttgggcgagaagcttggctgcggcgcgcacgtgattttcctgcgtcgcctggcggtgagcaaatacccggtcgagcggatggtgaccctggagcaactgcaggcgctggtcgaacaggcggcggcagaggatattcccgccgctcaactgcttgacccgctgctgatgccgatggatagcccggcgtcggattacccgctggttcatattccggaaacttccgcggtctactttaaaaacggcaacccggttcgtcagtcaggcgcgccgctgaacgggctggtgcgagtgatggaaagcgagtccggcaagttcctcggtatgggcgaaatcgacgatgaaggccgcgtggcgcctcgtcgtctggtggtggaatacccacagtaa

SEQ ID NO: 88634 - DNA, 402 bp, Enterobacter aerogenes
atggcgaaagaattcggtcgcccgcagcgcgtggcccaggagatgcaaaaagaaattgccatcatcctgcagcgtgaaatcaaagacccgcgtctgggcatgatgaccaccgtttccggcgtagaaatgtcccgtgacctggcctatgccaaagtgtatgtcactttccttaacgacaaagatgaagccgcggtgaaagcgggcatcaaagcgttgcaggaagcgtctggttttatccgctctctgctgggcaaagcgatgcgcctgcgcatcgtgccggaactgactttcttctacgacaactcgctggtcgaagggatgcgcatgtccaatctcgttaccagcgtggtgaaacacgacgatgagcgtcgtgtgaacccggacgacagcaaggaggactaa

SEQ ID NO: 88635 - DNA, 2691 bp, Enterobacter aerogenes
atgacagatgtgactattaaagcgctggcctcagaaattcagacctctgtggatcgcctgatacagcaatttgctgatgcaggtattcgcaaatcggctgatgattctgtgaccgcgcaagagaagcaaaccttgttaacgcacctgaaccgtgaacacggctcggcgcctgacaagctgacgttgcagcgtaaaacgcgcagcacgttgaatattccaggtaccgatggaaagagtaaatcggtacaaatcgaagtccgcaagaaacgcacctttgtgaaacgcgatccgcaagaggctgaacgcctggccgcggaagagcaggcgcagcgtgaagcggaagagcaagcccgtcgtgaagctgaagaagcagctaagcgcgaggcgcaattaaaagctgaacgtgaggccgcagaacaagctaaacgtgaagtcgctgaaaaagcgaaacgtgaagccgcggaaaaagacaaagtgagcaatcaacataccgacgaaatgaccaagaccgcccaggctgaaaagacccgccgtgagaacgaagcagcggagctgaagcgcaaatcggaagaagaagcacgccgcaaacttgaagaagaagcgcgccgtgtagcggaagaagcacgccgtatggctgaagaaaatgaaaaaaactggagtgaaactccggaaaccccagaagaaacgaccgactaccacgtaaccacctctcagcatgcgcgtcaggctgaagatgacaacgatcgtgaagttgaaggcggtcgcggccgtggccgtaacagcaaagctgcgcgtccggcgaagaaaggcaacaaacacgctgaatcgaaagctgaccgtgaagaagcccgtgcggccgttcgcggcggtaaaggcggcaaacatcgtaaaggttcttctctgcagcagggcttccagaagccggctcaggccgttaaccgcgatgttgtgatcggcgaaaccatcaccgttggcgagctggccaacaaaatggcggtcaaaggttctcaggtcatcaaagcgatgatgaaactgggcgcgatggcgaccatcaaccaggtcatcgaccaggaaaccgctcagctggttgccgaagagatgggccacaaagttatcctgcgtcgtgaaaacgagctggaagaagcagtaatgagcgaccgtgacaccggcgctgcggctgaaccgcgcgcaccggtagtgaccatcatgggtcacgttgaccacggtaaaacctctctgctggactacattcgttctactaaggttgcctccggcgaagcgggtggtattacccagcacatcggtgcgtaccacgtagaaaccgacaacggcatgatcaccttcctggacaccccgggccacgccgcgtttacctccatgcgtgctcgtggtgcgcaggcgacggatatcgtggttctggtggtggcggcagacgacggcgtgatgccgcagactgtggaagctatccagcacgccaaagcggcgcaggtgccggtagtggttgcagtgaacaagatcgataagccggaagcggatatggatcgcgtgaagaacgaactctcccagtacggcgtgatgccggaagagtggggcggcgaagcgcagttcatcccagtatcggcgaaagttggtaccggtatcgacgacctgctgaacgctatcctgctgcaggctgaagttctcgaactgaaagcggtacgtaacggtatggcgagcggcgcggtcatcgaatccttcctggataaaggtcgtggtccggtagctaccgttctggttcgcgaaggtactctgcacaagggcgatatcgtactgtgtggctttgaatatggccgcgtacgtgcgatgcgtgacgaactgggtcgcgaagtgctggaagcgggtccgtccattccggtggaaatcctcggtctgtccggcgttccggctgcgggtgatgaagttaccgtcgttcgtgacgagaaaaaagcgcgtgaagttgcgctgtatcgtcagggcaaattccgtgaagttaaactggctcgccagcagaaatctaaactggaaaacatgttcgctaacatgaccgaaggcgaagttcacgaagtgaacatcgtactgaaggcggacgtgcagggttctgtcgaagcgatttccgattccttgctgaaactgtctaccgacgaagttaaagtgaagatcatcggttccggcgtaggtggtatcaccgaaaccgacgcgaccctggctgccgcttccaacgcgattctggttggcttcaacgttcgtgccgatgcttccgcacgtaaagttatcgagtcagaaagcctggatctgcgttactactccgtcatctataacctgatcgacgaagtgaaagcggcgatgagcggcatgctgtctccggaactgaaacagcagatcattggtctggctgaagtgcgtgatgtcttcaaatcgccgaaattcggcgccatcgcgggctgtatggttaccgaaggtacgattaaacgtcacaacccaattcgcgtactgcgcgacaacgtggttatctatgaaggcgagctggaatccctgcgccgcttcaaagatgacgttaacgaagttcgtaacggtatggaatgtggtatcggcgtgaagaactacaacgacgttcgcgttggcgatatgatcgaagtgttcgaaatcatcgaaatccagcgtagcatcgattaa

SEQ ID NO: 88636 - DNA, 1488 bp, Enterobacter aerogenes
atgaacaaagaaattttggctgttgttgaagccgtttccaacgaaaaagcgctgccgcgcgagaagattttcgaagcgttggaaagcgctctggcaacggcgaccaagaaaaaatacgaacaagagatcgacgttcgcgtagaaatcgaccgtaaaagcggtgatttcgacaccttccgtcgctggctggtggttgaagaggtgactcaaccaactcgcgaaatcacgctggaagcggcgcgttacgaagatgaaagcatgaacgtcggcgactacgttgaagatcagattgaatctgtcaccttcgaccgtatcaccacgcagaccgctaaacaggttatcgtacagaaagtacgtgaagctgagcgcgcgatggttgtcgatcagttccgcgagcacgaaggtgagatcatcaccggcgtggtgaaaaaagtaaaccgcgacaacatcactctggatctgggcagcaacgctgaagccgtgatcctgcgtgaagatatgctgccgcgtgaaaacttccgtccgggcgaccgtattcgcggcgtgctgtacgccgttcgtccagaagcgcgcggcgcgcagctgttcgtgactcgctccaaaccggagatgctggtcgaactgttccgcattgaagtgccggaaattggcgaagaagtgctggaaatcaaagccgcagcccgcgatccgggttctcgtgcgaaaatcgccgtgaaaaccaatgacaagcgtatcgacccggttggcgcttgcgtaggtatgcgcggcgcgcgcgttcaggcggtttctaccgagcttggcggcgagcgcatcgatatcgtcctgtgggatgataacccggcgcagttcgtgattaacgccatggcgccggctgacgtcgcgtccatcgtggtggatgaagataaacacaccatggacatcgcggtagaagcaggcaacctggcgcaggcgatcggccgtaacggtcagaacgtccgcctggcatcgcagctcagcggctgggaactcaacgtcatgaccgttgatgacctgcaggctaagcaccaggctgaagcccatgccgctatcgataccttcaccaaatatctcgatattgatgaagatttcgcaaccgtactggttgaagagggcttctcctcgctggaagaactggcctatgtgccgatgaaagaactgctggaaatcgacggccttgatgaagcgaccgttgaagcacttcgtgagcgtgcgaaaaacgcactgactacactggcgctggctcaggaagaaagcctgggagacaacaaacctgccgacgatttattgaatctggaaggtttggaccgtgctctggcgtttaagctggctgcccgtggtgtttgtacgctggaagatctcgccgaacagggcgttgatgacctggctgatatcgaaggtatgaccgacgagaaagctggtgaactcatcatggctgctcgcaacatttgttggttcggcgacgaagcgtaa

SEQ ID NO: 88637 - DNA, 453 bp, Enterobacter aerogenes
ttgtccacattagagcaaaaattaacagagatgctcactgcgccagttgaagcgcttggctttgagctggtcggcatcgaatttattcgcggtcgcacatccacactgcgcatctatattgatagtgaagatggcatcaatgttgatgattgtgctgatgtgagccaccaggtcagtgctgtcatggatgtcgaagatccaatcaccgtcgcttacaacctggaagtctcttcgcctggtctcgaccgtccgatgtttactgctgaacactatcaacgtttcaccggtgaagaagtttcgctggtgctgcgtatggcggtacagaaccgtcgtaaatggcagggcattatcaaagcggtagacggtgagatgatcacggtaaccgtcgaaggcaaagatgaagtgttcgcgctgagtaacatccagaaggcgaacctggttccccacttttaa

SEQ ID NO: 88638 - DNA, 1344 bp, Enterobacter aerogenes
atgacgacgattcttaagcatctcccggttggtcaacgtattggtattgctttctccggtgggctggataccagcgccgccctgctgtggatgcgtaaaaaaggcgcggttccttatgcatataccgcgaacctgggccagcctgacgaagacgactacgaggccattccgcgtcgtgcgaaagagtatggcgctgaaggcgcccgtctgattgattgccgcaaacaactggtggcggaaggcatcgcggcgattcagtgcggcgcattccataacaccaccggcggcttaacctatttcaacaccacgccgctgggccgagccgtgaccggcaccatgctggttgccgcaatgaaagaagatggcgtcaacatctggggcgacggtagcacctataaaggcaacgatatcgagcgtttttatcgctacggcctgctgaccaatgcggaacttcagatctacaagccgtggctggatagcgatttcattgatgaactgggcggccgtcatgaaatgtccgagtttatgatagcctgcggcttcgactacaaaatgtctgtcgagaaagcctattccaccgattccaacatgctgggcgcgacgcacgaagcaaaagatctcgaattccttaattccagcgtgaaaatcgtcaacccgattatgggcgtgaagttctgggatgaaagcgtaaaaatcgccgctgaagaagtgaccgtgcgttttgaacagggtcatccggttgcgctgaatggcaaaacgttcagcgatgacgtcgaactgatgctggaagctaaccgcatcggcggtcgccacggtctgggcatgagcgatcagattgaaaaccgcatcatcgaagcgaaaagccgtggcatctatgaagctccggggatggcactgctgcatatcgcctacgagcgactgctgactggtatccacaacgaagataccattgagcaatatcatgctcatggccgccagttgggtcgcctgctctatcagggtcgctggttcgattcccaggcgctgatgctgcgcgattcgctgcagcgttgggtcgccagtcagatcaccggcgaagtgactctggaactgcgtcgcggcaacgactactcaatcctgaataccgtttcagacaacctgacctataaagcagagcgtctgactatggaaaaaggcgattccatgtttaccgctgaagatcgtatcggccagctgaccatgcgcaacctggacattaccgatacccgtgagaagctattcggctatgcccaatccgggctactcagcgcgtcttccgccaccggtctgccacaggttgaaaacctggaaaatcgcgataaataa

SEQ ID NO: 88639 - DNA, 630 bp, Enterobacter aerogenes
atgaatattaaacctcccgttcggccgcaagacgcgatcaatcgtctgatgtcgttgctggaaccgcatgccacgccaataaatatggtcgcaaggaaaaggcttagctgggaatataaaggcaaaatccagctctatctgtttaagaaaggtgagctctccatttttcgctcatcggacagattactcatggtcaccgtctatgagccgcacctgtttggcgtagccgaaatgctgcagcccagccgtagccacggccttcgtgcggaagtcgatacggagatcctgcggattgacagcgataaagccatgcaactcttcagtgagcataacatgtgggaagaggtcacccggctgctggcttaccacacctcttatttggtgtatcgcgacgatttagtattacaacagcggacttattcggtcatacgtaatcatttaatggaaatgttactgcttcctgaagagacccgctcgcgggtatccatgctggaatatattcaggaccgcacacatttgtcgcgcagcagtattctgaatgtgttatcagcgttgaaaaagggcggctatatcgagtttgcccgcggtggttatttacagagtatcacctccctgcctgagaagttttag

SEQ ID NO: 88640 - DNA, 552 bp, Enterobacter aerogenes
atgagcatgttcagattgaaatccatcctgcttatcgcggccctgagcgccagcagcgccgccttcgcttccgttaatcttcacggtgaagccggttcagaattcaccaacttatcagccagctttaacccgcaggctcccggaatgacctttaacggtaactgggcgcatagcgataacgatggcgatacggtgggattgggcatgggctataactttgatctcggtccgttcctgctgacggctggcggtaaagcggtatatctgaatccgaacgatggcgatgaaggctatgcgattgccctcggcggcggcgctcaactaccgcttggcgatttctttaccttgttcggtgaggcttattattccccggattccatgtccagcggcgttgatgaatatctcgaagccaatgccggcttacgcgtcaatatcatcaaatccatgagcatcgaagcgggctatcgctatatcgatatggcgggtaaacatgaccaccgcgataacgttctggcggatggcgcctatgcgggtttcaatttccgtttctaa

SEQ ID NO: 88641 - DNA, 396 bp, Enterobacter aerogenes
atgcgtactttaaaagtagttatcattgccggtgtattgggcctggccggatgcagcagtcattcgtcgccagaaacagtagacacgttgaataccctgcaggtgccggttataaataattccgcggtcgcgccggaatcatcaacggtcgttaactattttcaggataacagcctgcttatcagcaagttaagccagtcgctcaaaagcaactatttacaggatgtagataaacgggatgtctttgataaagatagcgaggcgtatcaggtttacggggcgttaaccaaacttgagcaaatggcttcgatgaacgacgtctaccgtaaagagaacaatattgcgggcttgcaggaaattaataaactgctgaaaaccataccatctcttgcataa

SEQ ID NO: 88642 - DNA, 330 bp, Enterobacter aerogenes
atgtacgaagctcttttagtaattttccttattgtagcgattgcccttgttggcctgatcatgctgcagcaaggtaaaggcgctgacatgggagcctccttcggagcaggcgcttccggcacgttgtttggttctagcggttctggtaacttcatgacccgtatgaccggcattctggccgcgctgttcttcatcatcagtctggcgctgggtaatatcaacagcaacaagaccaataaaggaagtgagtgggataatctgagtgcgccgaagtctgagcagactcagccaaccgcaccggctcagccggccagcgatatcccgcactaa

SEQ ID NO: 88643 - DNA, 1338 bp, Enterobacter aerogenes
atgagtaaccgcaaatattttggcaccgatggtattcgtggccgcgttggcgacgcacctattacgcctgagttcgtgctgaagctgggttgggcggcaggtaaagtgctggcgcgccatggctcacgtaaaattattatcggtaaagacacgcgaatttctggctatatgctggaatccgcgctggaagctggcctggcggctgcgggcttgtccgcttcgtttaccggccctatgccgacgccggcaatcgcctatctgacccgcgccttccgcgctgaagcgggaatcgtcatctctgcctctcataaccctttctatgacaacggtattaaattcttctctatcgaaggcactaagcttccggatgacgtcgaagaagcgattgaagcagagatggaaaaagagctgacctgcgttgattccgctgagcttgggaaagccagccgtatcgtcgacgccgccggccgctatattgagttttgcaaaggcaccttcccgaatgagctgagcctcggctcgctgaaggtggtggtggattgcgcccacggcgcgacttaccacattgcgccaaatgtattccgcgaattgggcgcgcaggttatcgcgatgggctgtgaacctgatgggctgaacattaacgaagaggtcggcgcaaccgacgtacgcgcgctgcaggctcgcgtgctggcggaaaaagccgatctgggtattgcctatgacggtgatggcgatcgcgtcattatggttgaccatgaaggcaacaaagtcgatggcgatcagatcctctatattatcgcccgtgaaggcctgcgccagggccagctgcgcggcggcgcagttggcacgctgatgagcaacatggggcttgagctggcgctgaagcagcttggcattccgtttacccgcgcgaaagtgggtgaccgttacgtgctggaaaaacttcaggaaaaaggctggcgtatcggcgcggaaaactccggtcacgtgattctgctcgacaaaaccaccaccggcgatggcattgtcgccagcctgcaggtggtggcggcgatggtgcgtaatcatatgagcctgcacgatctgtgcagcggtatgaaaatgttcccgcagattctggtcaacgtacgctttaccgaaggcagcggcaacccgctggaacatgacagcgtaaaagcggtcactgccgaagtagaagctgcgctggggaaccgtggacgcgtgctgctgcgtaaatccggtactgaaccgctgatccgcgtgatggttgaaggcgagcatgaagcgcaggtgaaggaatttgcccaccgtatcgccgatgcggttaaaagcgtataa

SEQ ID NO: 88644 - DNA, 849 bp, Enterobacter aerogenes
atgcaattacacgcccaggggtcaacgctcgatctctcccatccgcatgtgatggggatccttaacgtcacgccagattccttctccgatggcggcagtcataattcgttgatagaggcggttaagcacgccaatctgatgattaacgccggggcgactattattgatatcggtggtgaatcaacccgtcctggggcggcggatgtcagcgtcgaggaagagctggcgcgggtgatcccggtggtagaagcgattgcacagcgttttgaagtttggatctcggttgatacctcgaaagccgaggtaatccgcgaatccgcgcgcgctggcgcgcatatcattaacgatattcgctcattaaccgagcccggcgccctgcaggccgccgcgcaaaccgggctaccggtgtgcctgatgcatatgcaggggcagccgaaaacgatgcaggaagcgccgaagtacgaagatgtttttgccgaggttgaccgtttttttgctgaacacattgtgcgctgcgaacaggcggggatcgcaaaagaaaaattgttgctcgacccgggattcggattcggtaaaaatctttcccataactatgaactgcttgcccgacttggggagttccatcattttggcctcccgctgctggtggggatgtcgcgtaagtcgatggtgggtcagctgttgaacgtggggccgtcggaacggctgagcggcagcttgtcctgcgcagtcattgctgcaatgcagggcgcgcagataattcgcgtccatgatgtcaaagaaacggtagaagcgctgcgcgtggtggaagccaccctggccgctaaggaaaataaacgttatgagtaa

SEQ ID NO: 88645 - DNA, 1944 bp, Enterobacter aerogenes
ttgagtgacatggcgaaaaacctaatactctggctggtcattgccgttgtgctgatgtcagtattccagagctttgggcccagcgagtcgaatggccgcaaggtggattattctaccttcctgcaagaggtcaatcaggaccaggttcgcgaagcgcgtatcaacggacgtgagatcaacgttaccaagaaagatagtaaccgttacacgacttacattccggttaacgatccgaagctgctcgacaacctgttgactaaaaacgtcaaagtggttggcgaacagccggaagaaccgagcctgctggcttccatcttcatttcctggttcccgatgcttctactgatcggcgtctggatattctttatgcgtcagatgcagggcggcggcggaaagggcgcgatgtccttcggcaagagcaaggcccgaatgctgaccgaagaccagatcaaaaccacctttgctgacgttgccggttgcgacgaagcgaaagaggaagtgggcgagctggttgaatatctgcgcgaaccgagccgtttccagaagctgggcggtaaaattccgaaaggcgtcctgatggtcggccccccgggtaccggtaaaacgctgctggcgaaagctatcgccggcgaagcaaaagtgccgttctttactatttccggttctgacttcgtagaaatgttcgtcggtgtcggcgcgtctcgtgtacgcgacatgttcgaacaagctaagaaagcagcgccttgcatcatctttatcgatgaaatcgacgccgtcggtcgccagcgtggcgccggtcttggcggcggtcacgatgagcgtgagcagaccctgaaccagatgctggttgagatggatggtttcgaaggtaacgaaggtatcatcgttatcgccgcgactaaccgtccggacgttctggacccggcattgctgcgtccaggccgcttcgaccgtcaggttgtcgttggtctgccggatgttcgtggtcgtgagcagatcctgaaagttcatatgcgtcgcgtaccgctggcgccggatatcgatgcggcaatcattgcccgtggtactcctggcttctccggtgctgacctcgcgaacctggtgaacgaagctgccctgtttgctgcccgtggtaacaaacgcgtcgtttcgatggttgagttcgaaaaagcgaaagacaaaatcatgatgggtgcggaacgtcgctccatggtgatgacggaagcgcagaaagaatcgaccgcgtaccacgaagcgggccacgcgattatcggtcgtctggttccagaacacgatccggtacacaaagtgacgattatcccgcgcggccgtgcgctgggtgtgaccttcttcctgccggaaggcgatgctatcagcgccagccgtcagaaactggaaagtcagatctccactctgtacggcggtcgtctagcggaagagattatctacggtgctgaacatgtttctaccggcgcgtccaacgatattaaagttgcgactaacctggcgcgtaacatggtcacccagtggggcttctccgacaaactcggcccgctgctgtatgccgaagaagagggcgaagtgttcctcggccgtagcgtcgcgaaagcgaagcatatgtctgatgaaactgcgcgtattatcgaccaggaagtgaaatcactgattgagcgtaactacggtcgtgctcgccaactgctgaacgacaacatggatattctgcacgcgatgaaagatgcgctcatgaaatatgagaccatcgatgcgccgcagattgacgacctgatggctcgtcgcgatgttcgtccgccggcgggttgggaagaaccaggttcttctaacaactcaggcaacaatggcaccccgacggcgccgcgtccggttgatgagccgcgtacgcctaacccgggcaataccatgtcggaacagctgggcgacaaataa

SEQ ID NO: 88646 - DNA, 630 bp, Enterobacter aerogenes
atgacaggtaaaaagcgttctgccagctcaagccgctggcttcaggaacactttagcgataaatatgttcaacaggcacagaaaaaggggttacgttcccgtgcctggtttaaacttgatgaaatacagcaaagtgacaagatttttaagccgggaatgacgatagtcgatctcggcgctgctcccggtggctggtcgcagtacgcggttacgcagatcggaaacagcggccgcatcatcgcttgcgatcttttaccaatggatccaatcgtcggtgtggacttccttcagggcgattttcgtgatgaattagtcctgaaagcgttacttgagcgagtaggcgacagtaaagtacaagttgtcatgtccgatatggcgccgaatatgtgcggaacaccggcggtggatattccccgggccatgtatctggtagaactggcgcttgaaatgtctcgtgatgtattagcgccaggtggtagttttgtagtgaaggtgttccagggcgaaggcttcgatgagtatcttagagaaattcgctccctgtttacgaaggtcaaagttcgtaagccggactcttcccgcgctcgttcgcgtgaagtgtatattgtagcgaccgggcgtaaaccataa

SEQ ID NO: 88647 - DNA, 333 bp, Enterobacter aerogenes
atgacccgttttcaatcccaacgtaagcaaaaaaatacgatgaatctgagtactaaacaaaaacagcacctgaaaggtctggcacatccgctcaagccggtagttatgcttggcaataatggtttgaccgaaggggtactggccgagatcgaacaagcgttagggcaccatgagctcatcaaggtgaagatcgcctcagaagatcgcgaaactaaagccttgatcgtggaagccatcgtgcgtgaaaccggcgcctgtaacgtacaggtcatcggtaaaacgctggttctgtaccgcccaacgccagagcgtaaaatctcgctgccacgctaa

SEQ ID NO: 88648 - DNA, 213 bp, Enterobacter aerogenes
gtggccaggcgagcaaaatgccatgctcctgacgttgataaaaggccgctatgcggcctttttcctttctttacaatctataaacatcgtagcgggaaatacgccttacaggtattcaaccttgataatttcgtattccacttcaccacccggggtacggatagtgacgacgtcatcctgctctttgccgatcaggccgcgggcgatcggtga

SEQ ID NO: 88649 - DNA, 477 bp, Enterobacter aerogenes
atgcaagctattccgatgaccttacgtggcgcagaaaaactgcgcgaagaactggatttcctgaagtccgtacgtcgtccagaaattattgctgctatcgctgaagcgcgtgagcacggcgatctgaaagagaacgcggaataccacgcggcccgcgaacagcagggcttctgcgaaggtcgtatcaaggatatcgaagcaaaactgtcgaacgcgcaggttatcgatatcactaagatgccgaataatggccgcgtgatttttggcgccacggtcagcgtgctgaacctggataacgacgaagagcagacttaccgcatcgtgggcgatgatgaagctgattttaaacagaatctcatctctgtgaattcaccgatcgcccgcggcctgatcggcaaagagcaggatgacgtcgtcactatccgtaccccgggtggtgaagtggaatacgaaattatcaaggttgaatacctgtaa

SEQ ID NO: 88650 - DNA, 1434 bp, Enterobacter aerogenes
atgcgatttcccagatttatcatcggattgactgccggtatagcgcttagcgctcaggccgcgaatattgacgagtacatcagccagcttcctgccggcgcgaaccttgcctttatggcgcagaaggttggctccccgacgccggagatagactttcacagccagcagatggcgctgcctgccagtacccagaaggtgatcaccgcgctggccgcgttgctgcagttggggccggatttccgcttcaccacgacgctggaaaccaaaggctcccttgacggcggtgtgctgaaaggcgacctgattgcccgcttcggcggcgatccgacgctaaagcgtcaggatatccgcaacatggtggcgtcgctgaaaaaagccggtgtgcagcgtattgaaggcaatgtgcttatcgatacctcggttttcgctagccacgataaggctcccggctggccgtggaacgatatgacgcagtgcttcagcgccccgccagcggcggcgatcgttgatcgcaactgcttctccgtctcgctctatagcgcacagaaagcgggcgatttggccttcatccgcgtggcgtcttactatccggtcaccatgttcagccaggtgcggacgctggcgcgcggctccgcagaagcgcagtactgcgagctggacgttgtgccgggcgatctcaaccgctataccctcaccggctgcctgccgcagcgcagcgagccgctgccgctggcgttcgccattcaggatggcgcaggctatgcaggcgcgatcctgaaagccgagctcgccgatgcggggatcacctacagcggtactcttctgcgccagacgctggccaacgatccgggtaccgtgctggcgacgactcaatcggcgccgttgcacgatcttctgcgcatcatgttgaagaaatccgacaacatgattgctgatacggtgttccgtactatcggccacgcgcgaatgggcgtaccgggaacctggcgcgccggctccgacgcggtacggcaaatcctgcgccagcaggcgggtattgacctcggtaacacgattatcgccgatggctcaggcctgtcccggcacaacctgatcgcgccggcaacgatgatgcaggtattgcagtacatcgctcagcacgacaatgaactcaactttatctcgatgttgccgcttgccgggcacgatggttcgctgcagtatcgtgccggtcttcatcaggcgggcgttgacggtaaggtttcggcgaagaccggttcgctgcagggggtatataacctggcaggtttcattaccaccgccagcggccaaaagatggccttcgtacagtacctctccggctatgcggtgccgccgggcgaccagcgcaaccgccgcataccattggtgcgcttcgaaagtcgactgtataaagatttgtaccagaacaactaa

SEQ ID NO: 88651 - DNA, 1176 bp, Enterobacter aerogenes
atgaagtttgtagatgaagcaacgatcctggtcgtagcaggtgacggcggcaatggttgcgttagcttccgccgcgaaaaatatattccgcgaggcggcccggacggcggcgatggcggtgacggcggtgacgtttggctggaagctgacgagaacctcaacaccctgatcgactatcgattcgaaaaatctttccgcgcagaacgcggacagaacggtcagagccgcgactgcaccggtaaacgcggtaaagatgtcacggtgaaagtgcctgtagggacccgcgtcatcgaccaaggaaccggcgagaccatgggcgatatgaccaagcacggtcagcgtttaatggtcgcgaaaggcggctggcacggtcttggcaacacgcgcttcaaatcatccgttaaccgtaccccgcgtcagaaaactatgggtacgccgggcgataagcgcgatctgcagctcgaactgatgctgctggccgacgtggggatgctggggatgccgaatgccggtaaatccaccttcattcgcgcggtctccgcggcgaagccgaaagtggccgactatccatttaccactctggtgccgagcctgggcgtggtgcgtatggataacgagaagagctttgtggtcgccgatattccggggctgattgaaggcgcggcggaaggcgctggccttggtattcgcttccttaagcacctcgagcgctgccgcgtgctgctgcacctcatcgacatcgagcctatcgacggttccgatccggttgagaatgcgcgcattatcatcggcgaactggagaaatacagcgagaagctggcctctaaaccgcgctggctggtcttcaacaagattgacctgatggacaaagcggaggctgaagccaaagcgaaggccatcgccgaagcgctgggttgggaagataagttctacctgatctctgcggccagccagcagggcgttaaagagctgtgctgggacgtgatgacctttatcatcgaaaacccaatcgtgcaggcggaagaagagcagaagccggagaaagtcgagttcatgtgggacgactatcaccgtcagcagcttgaagaagccgaactggaagaagatgacgaagactgggatgacgactgggacgaagacgacgaagaaggcgtcgaattcatctacaaacgttaa

SEQ ID NO: 88652 - DNA, 966 bp, Enterobacter aerogenes
atgaagcagcaggccggcattggcattcttttggcgctaaccaccgcgatgtgttggggagcactgccaattgcaatgaagcaggttcttgaagtgatggagccgccaacggtggtcttttatcgctttttgatggccagtattggtcttggcgcgatcctcgccatcaaaggcaaactgccgccgctgcgaatttttcgcaagccgcgctggttggttttattagcgattgctaccggcggtctgttcggtaacttcattctgttcagctcttccctgcaatatctcagtccaacggcctcccaggtcatcggccagctatcgccggtcggtatgatggtggcaagcgttgtgattctgaaagagcgcatgcgcggtacccaggttgtaggggcgctgatgttgctcagcgggctggtgatgtttttcaacaccagcctgattgaaatctttacccgtctcacggactacacgtggggggtaatttttggtgtcgcagcggcaacggtgtgggtaagctacggggtcgcgcaaaaggtgttattgcggcgcctggcatcacagcagatactatttttgctgtacactttatgtactatcgcattactgccactcgctaaaccgggggtaatatcccaactaagcgactggcaactggcttgcctgattttttgcgggctgaataccctggtcggctacggggcgctggcggaagccatggcgcgctggcaggcggcgcaggtcagcgcgttaattaccttaacgccactgtttacgctactgttttctgatttattatcaatggcctggcccgatgttttcgccagaccgatgttaaacctgattggttatctcggtgcgtttgtcgtggttgcgggcgcgatgtattccgccattggccatcgtctttggggacgctggcgcaagcgagaagcggttgtaccgctgccccgctcaggcgaatga

SEQ ID NO: 88653 - DNA, 258 bp, Enterobacter aerogenes
atggcacataaaaaggctggcggctcgactcgtaacggtcgcgattcagaagctaaacgtctgggcgtaaaacgtttcggcggtgaagcagttctggcaggtagcatcatcgttcgtcaacgtggtactaaattccacgctggcaccaacgttggttgcggccgtgaccacactctgttcgctttgactgacggtaaagtcaagttcgaagttaaaggcccgaaaaaccgtaaattcatcagcatcgttgctgaataa

SEQ ID NO: 88654 - DNA, 312 bp, Enterobacter aerogenes
atgtacgcggttttccaaagtggtggtaaacaacaccgagtaagcgaaggtcagaccgttcgcctggaaaagctggacatcgcaactggcgaagctgttgagttcgctgaagttctgatgatcgcaaacggtgaagaaatcaagatcggcgttcctttcgttgagggcggcgtaatcaaagctgaagttgttgctcacggtcgtggcgagaaagttaaaatcgttaagtttcgtcgtcgtaaacactatcgtaagcaagcaggccaccgtcagtggttcactgatgtgaaaatcactggcatcagcgcctaa

SEQ ID NO: 88655 - DNA, 972 bp, Enterobacter aerogenes
atgaatttagaaaaaatcaatgagttaaccgcgcaggatatggcgggtgtcaatgcggcaatccttgagcagctcaactcagatgttcagcttatcaatcagttaggctactacatcgtcagcggaggcggaaaacgtattcgtccgatgatcgccgtgcttgcagctcgcgcggtcggctatcaggggaatgcgcacgtcaacatcgccgcactgatcgaatttattcataccgcgaccctactgcatgacgacgtcgtcgacgagtccgatatgcgccgcggcaaagcgacggccaacgccgcgtttggtaacgccgccagcgtactggtgggcgactttatctacacccgcgccttccagatgatgactcgtctcggttcgctgaaggtgctggaggtgatgtcggaagccgtaaacgtcattgccgaaggcgaagtcctgcagttgatgaacgtcaacgacccggatatcacggaagagaactatatgcgggtcatctacagtaagaccgcccgtctgtttgaagccgcttcgcagtgttccggtatcctggctggttgtagcgcggaagaagaacaggcgctgcaggattacggccgttacctcggcaccgcgtttcagttgattgacgatctgctggattacagttccgatggcgaacgccttggcaaaaacgtcggtgatgacctgaacgaaggcaaaccaacgctgcctctgctacacgctatgcatcacggtaccccggatcaggcggcgatgattcgcggcgctatcgagcagggtaacgggcgtcatctgcttgacgcggtacttgaaaccatggcggcctgcggttcgctggagtggacgcagaaacgtgcggaagaagaagccgataaagctatcgccgcactgcaggttctgccggatacgccatggcgcgatgccctcatcggccttgcgcatatcgccgttcagcgcgaccactaa

SEQ ID NO: 88656 - DNA, 273 bp, Enterobacter aerogenes
atggataagttcatcgactggcattcagcggatattattgccggccttcgcaaaaaggggacgtccctcgcagctgagtcacgacgtcacggattaagctcttctacgcttgccaacgcgctaacccgtccgtggcctaaaggcgaattgattatcgcaaacgcgctgggaaccgatccgtgggttatctggccatcgcgttaccacgaccccattacccatcagtttatcgacagaacgcagatgatgcgtcagaagagacataagacctaa

SEQ ID NO: 88657 - DNA, 1260 bp, Enterobacter aerogenes
atggataaattccgtgttcaggggccgactcgcctgcagggcgaggtcaccatttccggcgctaaaaacgctgccctgccaatcctctttgccgcgctgttagccgaagagccgattgaaatccagaacgtaccgaagctgaaagatatcgataccaccatgaagctgctgagccagctgggcgcgaaggtcgagcgcaatggttccgtatggatcgatgctggcccggtaaatgttttctgtgctccgtacgatttagtgaaaaccatgcgcgcttccatctgggcgctggggccgctggtggcgcgtttcggccagggccaggtttctctaccgggcggctgcgctatcggcgcgcgtccggtcgacctgcacattaccggcctggaacagctgggtgcggaaatcaaactggaagaaggctatgtgaaggcgtcggttaacgggcgtctgaaaggcgcgcatatcgtgatggataaggtcagcgtaggcgcgaccgtgactatcatgagcgcggcgacgctggctgaaggcacgaccgtgattgaaaacgccgcgcgcgagccggaaatcgtcgataccgctaacttccttaacgcgctgggcgcgaagattacgggtcagggttccgaccgtatcaccattgagggcgttgcgcgtctgggcggcggcgtttatcgcgtgctgccggaccgtatcgaaaccggtaccttcctggtcgctgcggcgatctccggcggtaaaattatgtgccgtcatgcgcagcctgataccctggatgcggtactggctaagctgcgtgaggctggcgcggacattgaagtcggtgaagactggattagcctcgatatgcacggcaaccgtccgaaagcggtcaacgtgcgtaccgcgccgcacccgggtttcccaaccgacatgcaggcgcagttcaccttgctgaacctggtggctgaaggaacgggcgttatcactgaaaccatcttcgagaaccgcttcatgcacattccggaactgatccgtatgggcgcgcacgcggaaatcgaaagtaataccgcgatttgccatggtgtcgcgaagctgtccggcgcacaggtcatggcgaccgacctgcgtgcatctgcaagcctggtgctggcgggttgtattgcggaagggacgaccatcgtcgaccgtatctatcatatcgatcgcggctatgagcgcatcgaagataaactgcaggctctgggcgcgaatatcgaacgcgtcaaaggcgagtaa

SEQ ID NO: 88658 - DNA, 255 bp, Enterobacter aerogenes
atggaaaatcatgaaattcagaccgtgctgatgaacgcactctcccttcaggaagtccacgtctctggcgatggcagccactttcaggttatcgctgtgggtgagatgtttgacggcatgagccgggtaaaaaaacagcaggctatctacgcgccgctgatggaatatattgccgacaatcgcattcatgcgctgtcgatcaaagcgtttaccccgcaagaatgggcacgcgatcgcaaacttaatggcttttaa

SEQ ID NO: 88659 - DNA, 291 bp, Enterobacter aerogenes
atgagcgaacaactgagctggaaccgcgacggtgaacgcctggcgttgcgcggcgaactggatcaggaatttatactgccgctgtggaatgcacgcgcgcaggcgaccgacggcgtatccactatcgacctcagcgacgtttcacgggtcgatagcgccggggtagcgttgctggttcattttgtcgcgctggtacgtcggcagggcaaaacggcgcaagtggtagggaaaagcgaaaacctgcaaacgctggttagtctttacaaccttccggcggacatgatcccgtaa

SEQ ID NO: 88660 - DNA, 636 bp, Enterobacter aerogenes
atgtttaaacgcttactcatggtcgccatgctggtgattgctccactaacagccgcgcatgccgcggatcaaactaacccgtataagttgatggacgaagcggcgcagaagaccttcgatcgtctgaagaacgaacagccgaagatcaaagccaacccgaactatctgcgtgatatcgtcgatcaggaactgctgccttacgtgcaggtgaaatatgccggcgcgctggtgctgggccgttactacaaagaggcgacgcctgcacagcgtgaagcctatttcgccgccttccgcgagtatctgaaacaggcttacggtcaggcgctggcgatgtaccacggccagacttaccaaattgcgcctgagcagccgctgggcagcgcaaccatcgtgccgattcgcgtcaccatcctcgacccgaatggccgtcctccggtacgtctggacttccaatggcgtaaaaatacccagaccggcaactggcaggcttatgacatgatcgccgaaggcgtcagcatgattaccaccaaacaaaacgagtggagcgacctgctgcgcacgaaaggtgttgatggtctgaccgcgcagctgaaagctatttctgcccagcctatcactctggatcagaagaaataa

SEQ ID NO: 88661 - DNA, 552 bp, Enterobacter aerogenes
atgcaaacgaaaaaaaatgagatctgggtaggtgtgttcttactggcggcgctgctggcggcgctgtttgtctgtctgaaggcggcgaacgtcacctcgttgcgtaccgaaccgacttatcgtctttatgcgaccttcgataacatcggcggcctgaaagcgcgttcaccggtgcgtatcggcggtgtggtggtcggtcgcgtcgcggatatcaccctcgatccaaaaacctatctgccgcgcgttgccatcgatatcgacgaaagctacaaccacattccggataccagctcgctggcgattcgtacttctggtttgctcggggagcagtacctggcgctgaacgtcggttttgaagacccggaactgggcaccgcgattcttaaagacggcggtacgattcaggacaccaagtccgccatggtgttggaagatctgataggccagttcctctataacagcaagggcagcgataatcagaattctgacaatgataaggcggcggctgagggtcatactgacgctacgccgcaggccggcatgacgcattaa

SEQ ID NO: 88662 - DNA, 783 bp, Enterobacter aerogenes
atgctattcaatgcgttggcagcgctcggacaccgcggcatcaaaaccaccgcgaccttcgggcgcgccggattaatgctgtttaatgccgtggtgggcaagccggaatttcgcaaacatgctccgctgctggtgcgccagctgtataacgtcggcgtgttatcgatgctgattattatcgtctcggggctgttcatcggtatggtactggggctgcagggctatctggtattaacgacctatagcgcagagaccagcctgggtatgctggtggcgctgtcgctgctgcgcgagctggggccggtggtagccgcactgcttttcgccgggcgagccggttcggcgttaaccgccgagattggcctgatgcgggcgaccgagcagctctccagcatggaaatgatggcggtggatccgctgcgccgggtgatttcgccgcgcttctgggccggggttatctcgcttccgctgttgacgatcattttcgtcgccgtgggcgtctggggcggttcgctggttggcgtcagctggaaaggcatcgacgcggggttcttctggaccgcgatgcaaaatgccgtcgactggcgaatggatctggttaactgcctgattaaaagtctggtttttgccgttacggtaacctggattgcgttattcaatggttatgacgctatccccacttccgctggaattagccgggcaacgacgcgcaccgtggtgcattcgtcgctggcggttctggggctggattttgtgctgactgcgctgatgtttgggaattaa

SEQ ID NO: 88663 - DNA, 813 bp, Enterobacter aerogenes
atgagccaaactctggcgaatttagtcgaggttcgcggtattcgtttctctcggggcgaccgcgtcatcttcgatgatatctcgctatcggtgcctcgcggcaagattaccgccattatggggccatcggggatcggcaagacgaccctgctgcgtttgatcggcggccagatcccgccggacagcggcgagatcctgtttgacggcgaaaacgtgccgcaaatgacgcgctcgcggctgtataccgtgcgtaaacgcatgagcatgctgtttcagtccggcgcgctattcaccgatatgaacgtgtttgataacgtagcttacccgctgcgcgaacatactcagttgccggatgcgctactgcacaccaccgtcatgatgaagctggaggcggttgggctacgcggcgcggcgaaactgatgccttcggaactctccggcgggatggcgcggcgcgcggcgttggcgcgggcgattgcccttgagccggatctgatcatgtttgatgaacctttcgtcggacaggatcccatcaccatgggcgtattggttaaacttatctcagagctgaatagtaccctgggagtaacctgcattgtggtatcgcacgacgtaccggaagtgctgagcattgcggattacgcctatatcgtggcggataagaaaatcgttgcccacggcagcgcgcaatcgctgcgtgaaaatagcgatccgcgcgtgcgccagttcattgatggcatcgctgacggcccggtgccgttccgctatcctgcgggcgattaccaccatgatttattaggcaaagggagctaa

SEQ ID NO: 88664 - DNA, 978 bp, Enterobacter aerogenes
atgctcttagcaacggctctgttaataattggtttactgctggtagtttacagcgccgatcgtctggtatacgccgcttcaatactgtgtcgcatgatggggatcccgccgctcatcatcggcatgacggtcgtgagcatcggtaccagcctgccggagatcatcgtttccaccgccgcctcccttcacgggcaaaccgatctggcgatcggtacggcgttgggatccaatattacgaatattctattaattctcggtcttgccgccctgctccatccatttaccgtgcattctgatatcctgcgccgcgaattgccgctaatgttgctggtcagtttactggcgggatttgtgctctacgatggccagctctcgcgtctggacgggctgtttttactggcgctggccatactgtggctggtgtttaccctaaaaatagcgcgcctggcggaacgccagggcagcgatagcctgacccgggaacagctggcggagctaccgcgcggtggttcgctgcccgtcgccctgctgtggcttggggtggcgatgatcgtcatgccgatggccacccgtatggtggtagataacgccacggtgttggcgaactatttcgccattagtgaactgacggtgggcttaacggtcattgctatcggcaccagcctgccggaactggccaccgctatcgccggcgcacgaaaaggggaagacgatatcgccatcgggaatatcattggcgccaatatccttaatctcgtgctggtgctcgggctgccggcgttaatcgcccctggcgccttccctgctgaagcttttacgcgcgactacagcgtgatgctgctggtcagcgcgatcttcgcgctgctgtgctggcggcgtaaacggcagccggggcgcgtagcgggcgccttgctggtcggcggctttatggtttggttggcggtgctgttctgttcagcgccgtacttcgttgaatga

SEQ ID NO: 88665 - DNA, 1005 bp, Enterobacter aerogenes
atgaattggggtaacatcatgtcgcaaatagatttgccaacggattttgactttcaacaggcaggacgtcaggttctggaaattgaacgtgaaggtctggcccagctcgatcagtatattaatgaagatttcacccgcgcctgtgagacgattttccgctgcggcggtaaggtcgtagtgatgggtatgggcaaatccgggcatatcgggcgcaaaatggcggcgaccttcgccagtaccggcacctcggctttttttgtccatcccggtgaagccgctcacggcgatttggggatggtgacgccgcaggatgtggtcatcgcgttatctaattccggtgaatctaatgaaatcctggcgttgattccggtgcttaaacgccagcaggtgccgcttatctgcgtcaccagccgtccggatagcagcatggcgcgcgccgccgatattcatctgtgtgtgaaagtgccgaaagaggcctgtccgctagggctggcgccgacctccagcaccaccgccgcgctggtgatgggtgacgccctcgccgtggcgctgctcgaagcgcgcggctttaccgccgaagatttcgccctgtcgcaccccggcggcgcactcggtcgtaagctgctgctgcgggtcaatgatattatgcatactggcgacgagatcccccacgtcggcctgcaggctaccctgcgcgacgcgctgctggaaatcacccgcaaaaatctgggcatgacggccatctgcgatgacgagatgaatatcatcggcatcttcaccgatggcgacctgcgccgcgtcttcgataccggcgtcgatatgcgcaacgccagcatcgctgaagtcatgaccccaggcgggatccgcattcgtccaggcatgctggcggtagatgcgctcaacctgatgcagtcccgccatatcacctgcgtgctggttgccgatggcgaccggctgctaggtgtggtacatatgcacgatctgctgcgcgctggcgtagtgtaa

SEQ ID NO: 88666 - DNA, 567 bp, Enterobacter aerogenes
atgaataatgctgatgcccaggtcgacacctgctacgggccggtaagccaggaatttatcgaccgggcggcgaagatccgtttactgatcctcgacgtcgacggcgtgctttccgacggtcttatctatatgggcaacaacggcgaagagctgaaagcgtttaacgtccgcgatggctacgggatccgctgcgcgctgacttccggtattgaagtcgcgattattaccgggcgaaaagctaaactggtagaagatcgctgccagacgttgggcattacgcatctgtatcaaggtcagtccgataagctgttggcgtttcgtgaattattaagcaaactggcggttcgcccggatgaagtcgcttatattggcgacgatctgatcgactggccggtaatggcggaagtcggtttaagcgtcgccgtcgccgatgcgcatccgctgctgctcccgcgggcgaattacgtcacgcgaattagcggcggacgcggcgcggtacgcgaagtctgcgatttgttactattggcgcagggcaagcttgatgaggccaaagggcaatcaatatga

SEQ ID NO: 88667 - DNA, 576 bp, Enterobacter aerogenes
atgagtaaaaccagacgttgggttatcatcttactatcgctggtcgcgttgatcctgatcggcctgaacctggcgagtacggacgacaccgcgaccgtcgcggtcaatcctaacgatccgacgtataaaagcgagcataccgataccgtggtgtatagcccggaaggcgcgctgagctatcgtctgatagccgagcatgtcgaatacttttccgaacaagaagtatcgtggttcaccaacccggtgatgaccacctttgataccaataaggttccgacctggtcaatcagagcggataaagccaagttaaccaacgaccgtatgctgtatctttacggccatgttgaggtcgacgcgttgagccccgactctcaactgcgcaaaattaccaccgataacgcgcaggtaaacctggtgacccaggatgtaacctctgacgatatggtgacgttgtacggaacaacatttaattccagcggcctgaaaatgcgcgggaacctacgcagcaaaaatgccgagctgattgaaaaggttagaacctcttatgaaattcagaacaaacaaactcagccttaa

SEQ ID NO: 88668 - DNA, 546 bp, Enterobacter aerogenes
atgaaattcagaacaaacaaactcagccttaacattgcgctcgcaagcgcgcttctggccgccagcctgccggctctggcaaaaaccggcgataccgatcagccgattcacatcgagtccgatcagcagtcgttggatatgcagggcaacgtcgtgaccttcaccggcaacgtggtcgtcacccaggggaccattaaaatcaatgccgacaaagtcgtggttactcgccctggcggtgaaaaaggcaaagaggtgatcgacggtttcggcaatccggccaccttctatcagatgcaggacaacggcaagccggtgaaaggccgcgcgtcgaaaatgcattatgaactgcagaacgatttcgtggtgctgaccggcaacgcgcatctggaacagctggatagcaatattcagggcgacaaaatcacttatctggtgaaagagcagaaaatgcaggccttcagcaacaaaggcggtcgcgtgactacggtgctggtaccttcgcagttgcaggacaaaagcggcgatcagcagaagaaaggtaagtaa

SEQ ID NO: 88669 - DNA, 726 bp, Enterobacter aerogenes
atggcaacattaactgcaaaaaatctcgccaaagcctacaaaggccgccgcgtggtggaagacgtcagcctgaccgtcaactccggtgaaatcgtcggcctgctgggcccgaacggcgccggtaagaccaccaccttttatatggtggtaggcatcgtgccgcgcgacgccggcaacatcatcattgacgatgaagatatcagcctgctgccgctacatgcccgcgcgcggcgcggcatcggttacctgccgcaggaagcctctattttccgccgcctgagcgtctacgataatctgatggcggtgctacagatccgcgacgatctcagcagcgagcagcgtgaagatcgcgctaaagagctgatggaagagttccacattgaacacctgcgcgatagcctgggccaggcgctctccggcggtgaacgccgccgcgtcgaaatcgcccgcgcgctggcggcgaacccgaaattcatcctgctggatgaaccgttcgccggggttgaccctatctctgttatcgatattaaacgcatcatcgaacacctgcgcgacagcgggctgggcgtactcattactgaccataacgtcagggagacgctggcggtctgtgaacgagcttatatcgtgagccagggccatctcatcgcccacggcaccccgcagcaaatccttgaagacgagcaggttaaacgcgtgtaccttggggaagacttcagactctga

SEQ ID NO: 88670 - DNA, 1434 bp, Enterobacter aerogenes
atgaagcaaggtttgcaattaaggctaagccaacagcttgccatgacgccccaactgcagcaggccatccgcttgttgcagctgtccacgttagaactccagcaagaactccagcaggcgctggagagtaacccgttgcttgagcaaaccgatcttcacgaagaggttgaaaccacagaagccgaggaccgcgagtctctggataccgtcgacgcgctcgaacaaaaagagatgccggacgagctcccgctggacgccagctgggatgaaatctacaccgccggcacgccgtcgggtaatggcgtcgactaccaggacgatgaactgccgatctatcagggtgagaccacccaaagcctgcaggattatctgatgtggcaggtcgagctcacgccattcaccgataccgaccgcgcgatagccacctccatcgtcgatgccgttgacgataccggctacctcactatttccattcaggacattgtcgacagtatcgaagatgatgaaattggtcttgaggaagttgaagcggtactcaagcgcgtacagcgtttcgatccggtcggcgtcgccgccagggatctccgtgactgcctgctgatccagctttcacaatttgccaaagagacgccgtggctggaagaagccaggttaattatcagcgagcatcttgatctcctggccaaccacgatttccgtagcctgatgcgcgtcactcgcttgaaagaagacgttctgaaagaggcggtttgcctgatccagtcgctggatccgcgcccgggtcagtccattcaaaccagcgagccggaatacgtgatcccggatgtgctggtgcgcaaggttaacggccgctgggtcgtcgagctcaattccgacagcattccgcggctgaagattaatcagcaatacgcggcgatgggcaataatgcgcgcaacgacgccgacagccagtttatccgcagcaacctgcaagaagcccgctggctgattaagagccttgagagccgtaacgataccctgctgcgggtcagccgctgcatcgtcgaacaacagcaggccttctttgaacagggtgaagaatttatgaaaccgatggtgctggcggatatcgcccaggccgtcgagatgcatgaatcaaccatttcacgcgttaccacgcaaaaatatctgcacagtccacgcggtatttttgagttgaagtatttcttctccagccacgtcaataccgaaggcggcggtgaagcctcgtctaccgccattcgtgcgctggtgaagaagttaatcgccgcggagaaccccgcgaagccgttgagcgacagcaagctcaccaccatgctctccgatcagggtattatggtggcgcggcgcactgttgctaagtaccgagagtctttatccattccgccgtcaaaccagcgcaaacaactggtctga

SEQ ID NO: 88671 - DNA, 288 bp, Enterobacter aerogenes
atgcagctcaacattacaggacacaacgtcgagatcactcccgccatgcgcgacttcgtcactacgaagttcagcaaactggagcagtttttcgataggatcaaccaggtctatattgtgttaaaagtagagaaggtgacgcaaatcgcggacgccaatttgcatgtcaacggtggcgaaatccatgccagtgcggaagggcaggatatgtatgctgctatcgatggtcttatcgataagctggcaagacagttaacaaaacataaagataaactgaaacaacactaa

SEQ ID NO: 88672 - DNA, 489 bp, Enterobacter aerogenes
atgatgaacaacgattccgctctacaactgagcaatgtccttaaccaggattgtacccgtagccaggttcactgccagagcaagaaacgcgcgctggaaatcatcagcgaactggcggcgaagcagctaggtttaccgccgcaggtggtctttgaagcgatcctgacccgtgaaaaaatgggcagtaccgggatcggcaacggcattgcgatccctcacggcaagcttgaagaggataccctgcgcgccgttggcgtatttgtgcagttggaaacgccgatcgccttcgatgcgatcgacaatcagccggtcgatctgctgtttgcgctactggtgccggccgatcaaaccaaaacccatctgcatacgctctcgctggtcgccaaacgtctggcggacaaaaccatctgccgtcgcctgcgcgctgcggtgagcgatgaagagttgtatgagatcatcaccgaagcaggaagcagcgatgacgcttaa

SEQ ID NO: 88673 - DNA, 855 bp, Enterobacter aerogenes
atggtactgatgatcgtcagcggccgctctggctcggggaaatccgtcgccctgcgagcgctggaagatatgggcttctactgtgtggataacctgccggtagtgctgttgcctgagctggcgcgaacgctggccgaccgcgatatctccgcggccgtcagcattgacgtgcgcaatatgccggaatcaccggaaatctttgaacaagcgatgcagaatctgccggaatccttctccccgcagctgctgttccttgatgccgaccgtaacaccctgatccgccgctacagcgatacccgtcgcttacatccgctctccagcaagaatctgtcgcttgaaagcgcgatcgacgaagagagcgatctgcttgagccgctgcgctcccgtgcggatctgatcgtcgatacttccgaaatgtcggtgcatgaactggccgagatgctgcgtacccgcctgttaggtaaacgcgagcgtgaattgacgatggtctttgaatcattcggcttcaagcacggtatccctatcgatgccgattacgtgtttgacgtccgcttcctgccaaacccgcactgggatccgaagctgcgccccatgaccggcctcgataaaccggttgccgccttcctcgatcgccatacggaagtgcataactttatttaccagacgcgtagctatctcgagctatggttgccgatgctggaaaccaataaccgcagctatctgacggtggccattggttgtaccggcggtaagcatcgctcggtctatattgccgaacagctggctgactacttccgttcgcgcggtaagaacgtgcaatctcgtcaccggacgctggaaaaacgtaaatcatga

SEQ ID NO: 88674 - DNA, 273 bp, Enterobacter aerogenes
atgaccgtcaagcaaaccgttgaaatcaccaacaagctgggcatgcacgcgcgcccggcaatgaagcttttcgagctgatgcagaatttcgatgcggaagtgttgctacgcaacgacgaaggcaccgaagcggaagccaacagcgttatcgccctgctgatgctggattccgccaaaggacgccaaattgaggtggaggccagcggcccgcaggaagtcgaagcgctggcagcggtaattgcgctgttcaacgccgggtttgatgaagactaa

SEQ ID NO: 88675 - DNA, 726 bp, Enterobacter aerogenes
atgagtaagcgtgttgcgccgctggcgatgattaagcgcctgctgttacgtctgctgctggtctgtgtggtgttctggggcggcggtatcgccgtattcagcgtcctgccggtgccgttctcagcggtgatgctggagcgccaggttagcgcctggttctccggtgatttccattatgtcgcccattctgactgggttggcatgggcgagatttccccctggatggggctggcggtgattgccgccgaagatcagaaattccccgatcactggggttttgacgtaccggcaatcgaaaaagcgctggcgcataacgaacggaatgaaaatcgaattcgcggcgcgtcgacgctgtcgcagcagacggcaaaaaacctgtttttatgggatggccgtagctggttgcgcaaggggctggaagtgggcttgaccgtcggcattgaaacggtctggagcaagaagcgcattcttaccgtgtacttgaatattgccgagtttggcgacggtattttcggcgtagaagcggcggcccagcgctattttcataagccggccagccgtttaacccctgcagaggccgcgctgctggcggcggtattaccgaacccgattcggtttcgcgccgatgcgccatcaggttatgttcgcagccgacaggcgtggatcctgcgccagatgcgtcagttaggcggcgaaggctttatgcaggccaataagctgcattaa

SEQ ID NO: 88676 - DNA, 654 bp, Enterobacter aerogenes
atgaagaagattggcgtggtactaagcggctgtggcgtttacgacggcgcagaaatccatgaagcggtcattaccctgttggccattgcgcgtcgcggcgcgcaggcggtttgctttgcgccggataaggcgcaaaccgacgtgatcaaccatctgaccggcgaaacgatggcggaaagccgcaacgtgctgattgaagcggcgcgcctggcgcgcggcgctattcagcctttggccagcgcccgcgcggacgagctggatgcgctgattgtgccaggcggctttggcgcggcgaaaaacctgagtaattttgccgcccagggaagtgaatgcgttgttgatcgcgatctgcaggcgttaacgctggcgatgcacgaagcgggtaagccgctgggctttatgtgtatcgcgccggcgctgttgccgaagattttcccgacgccgctgcggataaccatcggtaccgatccggatactgccgaggtgctggaagagatgggcgcggagcacgtgccgtgcccggttgacgacatcgtggtcgatgaagacaacaaagtggtgaccacgcctgcttatatgctggcgcagaatattgccgaggccgccagcggtattgagaaactggtcgatcgcgtactggttctcgctgaatga

SEQ ID NO: 88677 - DNA, 2337 bp, Enterobacter aerogenes
atgaagcaaattcgtatgctggcgcagtactatgtcgacctgatgatgaagttaggtctggtgcgcttttcaatgctgttggctctggcgctggtggtgctggctatcgtggtgcagatggccgtcacgatggtgctgcatggacaggtggagagtattgatgtcatccgctctatcttcttcgggctgctgattaccccctgggcggtctattttctgtcagtggtggtcgaacagctggaagagtcgcgtcagcgcctctcgcggctggtggaaaagctggaagagatgcgcgagcgcgatcttaagcttaacgtacagctcaaggataatatcgcccagttgaaccaggaaattggcgaacgtgaaaaagcggaagcggagcgcgaaaccacgctggaacagctgaaaatagagatgaaagagcgcgaagagacgcaaattcagctagagcaacaatcctctttcctgcgctctttccttgatgcctcaccggatctggttttctatcgtaacgaagataaagagttctccggctgtaaccgggcgatggaattgttgaccggtaaaagcgaaaagcagttgattcacctcaagccgcaggatgtctatagcgaagaagccgcggtgaaagtgctggagaccgatgagaaagtcttccgccataatgtctcgctgacctacgaacaatggctcgattatcccgatgggcgtaaagcctgctttgagatccgcaaggtcccctactatgaccgcgtgggcaagcgccgtggcctgatgggctttggccgcgatattaccgagcgtaagcgctatcaggacgcgttggagcgcgccagccgggacaagaccacctttatctcaaccatcagccacgagctgcgtacgccgctcaatggcatcgttgggctcagccgcatcctgctggatactgaattgaccaacgagcaggaaaaatatctgaaaactatccatgtttcagcggtgacgctggggaatatcttcaacgatattatcgatatggataagatggagcggcgcaaagttcagcttgataatcaggaggtggattttaccagctttcttgccgatctggagaacctctcaggcctacaggcgcagcagaaaggtttgcgctttgtgatggagccaacccagccgctgccacataaggtgataaccgatggcacgcgtctgcggcagatcctgtggaacctgatcagcaatgcggtgaagtttacccaacagggcaatgtcaccgtgcgcgtccgctatgacgaaggcgatatgctgcacttcgaagtcgaggactccggtatcggtatcccgcaggcggagcaggacaaaattttcgccatgtattatcaggtgaaagacagccacggcggtaaaccagcaaccggtaccggtatcgggctggcggtatcgcgccggctggcgcgcaatatgggcggcgatatcagcgtgaccagccagccggggcagggggcgacgtttaccttgaccgtacacgcgcaggcggtagctgatgaagttgaagatacgctggccgaagacgatatgccgctgccggcgctgaatgtgctgctggtggaagatatcgaactgaacgtgattgtcgcccgttcggtgctggaaaaattgggcaacagcgtggacgtggcgatgactggtaaagccgcgctggagatgttcgaacccggcgaatacgacctggtgctgctggacattcagctaccggacatgaccggcctcgatatctcgcgacagctaaaacaacgctatgccgccgatgagttgccgccgctggtggcgctgaccgccaacgtcctgaaggacaaaaaagagtaccttgatgccggcatggatgatgtactgagcaagccgctgtcggtaccggcgttaaccgcgatcatcaagaaattctgggatgcgccggaagacgatggccatgagccgcctgcggtggatgtggcgaaatcggcatcggtactggataccgacatgctggaacaatatattgagctggtggggccgaagctgattaccgacgggctggcggtgttcgagaagatgatgccgggctacatgtccgtgctggaatcgaatctcaccgcgcgcgaccagaaaggtatcgtcgatgaaggccataaaattaagggcgcggcggggtcgataggcttgcgtcatatccagcaattagggcagcagatccaaacgccagatttacccgcctgggaagacaacgtcggcgagtgggtggaagagatgaaatccgagtggcaaaacgatgttgcggtactgaaggcctggattgcggcggcggataaaaaatga

SEQ ID NO: 88678 - DNA, 969 bp, Enterobacter aerogenes
atggcaggcttggcccctttcttgaggccagtctatcagattatgcagttacaaaaattagtcaacatgtttggtggggatcttacgcgccgctacggcgaaaaggttcataaactgacgctgcatggtggatttagctgcccgaaccgggatggcacaattggccgcggcggctgcacattttgtaatgtcgcctccttcgccgacgaggcccagcagtaccgttcgattgccgatcagctggcgcaccaggcgcagttggttaaccgagcgaaacgctatcttgcttatttccaggcctacaccagcacctttgccgaagtacagttgctgcgttcaatgtatcagcaggcggtgaaccaggcgaatatcgtggggctgtgcgtcggcacccgccccgactgcgttcccgatgcggtgctggacctactcagcgaatatcgggagcagggctatgaaatctggctggagctgggattgcagaccgcgcatgataaaacgctgcatcgtatcaatcgcggccatgactttgcctgctaccagcgcaccacccgactggcgcgcgagcgcggattaaaggtctgcgcgcatcttatcgtcggcctgccgggcgaaacccagcagcagtgcctgcacaccctgcaacgggtggtcgacaccggcgtcgatggcatcaaactgcacccgctgcacatcgtgaccggcagcatcatggcgaaagcctggcaggcgggtcgcctgaacggtattgcgctggatgattatacgatcaccgccggtgagatgattcgccataccccgccggaggtgatttaccatcgcatctcggccagcgcccgccgcccgacgctactggcgccgctgtggtgcgaaaaccgctggaccggtatggtcgagttggacaaataccttaatacccatggcgttcaggggtcggcattggggacgccgtggatccagcctgcctga

SEQ ID NO: 88679 - DNA, 4461 bp, Enterobacter aerogenes
atgttgtacgacaaatcccttgagcgggataactgtggtttcggcctgatcgcccacatagaaggcgaacctagccacaaggtagtgcgcaccgctatacacgcactggcccgaatgcagcaccgcggcgcgatcctggccgatggtaaaaccggcgacggttgcggcctgctgttacaaaaacccgatcgtttcttccggattgtggcggaagagcgcggctggcgcttagccaaaaactacgccgtcgggatgctgttcctgaataaagaccccgagctggcaagcgctgcgcgccgtatcgttgaagaagagctgcaacgcgaaacattgtctatcgttggctggcgcgatgtgccaaccaatgaaggcgtgctcggtgaaatcgccctctcctcgctgcctcgtattgaacaaatttttgttaacgcgccggcaggctggcgtccgcgcgatatggaacgccgtctgttcatcgcgcgccgccgcattgaaaagcgcctgcaggaagacaaagatttctacgtttgtagcctgtcgaacctggttaatatctataaaggtctatgtatgccggcggatttgccgcgcttctacctggacctcgcggacctgcgtctggaatccgccatctgcctgttccaccagcgcttctccaccaataccgtgccgcgctggccgctggcgcagcctttccgctatctggcgcacaatggtgaaatcaataccatcaccggtaaccgccagtgggcccgcgcccgtacctataaattccagactccgctgatccccgatctgcatgacgccgcgccgttcgtcaacgaaaccggctctgattcaagctcgatggataatatgctggaactgctgctggcaggcgggatggatatcgtccgcgcgatgcgcctgctggtaccgccagcctggcagaataacccggacatggatccggaattgcgcgcgttcttcgattttaactccatgcatatggagccgtgggacggcccggcgggcatcgtcatgtccgacggtcgctacgccgcctgtaacctcgaccgtaacggtctgcgtccggcgcgctacgtcatcaccaaagacaaactcatcacctgcgcgtctgaagtcggtatctgggactaccagcctgatgaggtgatggaaaaaggccgcgttgggcctggcgagctgatggtcatcgatacccgcagcgggcgcattctgcactcggcggaaaccgataacgatctgaaaagccgtcatccgtacaaagagtggatggagaaaaacgtccgccgtctggtgccgttcgaagacctgccggaagaagaagtcggcagccgtcagttggatgatgacacgctcgccagctaccagaaacagtttaactacagcgctgaagagctggactccgtcctgcgcgtccttggggaaaacggccaggaagcggtcggttcgatgggcgatgataccccattcgccgtgctctccagccagccgcgtatcatttatgattatttccgccagcagttcgcccaggtgacaaacccgccgatcgatccgctgcgtgaagcgcacgtgatgtcgctggctaccagcatcggccgtgaaatgaacgtcttctgcgaagcggaaggccaggcgcaccgcctgagcttcaaatcgccgatcctgctgtactccgactttaaacagctgaccaccatggaagaggagcattatcgcgccgacaccctggatattacctttgatgccaacgaaaccactctggccgagacggtaaaagcgctgtgcgataaagcggaacagatggtacgtaacggcaccgtactgctggtgctgtccgaccgcaacatcgcgaaagaccgtctgccggtaccggcgccgatggccgttggcgccatccagacgcgcctcgtcgataagagcctgcgctgcgacgctaacatcatcgtcgaaaccgccagcgcccgcgatccgcaccactttgcggtgctgctgggctttggcgcgacggctatctatccatatcttgcctatgaaaccctggcgaagctggtggatagcaaagctatcgataaagaataccgtacggtgatgctgaactaccgtaacggcatcaacaaaggcctgtacaaaatcatgtcgaagatggggatctcgaccatcgcctcctaccgctgctcgaagctgttcgaagcggtcggtctgcatcgcgacgtggccgacctctgcttccagggcgtagtgagccgcatcggcggcgccggtttcgacgacttccagcaggacctgctgaatctgtcgaaacgcgcatggctggcgcgtaaaccgctggctcagggcggtttgctgaaatatgtccacggcggcgaatatcacgcctacaacccggacgtcgttcgcaccctgcagcaggcggttcagagcggcgaataccgtgattatcaggaatacgcgaagctggttaacgaacgcccggcagccacgctgcgcgatctgctggcgctcaacccaggcgatgaagccataagcatcaatgaagtggaatcagcgaaagagctgtttaaacgcttcgataccgcggccatgtcgatcggcgcgctgagcccggaagcgcacgaatcgctggcggaagcgatgaacagcatcggcggcttctccaactccggtgaaggcggcgaagaccctgcgcgctacggcaccaacaaagtctcgcgtattaagcaggtggcttcaggtcggttcggcgttaccccagcctacctggtgaatgccgacgtaatccagattaaagtcgcccagggcgcgaaacccggtgaaggcggacagttgccgggtgacaaagtgacgccttatatcgccaaactgcgttattcggtacctggcgtgacgctgatctccccgccgccgcaccacgatatttactctatcgaagatctggcgcagctgattttcgacctcaagcaggtcaatccgaaggcgatgatttccgtcaaactggtttccgagccgggtgtcggcaccatcgccaccggcgtggcgaaagcctacgcagacctaatcactatcgccggctacgatggcggtaccggggcgagcccactttcatcggtgaaatatgccggctgtccgtgggaacttggcctggtggaaacccagcaggcgctggtcgccaacggcctgcgtcataaaattcgcctgcaggtagacggcggcctgaaaaccggcctcgatatcatcaaagcggcgatccttggcgcggaaagcttcggcttcggcaccggcccgatggtcgcgctgggctgtaaatacctgcgtatctgtcacctgaacaactgcgccaccggcgtggcgacccaggatgacaaactgcgtaagaaccactaccacggcctgccattcaaagtgaccaactactttgaattcatcgcccgcgaaacccgcgagctgatggcgcagctgggcgtgaagcgtctggtggacctgatcggccgcaccgacctgctgaaagaactggaaggctttacggcgaaacagcagaaactggagctcggtaaactgctggaaaccgctgagccgctgccaggcaaggcgctgtactgcaccgagagcaacccgccgttcgataacggcgtgctcaacgcgcagctgctgcagcaggcgaagccgtatgtggataacaaacagagcaaaacgttctggttcgatattcgcaacaccgaccgttccgttggggcgtcgctgtccggttatatcgcccagactcacggcgaccaggggctggccgccgacccgattaccgcccactttagcggtaccgcgggccagagcttcggcgtctggaacgccggcggcgttgagctgcacctgaccggcgacgccaacgactacgtgggtaaaggcatggcgggcggtctgctgtcgattcgtcctccggtcggctccgccttccgtagccatgaagcaagcatcattggcaacacctgtctgtatggcgcgaccggcggtcgtctgtacgcggcaggacgcgcgggcgaacgctttgcggtacgtaactccggcgccatcaccgtggtggaaggcatcggcgacaacggctgtgaatacatgaccggcggcatcgtctgtatcctggggaaaaccggcgtgaacttcggcgcaggtatgaccggcggctttgcttacgtcctggatgaagatggcgacttccgtaaacgcgttaaccccgaactggtggaagttctggacgtggacacgctggctatccatgaggagcacctgcgtggcttaattaccgaacacgtccagcttaccggttcgcagcgcggcgaagagatcctcgccaactggccggccttcgcggcgaagtttgcgctggttaaaccgaagtccagcgatgttaaagcactgttgggtcaccgtagtcgttccgcagctgagctgcgggtgcaggcgcagtaa

SEQ ID NO: 88680 - DNA, 1419 bp, Enterobacter aerogenes
atgagtcagaacgtataccaatttatcgacctgcagcgcgttgatccgccaaagaaaccgctgaagatccgtaaaattgaatttgtagaaatttacgagccgttttcagaaggccaggccaaggcgcaggcagatcgctgcctctcctgcggcaacccgtactgcgaatggaaatgtccggtgcacaactacatccctaactggctgaaactggccaacgaggggcgtatttttgaagcggccgaactgtcgcatcagaccaacaccctgccggaagtctgcggacgtgtctgcccgcaggaccgcctgtgcgaaggttcctgtaccctgaacgatgagttcggcgcggtaaccatcggcaacattgagcgctatatcaatgataaggcgtttgagatgggctggcgtccggacttgtccggcgtgaagcaaaccggtaaaaccgtcgccattatcggcgccggtccggcaggcctggcctgcgcggatgtgctgacccgtaacggcgtaaaggcgatcgttttcgatcgtcatccggaaatcggcggtctgctgaccttcggcatcccggcgtttaagctggaaaaagaggtgatgacccgccgccgtgagatcttcaccggcatggggattgagttccggctcaataccgaagtgggccgtgacgtccaactcgacgatctgctgaaagagtacgatgccgtatttctgggcgtgggcacctaccagtccatgcgcggcggactggaaaacgaagatgccaacggcgtgtatgacgcactgccgttccttatcgccaacaccaaacagatcatgggctttggcgaaacggcgcacgaaccgttcgtcagtatggaaggcaaacgcgtggtggttctcggcggcggcgacaccgcgatggactgcgtgcggacctcggttcgtcagggggcggcgcacgttatctgcgcctatcgtcgtgacgaagaaaacatgccgggttccaaacgcgaagtgaaaaacgcgcgtgaagagggtgtcgaattccagttcaacgtccagccgctgggcgtggaagtgaatgccaacggcaaagtgtgcggcgtgaaaatggcgcgtaccgaaatgggccagccggatgcgaaaggccgccgtcgcgcggaaatcgtcgccggttccgagcacgtggtgccggcagacgcggtggtgatggcgtttggtttccgtccacacagcatggaatggctggcgaaacatagcgtcgagctggattctcagggccgcatcatcgccccggaaggcagcgacaacgccttccagaccagcaacccgaaaatctttgccggcggcgatatcgttcgcggctcagacctggtggtaacggcgattgccgaaggccgtaaagcggcggacgggatcctcaactatcttgaagtctga

SEQ ID NO: 88681 - DNA, 498 bp, Enterobacter aerogenes
atggatgtctcacagctgacgccgcgtcgcccgtacctgctgcgggcgttctatgagtggctgctggataaccagctgactccgcacctggtcgtcgatgtgacgctgccaggcgttctcgtgccgatggagtacgctcgcgacggccaaatcgttctgaatattgcgccgcgtgcggtgggcaatctggaactggcgaatgacgaagtgcgctttaatgctcgcttcggcggcgtaccgcgcaacgtttccgtgccgctggctgcggtactcgctatctatgcccgtgagaacggcgcaggaacgatgtttgaacctgaagcggcctatgacgaagatgtcagcagcctcaacgatgatgacgtcgtgtctgagagcgaaaacgaaacggtgatgtcggtgattgatggcgataagccggataatcacgatgacgatcctgacgacacgccgccgccgccgcgcggtggtcgtccggcgctgcgcgttgtgaagtaa

SEQ ID NO: 88682 - DNA, 639 bp, Enterobacter aerogenes
atggctgtcgctgccaacaaacgttcggtaatgacgctgttttctggtcctactgacatctatagccatcaggtccgcatcgtgctggccgaaaaaggtgtcagttttgagatagagcacgtggagaaggataacccgcctcaggatctgattgacctcaacccgaatcaaagcgtcccgacgctggtggatcgtgagctcactctgtgggaatcccgcatcattatggaatacctggatgagcgtttcccgcatccgccgctaatgccggtttacccggtggcgcgtggtgaaagccgtctgtacatgcaacgtatcgagaaagactggtattcgctgatgaataccatccagaccggtaccgcggcccaggctgatgccgctcgtaagcaactgcgtgaagaactgcaggcgattgcgccggtctttactcagaagccttacttcctgagcgacgaattcagcctggtcgattgctacctggctccgctgctgtggcgtttgccggttctcggcgtagaactggtgggtgctggcgcgaaagagcttaagggctatatgactcgcgtcttcgaacgtgattctttcctcgcttctttaactgaagccgagcgtgaaatgcgcctcggccggggctaa

SEQ ID NO: 88683 - DNA, 393 bp, Enterobacter aerogenes
atggctgaaaatcaatactacggcactggtcgccgcaaaagttccgcagctcgcgttttcatcaaaccgggcaacggcaaaatcgtaatcaaccagcgttcgctggaacagtacttcggtcgtgaaactgcccgcatggtagttcgtcagccgctggaactggtcgacatggttgagaaactggatctgtacatcactgttaaaggtggtggtatctctggtcaggctggtgcgatccgtcacggtatcacccgcgctctgatggagtacgacgagtccctgcgttctgaactgcgtaaagctggcttcgttactcgtgacgctcgtcaggttgaacgtaagaaagtcggtctgcgtaaagcacgtcgtcgtccgcagttctccaaacgttaa

SEQ ID NO: 88684 - DNA, 429 bp, Enterobacter aerogenes
atgaaaacttttacagctaaaccagaaaccgtaaaacgcgactggtatgttgttgacgcgaccggtaaaactctgggccgtctggctactgaactggctcgtcgcctgcgcggtaagcacaaagcggaatacactccgcacgttgatactggtgattacatcatcgttctgaacgcagaaaaagttgctgtaaccggcaacaagcgcgaagacaaaatgtactaccaccacaccggccacatcggtggtatcaaagaagcgacctttgaagagatgattgcccgccgtcctgagcgtgtgattgaaatcgcggttaaaggcatgctgccaaaaggcccgctgggtcgtgctatgtaccgtaaactgaaagtttacgctggtaacgagcacaaccacgcggcacagcaaccgcaagttcttgacatctaa

SEQ ID NO: 88685 - DNA, 1131 bp, Enterobacter aerogenes
atgcaaagcctgtccccaacatcgcgttaccttttagctctcaaagagggcagccatcaaccagacgacgtgcaacaagaagcggtcagccgcctcgataccatctatcgtgaactgcaggaaaaaccagccgccgcagcgcctgcgggcggcgggctgcgggcgaaattcagcaaactgctcggcaaacgcgaaccggcggcggaagcgaccgccgtacgcggcctgtatatgtggggcggcgttgggcgcggcaaaacctggctgatggatatgttttatcaaagcctgccgggcgagcgtaaacagcgcctgcatttccatcgctttatgctgcgcgtacacgaagagttaactaccttgcaggggcatagcgacccgctggagatcgttgccgatcgctttaaagcgcaaaccgatgtgttgtgctttgacgagttttttgtctccgacatcaccgatgccatgttgctcggcggcttaatgaaagcgctgttctcgcgtgggattacgctggttgctacctcaaacatcccgccggacgagctctaccgcaatggtctgcagcgcgcgcgtttcctgccggcgatagaagccatcaaacagcattgcgacattatgaacgtcgatgcggggattgattaccgcctgcgcacgttaacccaggcgcatctgtggctgtcgccgctcaatgtcgagaccagccagcaaatggataaactctggctggcgctggcgggagccaaacgcgagcagatgccgacgctggaaattaaccaccggccgctgccgacgttaggcgtggaaaaccagactttggcggcgtcgttcgacacgctgtgcgtggatgcgcgcagccagcatgattacatcgcgctgtcacgcctgttccataccgtgatgttgttcgatgtgccggtgatgacgacgcatcttgagagcgaagcgcggcgctttatcgcgctggtggatgaattctacgaacgtcacgtaaaactggtggttagcgcggcggtgccgctgtatgagatctatcagggcgaacgcttgaagtttgagttccagcgctgtttatcgcgcctgcaggaaatgcaaagcgaagagtatctgaaacaaccgcacatgccctga

SEQ ID NO: 88686 - DNA, 399 bp, Enterobacter aerogenes
atgacctgggaatacgcgctaattggattagtcgtcggtatcatcatcggtgccgtcgccatgcgttttggtaaccgcaaattgcgtcagcaacaagcgctgcagttcgaactggaaaagaataaagcagagcttgaagagtatcgcgaagagctggtcagccattttgcgcgcagcgcagaactgctggacaacatggcggatgactaccgtcagctgtatcagcacatggcaaaaagctccagcagcctgctgccggacgcgatggcggacgccaatccgttccgcaaccgcctggcggagtccgaagccagcaacgatcaggcgccggtacagatgccgcgcgattattctgaaggcgcatccggcctactgcgcggtggcgcgaaacgcgactga

SEQ ID NO: 88687 - DNA, 1368 bp, Enterobacter aerogenes
atgaagaaacagactttgctgttgagtgcgttagcgttaagcattggattatcgttgtcggtcctgcctccggcggcggcatcactgccgacccaggttcctggccagggcgcgctaccaagcctcgcgccgatgctggaaaaagtattgcctgcggtggtcagcgtgcaggtagaaggcaccgcctcgccggtgcagaatatgccggaagagctgaaaaaatacttcggcgacaacgcgccgcaagagcaggcgcagccgtttgaaggcctcggttcaggggtgattatcgacgccgccaaaggctacgtgctgaccaacaaccacgtaataagccaggcgcagaaaatcagcattcagttgaacgatggccgcgagttcgatgccaaactggtcggcagcgacgaacagagcgatattgccctgctgcaggttttaaaacccagcaatttaacgcaaatcgccatcgcggattccgacaagctgcgcgtcggcgatttcgccgttgccgttggcaaccccttcggcctcgggcaaaccgctacttccggcatcatctccgcgctgggtcgtagcggccttaatctcgaagggctggaaaactttattcagaccgatgcctcaattaaccgcggcaactccggcggcgcgctgctgaatctcaacggcgaacttatcggcatcaataccgccattctggcgccgggcggcggcagcatcggtatcggcttcgccatcccgagcaacatggcgaagaccctcgccgatcagcttattcaatacggcgaaatcaaacgcggcctgctgggcattaaaggcatggaaatgagcgcggatatcgccaaagcgatgaatatcaacgctcagcgtggcgcctttgtaagcgaagtcctggccaattcaggctccgcaaaagctgggattaaatccggtgatgttatcgtcagcatgaacggcaagccgctaagcagcttcgccgagctgcgctcgcgtatcgccactactgcccctggcacaaaagtaaaactggggctactgcgcgacggcaaaccgttggacgtcgaggtcacgctggataagagcacctcctccaccgccagcgccgagctgattatcccggccctgcagggagcggcgctaagcgatggtcagttaaaagacggcactaagggcgtgagcatcgacaacgtcgataaaggcagcgcggcggctcaggttggcctgcataaagacgatctcattatcggcctcaaccgccagcgtgtgcgttccatcgccgagctacgtaaagtgctggaaaccaaaccggccgtcatcgcgctgaatgtgctgcgcggtaacgaaagcatttatctgctgctacgctga

SEQ ID NO: 88688 - DNA, 1101 bp, Enterobacter aerogenes
atgctatgctgcgcctgcccattaattaacgatattcgcatcatgccaggaaagcttttacgttcagtccttatcggtttaatcgtcggcggcatcctgctggcggcgatgccttcgctgcgccagtggcagctctcgtcggcgacgccgagcgataccgctgacgaatcgcccgccagctataatgctgcggtaagacgcgccgcgccggcggtggtcaacgtctataaccgcgcgctgaacagcaccagccataaccaactgacgctcggctccggcgttatcatggaccaacgcggatatatcctcaccaacaagcacgtcatcaacgatgccgatcagataatcatcgccttgcaggatggacgggtatttgaagccctgttggtcggttccgataccctgactgacctggcggtgctcaaaataaacgccagcggcggcctgccagttatcccgattaacccgaaacgcgttccacatatcggcgatgtggtactggcgataggcaacccgtataaccttgggcaaaccatcacccagggcatcatcagcgcgaccggccgtatcggcctgaaccctaccgggcggcagaatttcctgcaaaccgatgcttctatcaaccacggtaactccggcggcgcgctggttaactcgctgggtgaactgatgggtattaacaccctgtcgtttgataagagcaatgacggcgaaacgccggaagggatcggctttgccatcccgttccagctggcgaccaaaatcatggataaactgatccgcgacggccgggtgatccgcggttacatcgggatcagcggccgcgagatcgcgccgatgcatgcgcagagcggcggcatggatcagatccaggggatcgtcgttaatgacgtcgcacctgacggcccagcggcgcaggccgggatccgcgccaatgatgtgatcatctcggtgaacgataaaccagcggtttcggcgctggaaaccatggaccaggtcgcagaaattcgcccgggttcagaaatcccggtggtcatcatgcgtgatgataagaaaatcaccctgcacgtggcggtacaggaatatccggcgacaaattaa

SEQ ID NO: 88689 - DNA, 186 bp, Enterobacter aerogenes
atgaatgaaacggtagcattacgtcctggcagcaggtcatcggcaaaagaggaagtcattgatgacactctggcgtcgctggaagtgcttgaacaactgcacccggctttgaatctgctggcgcatccgccagtcgtccgtggcagccatgatttctttgtctgttgttatgacgccggtgtatag

SEQ ID NO: 88690 - DNA, 939 bp, Enterobacter aerogenes
atgaaagttgcagtcctcggcgccgctggtggaatcggccaggcgcttgccctactacttaagacccaactgccttcaggttcagagctctcgttgtacgacatcgctccggttacgccgggcgtggcggtagatctaagtcatattcccacagatgtaaaaatcaaaggtttctccggtgaagatgccaccccggcgctggaaggcgctgatgtggtgctgatttccgccggcgtcgcgcgtaagcccggcatggatcgttccgacttatttaatgttaatgccggtatcgttaaaaacctggtgcagcagatcgcaaaaacctgtccgcaggcctgcatcggtattatcaccaacccggtaaataccaccgtcgctatcgccgccgaagtgctgaaaaaagccggtgtgtacgataaaaacaaactgtttggcgttaccaccctcgatatcattcgttctaatacttttgtcgccgagctgaaaggcaagtcggcaacagaggttgaagttccggtcattggcggccactctggcgtcactattctgcctttactgtcgcagatccctggcgtcagctttagtgagcaggaagtcgcggatctcaccaaacgtattcaaaacgccgggacggaagtcgtggaagcgaaagcgggcggcggatcggcgacgctgtcgatgggccaggccgctgcgcgtttcgggctctcactggtgcgtgcaatgcagggtgaaaaaggcgtggttgaatgtgcctatgtcgaaggtgacggccagtatgcccgtttcttctcgcagccgctgctgctgggcaaaaatggcgtggaagagcgccagtccatcggtaaactcagcgcttttgaacagcaggcgctggaaggcatgctggatacgctgaagaaagatatcgccctcggcgaagatttcgtgaataagtaa

SEQ ID NO: 88691 - DNA, 471 bp, Enterobacter aerogenes
atgcgtagttcggcaaaacaagaagaactggttaaagcgtttaaatcgctgcttaaagaagaaaaattcagctcgcaaggcgaaatcgttcaggcgctgcaggaagaaggtttcgagaacatcaaccaatcgaaagtttcccgcatgctgacaaagtttggcgccgttcgcacgcgtaacgccaaaatggaaatggtctactgtttgcctgccgaactcggcgtgccgacgacctccagcccgctgaaaaatctggtgctggacatcgattataacgatgcggtggtggtgattcacaccagccccggcgcggcgcagctaatcgcacgcctgctggattccttaggcaaagccgaaggtattctgggtagtatcgcgggtgatgacactatctttaccacccctgcccgcggtttttccgttaaagatctctacgacgcgattctggtcctgttcgaacaggaactctaa

SEQ ID NO: 88692 - DNA, 264 bp, Enterobacter aerogenes
atgaaaatcaaaaccactgtagccgcactcagcatgctatccgtactgtcctttggcgctttcgccgctgattcaatcaacagcactcaagcggaaagccgccagtcactgggcaccgtatctatcggcgcggtaggttcttccccgatggatatgcatgaaatgctgaacaaaaaagcacaagaagaaggtgcttcttcttatcgcattatcgaagctcgcaccggcgaccattggcacgccactgctgaactttataaataa

SEQ ID NO: 88693 - DNA, 267 bp, Enterobacter aerogenes
atgaaaagcgcaattatcatcgcatccctgggtctggcatctgttctctctttcggcgcaagcgcagccgtacagcaagtgaatgccgatcaagcacaaaacctgcaaccaatgggcactatctctgtatcgcaagtaggtagcgcgccaatggatatgcgccaggaactcgcggctaaagccgagaaagaaggtgccagcagctaccgcattattgaagctcgtaccggcgacagctggcacgcgactgctgagttgtacaaataa

SEQ ID NO: 88694 - DNA, 276 bp, Enterobacter aerogenes
atgactatttatacctttgattttgatgaaatagctgagcaacaggatttctatcgtgagttttcccgcgccttcgcgctaccggataagcaggtggataaccttgacgcgctgtggagcgcggtgacgggagggcgcttaccgttcccgctggagattgaatttgtccatctggatgaaaaacagcgtcgtcgctttggcgcgttaattttgctgttcgatgaagcggaagaggagctggaaggacaactacgtttcaatgcccgttgggcataa

SEQ ID NO: 88695 - DNA, 1968 bp, Enterobacter aerogenes
atggggacctataccattgctccccggcatctccgctttgccattaagcttgcatgcgcggtggtgctggcgctgtttgtcggctttcattttcagcttgagacgccgcgctgggccgtactgaccgcggctatcgtgaccgccggtccggcatttgccgccggcggtgaaccctattccggggcgattcgttaccgtggaatgttgcgtattgccgggacgtttatcggctgtattgccgcgctggcgatcattatcctcatgatccgcgcgccgctgttgatgatgctggtctgctgtctctgggccggtttctgcacctggatctcctcgctggtgaaggtggaaaactcctacgcctgggggctggcgggttatacggcgctgattatcatcatcaccattcataccgacccgatgctggcgccgcagtttgcggttgagcgctgtagcgaaatcgtcatcgggatcgtcagcgccatcgttgctgatctgctattttccccgcgctccatcaaaaaagagatcgacctcgaactggataacctgctattggatcagtatcgcctgatgcagctttgtgtcgcccatggcgatagcgaggtggtggacaaagcctggggagcgctggtgcgccgtactgccgcgctggaaggaatgcgcggcaatctgatcatggaatcttcgcgctggtcgaaggtcaaccagcggctaaaggcgatcaacacgctatcgctgacgctgattactcaggcctgcgaaacctatctgatccagaactcacgcccggagatggtgactgacgactaccgcgagctgttcgctgagccagtggaaacggtacaggatgtgcatcaacagcttaagcgtatgcgccgcttcctgacatggaaaggtgaacacaatacgccggtcactatttatagctgggtcggcgcggcgacgcgttacctactgctcaagcgcggcgtggttggcaacaccaaaatcagccgtattgaagatgaagttctacgcggcgagacggtggtgaaggttgagtccgccgaacgtcaccacgcgatggttaacttctggcgaacctccatttcctgtattctcggcaccctgttctggctatggaccggctggacatccggtagcggggcgatggtcatgattgccgtggtgaccgcgctggcgatgcgtctgcctaacccgcggatggtggccttagacttcctctatggcacccttgccgctttaccgctcggcgcgctgtttttccttgtcgtcatgcctgcgacgcaacagagcatgctgctattgtgtatcagccttgccgcgatggcgttctttatcggcattgaggtacaaaagcggcggttgggatcgctgggggctttagcgagcaccatcaacattttggtgctggataacccgatgcagttccagtttagccagttcctcgatagcgccctggggcagattgtcggctgtttcctcgcgctgatggtgattctgttagtgcgtgataactctcaggcacgcaccggacgggtgttattgaaccagttcgtctcggcggcggtctcttcgctcactactaacagcgcaaggcgaaaagagaaccatttgccggcgctgtatcaacagctgtttttactgctgaacaagtttcccggcgatatcgcccgctttcggttagcgttgacgctgattatcgcgcaccagcgtctacgcgatgccccggtaccggtaaacgaggatctgtcggccttccaccgccagctgcggcgaaccgccgatcacgttatctccgccggcagcgacgataagcgccgccgttactttacccgtctgctggaagagcttgatgtttatcaggaaaaactccttcactggcaggcttcgccccaggtcactgaaccggtgcgacggctggtggatatgctgaaaaaatatcagcacgtgctcaccaatagctaa

SEQ ID NO: 88696 - DNA, 933 bp, Enterobacter aerogenes
gtgaaaacactaacaagaaatatcctgcgtactgccatcactgtgatactggttattctggcgtttatcgctatttttcgcgcatgggtgtactacaccgcgtcgccgtggacgcgcgatgcgcgctttagcgctgatatcgtcgccatcgccccggatgtgtctgggctcatttcacaggtgaatgtcaaggataaccaactggttaagaaagaccaggtattgttcgttattgaccaacctcgttaccaaaaagcgctagcggaggcgcaagccgatgtctcctattaccagacgctggctcaggaaaaacgcgttgaagccgggcgccgtaacaagctcggcgtgcaggcgatgtcgcgcgaagagattgaccaggccaacaacgtgctgcaaaccgtagagcatcagctggcaaaagcggtggccagccgcgatttagccaaactggatctcgaacgcacggtgattcgtgcgccggccgacggctgggtgaccaacctgaacgtctacgccggcgaattcatcacccgcggttcgaccgcggtcgctttggtgaaacaaaataccttctacgtgatggcatacctggaagagactaagctggaaggcgtgcgtccgggctatcgcgccgaaatcactccgctcggcagtagtaaggtgataaaaggtaccgttgacagcgttgccgcgggcgtgactaacgccagcagcagcagcgatacaaaagggatggcctctgttgactccaaccttgagtgggtgcgtctggcgcagcgcgtgccggtacgtattcgtcttgaccagcagcagggcaacctctggccgtcgggcaccaccgcaaccgtcgtcattaccggtaaagaagatcgcgacgctagccaggccaacttcttccagaaagtcgccatgcgcttacgtgagtttggttaa

SEQ ID NO: 88697 - DNA, 204 bp, Enterobacter aerogenes
atgagtctgtttcctgtcatagtgattttcggcttatcgtttccgccgatcttctttgagttgctattgtcgctagccatcttctggctggtgcaccgtttgctggttccgaccggtatttatgattttgtctggcaccctgcactgtttaatactgcgctgtattgctgtctgttttatctgatatcgcgcttgttcgtttga

SEQ ID NO: 88698 - DNA, 930 bp, Enterobacter aerogenes
atggaacgactaaaacgcatgtcggtgttcgccaaagtggttgagctgggctctttcaccgccgccgcacgccagctccagatgagcgtttcatctatcagccagaccgttgctaaactggaagacgagctacaggtaaagctgctcaaccgcagcacccgcagcctgggcttaacagaagcgggtaaaatttattaccagggctgccgaagaatgctctttgaagcgcaggacgtccatgaacagctgtatgccttcaacaatactcccatcggcacgctgcgcatcggtagctcttcaactatggcacagaatgtgctggcgcgcataaccgccgacatgctcaaagaatatccgggtttatcgattaatctggtgaccggcatccctgcgccagacctgattgccgacggcctcgacgtggtgatacgcgtcggcgcattgcaggattccagcctcttctcacggcggctgggctcgatgccgatggtgctctgcgcggcgaaaagctatcttcagcacgcgggatgcccggaaaaaccggcggatctcgccagccactcgtggctggaatatagcgtacggccagataatgagttcgaaattatcgccccggaggggatctcaacacgcctgatcccacaagggcgtttcgtcactaacgatccgatgacgctgatccgctggctgactgccggcgttggcgtggcctacgttccactgatgtgggcgatcgacgagatcaatcgcggtgaactggagatcctgctgccgagctatcaatcggatccgcggccggtctatgcgctgtataccgaaaaagacaaactgccgctgaaggtgcaggtatgtattaactatctgacggattattttgtcgaggtggcgaagatctatcagggaatgcacgggcgcgggatgacccgttaa

SEQ ID NO: 88699 - DNA, 1446 bp, Enterobacter aerogenes
atgagtttgaacctggtaagtgaacaattactgtcggcaaatggcctgaaccatcaggacctgtttgccattcttggccaactggctgagcgccgtctcgattacggcgatctttattttcagtcgagctatcacgaatcctgggttctggaagacagcatcattaaagatgggtcgtacaatattgaccagggcgtaggcgtccgggcggtaagcggcgagaaaaccggttttgcctatgcggaccaaatcagcaaactggcgcttgaacagagtgcccaggcggcgcgtactatcgtccgcgaccacggcgacggcaaagtgcagacgctcggcgcggtggaatacagctctctctataccagcgtcgatccgctgcagagcatgagccgcgaagagaaactggatatcctgcgccgcgttgataaggtggcccgtgctgccgataagcgcgtgcaggaagtttccgccagcctgagcggcgtctacgagcttatcctggtggcggcaacggacgggacgctggccgctgatgtccgtccgctggttcgcctctccgtgagcgtgctggtggaggaagacggcaaacgcgagcgcggcgccagcggtggcggcgggcgatttggctatgattatttccttgcaccgctggatggcgacgtacgggcggatgtctgggcgcgtgaagcggtacgtatggcattggtcaatctgtccgcggttgccgcgccagccggaatgctgccggtggttcttggcgcgggctggccaggcgtgctgctgcatgaagccgtcggccacggcctggaaggtgactttaaccgtcgcggcacctcggtcttcagcggtcacatgggcgaattagtcgcctctgaactgtgcaccgtcgtggatgacggcaccatggccgatcgccgtggttcggtcgcgattgatgacgaaggtacgccgggtcaatacaatgtgcttatcgaaaacggcgtcctgaaaggttatatgcaggataagctcaacgcgcgtctgatgggcgttgcgccgaccggtaatggtcgccgtgaatcctatgcgcatctgccgatgccgcggatgaccaacacctatatgctggccggtaagtcgacgccgcaggagattatcgaatcggtcgattacggtatctatgcgccgaactttggcggcggccaggtggatattacctccggtaaatttgtcttctcgacctcggaagcttatctgattgaaaaaggcaaagtgaccaaggcagtcaagggcgcgacgctaatcggttccggtatcgaagcgatgcagcagatttctatggtcggtaacgacctgaagctggatagcggcgttggcgtgtgcggtaaagaagggcagagcgtgccggtcggcgtcggccagccgacgctgaaagtcgacaaccttaccgttggcggcaccgcctga

SEQ ID NO: 88700 - DNA, 3798 bp, Enterobacter aerogenes
ttgaggcgatggcccgggatattactgctcaccgtggcaaccgtggtggtgattgttgcgctactggtgagtggcctgcgtctggcattgccgcagctaaataactggcgtccccaactgctggagaaaattaccgcggtatccggggtcgcggttgatgcctcgcagatcaacgccaactgggaaaacttcggcccgacgctggacgttcgcgatattaaagccaccttgaaagacggtggcgaaatgacgatcaaacgggttacccttgccctcgacgtctggcaaagccttttacatatgcgctggcagttccgcgacctgaccttctggcagctgcaaattcataccaatacgcccatccagactaacgacgacggcgcaagtctgaagaccgaccgcatcagcgatctgttcctgcgccagtttgaccactttattctccgtgatagccatttgagcttcctgacgatttccggtcagcgtgctgaactggcgatcccacagctgacctggcttaacggtaaaaatcgccaccgcgccgaggggcagctgagcctttcgagcctcaccggccagcacggcgtcatgcaggtgcggatggatttacgtgatgagaacggcctgctcaacaaggggcgcctctggttacaggctgacgacatcgacgttaaaccctggctcgggcgctggatgcaggacaacatcgccctgcagagcgcgcgctttagtctcgaaggctggatgaccatcgataaaggcgatgtcgccagcggcgatgtgtggctgaaaaaaggcggcgccagctggcagggcgataagcatctgcatcagctgtcggtggataacctgacggggcatatcacgcgtgaaaatcaaagctgggcatttcacatccccgatacgcggatctcgatagacggcaaagcctggccgcgcggcgagctggcgatggcgtggattccggcgcaggaagtgggtggcaataacaatcagcgcagcgatgagctacgcatccgcgccagcaatctcgagcttggcgggctaactggtctgcaaccgatggccgataagctggcgccgagctttggcgaagtgtggcgaaccacccagccgagcggcaaaatcaaccttttggcattggatatcccgctgcaggcaacggaaaagacccgtttccaggccgactggagcgatctggcgtggaagcagtggaagctgttgccgggagccgagcacttctccggcagcctgagcggcagcgtggaaaacggcgaactgcgcgcgcatatgacccaggcaaaaatgccttatgaaacggtctttcgcgcaccgctggagatagcccagggcgatgcgactctaagctgggagaagaacagcaagggctttatgctggatggccgcgatatcgacgtgcaggcgaccggcgttcgcgcgcgcggcggcttccgctatctgcagccagcaggcgatgagccgtggttaggcatcctggcgggtatcagtaccaatgatggcggccaggcgtggcgctatttcccggaaaatctgatgggcaaagcgctggtggattacctgagcggcgcaattaagggcgggcaggccagcaacgccaccctggtttacggcggcaacccacatcagttcccctatgagcataacgaaggccaattccaggtctcggtaccgctgaagaacgcgactttcgccttccagccggactggccggcgctgaccggactggatatcaaccttaacttcgtcaataacggcctgtggatgaaggcggataaagcgatgctgggcaatgttactgccagcaaccttgacgcggtgatccccgactattcccatgaaaaactgtttatcgatgccgatgttaacggccctggtaaagaggtcggcccttatttcaaacagaccccgctgaaggatacgctcggctcggcgctggatgaactgcagcttgatggtaatgtgagcgctcgcttacatcttgctatcccgcttgatggcgagatgaccaccgccaaaggcgatgtgcggctgaaaaataacgatctgtttatcaagccgattgacgcgacgctgaagaatctcaatggtcagttcagctttgaaaacggagatttaaaaagcgggccgctaagcgcgacctggtttaatcaaccgttgaacctcaatttcaccaccactgaaggggcgaaagccttcctcgttgacgtcggcatgaacgctaactggcagccgacgcgtaccggcctgctgccgaaagcggtcaatgacgaactcagcggcagcgtcccctgggatggcaaagtggccattgagttaccgtatcgtggtagcgcgagctacaaagtcgatatcaacggcgatctgaaaaatgtgagtagtcacttacctgcgccggtgaataaatcggcgggtgagccgctgccagtgaaaatcaacgtgaccggcggcttaagcagcttcgatttgaccggcaacatcggcagcaagaaccacgtcaatagccgctggttactgaataacaagctgacgctcgatcgggcgattctgacctccgacagcaaagcgattccgtcgctgcctgaagcatcaggcgtcgagctcaacatgccggcgatggatggcgcgcaatggctggcgttgttccagcagggcgccgtcaacgaagtgagcagtaatatggccttcccggagcgcgtgacgcttcgtacgccgtcgctggccttcgccgggcagaactggaataacgtcagtctggtctctcagcctgacggtagcggctcgaaggtggaggcgcaggggcgtgaaatcaacgccacgttgacgatgcataagaatgccccctggctggcagctattcgctacctctattacaacccttccagcgataacagcggcacggcgaaaaaagagagcggcccgctggctgatacccgtctggatttccgcggctggccggatttacagctgcgctgtaaagagtgctggctgtgggggcaaaaatatggacgaatcgacggtgacttcgatatcaagggcgatacgctcaccctcagtaatggcctggtggataccggctttggccgactcactaccgatggcgtctgggtaaatgcgccgggcggcgtacgtacctcgctgaaaggcaagcttcatggcaataaaacggacgacttcgtcaacttcttcggtgtctcgacgccggtgaaagggtcgtcgtttgatgtcgattacgatctgcactggcgcgcgccgccatggcagcctgatgtcgcttcgctgaacgggatcctcaaaagccgcctcggcaaaggcgagtttactgacctgagcaccggtcatgccggtcagttgttaaggctattgagcgttgacgcgctgctgcgtaagctacgcttcgatttcagcgacaccttccaggaagggttctggtttgattcgattcgcagtacggcgtggattaaagacggcgtgctgaatacggatgatacgctggtggatgggctcgaagccgacatcgcgatgaaaggttcggtcgatctggtgcgtcgtcgtttagatttacaagcggtggtggcgccggaaatatcggccaccgtcggcgtagcggcggcattcgccgtcaacccgatcgtcggcgcggcggtgtttgccgccagcaaggtgcttgggccgctgtggaacaaagtgtcgattctgcgctatcgcattacgggtccaatcgatcagccagaaatcaatgaagtgctgcgccaggcgcgcagcaacaaaaagcaatga

SEQ ID NO: 88701 - DNA, 1470 bp, Enterobacter aerogenes
atgacggctgaattattagttaacgtaacgccatccgagacgcgcgtcgcgtatatcgatggcgggatcctgcaggaaattcatattgagagagaagcgcggcgcggaatcgtaggcaatatctacaaaggtcgtgtcagtcgtgtgttgcctggaatgcaggcggcttttgtagatattggcctggataaggccgcctttctgcatgcttccgatatcatgccgcacaccgagtgcgtggcgggtgaagagcagaagcagtttaccgttcgcgatatttccgagctggtgcgtcagggccaggacctgatggtgcaggtggtgaaagacccgctgggtaccaaaggcgcgcgtctgaccaccgacattaccataccttcccgctatctggtctttatgccgggcgcttcgcacgtcggcgtatcgcagcgtattgaaagcgaggccgagcgcgaacgtctgaaaagcgtggttaccgaatattgcgacgagcagggcgggtttattatccgcaccgcggcggaaggcgtacatgagcaagagatggcggcggatgcggcctaccttaagcgcgtctggaccaaagtcatggagcgcaaaaagcgcaaccagacccgctatcagatgtacggcgagctggcgctggcccagcgcgtgctgcgcgatttcgccgacgctcagcttgaccgcattcgcgtggattcgcgcctgacctacgaggcgctgctggagttcaccgcggaatacattccggaaatgaccagcaagctggaacattacagcggccgccagccgattttcgatctctttgacgttgagaacgaaatccagcgcgcgctggagcgtaaagtcgagctgaagtcaggcggctatctgatcatcgatcagaccgaagcgatgaccaccatcgatatcaataccggggcgtttgttggccaccgtaatctcgacgacaccatcttcaataccaatattgaagccacgcaggctatcgcgcgccagctgcgtctgcgtaacctgggcggcattatcatcattgattttatcgatatgaataatgaagatcatcgtcgtcgggtactgcattccctggagcaggcgctgagtaaagaccgggtgaaaaccagcattaacggcttctcgcagctggggctggtcgagatgacccgtaaacgcacccgcgaaagcgtggaacatgtgctgtgtaacgagtgtcctacctgtcatgggcgcggcacggtaaagtcggtcgaaacggtctgctatgagatcatgcgcgaaatagttcgtgtgcatcatgcgtatgactcagaccgcttcctggtctatgcttcacctgccgtcgcggaagctctgaaaggggaagagtcccacgcgctggcggaagtcgaaatctttgtcggcaagcaggtcaaagtgcaaattgagccgctctataatcaagagcagttcgatgtggtaatgatgtaa

SEQ ID NO: 88702 - DNA, 582 bp, Enterobacter aerogenes
atgacaactctgtatctggcttctggttccccgcgtcggcaggaactgttaactcagcttggtctctctttcgaacgtctggttccgggtattgaggaacgacgcggcccgcaggagagcgctgcgcattacgttgcgcgtctggcgcgcgaaaaagcgctggctggcgtggcgatggcgccgcgcgatctgccggtgttgggcgcggatacgattgtcattcttaacggcgaagtgctggaaaagccgcgcgacgccgggcacgccgcagaaatgcttcgcatgctttccggaaaaacccaccaggtgatgaccgcggtggcgttggcggataagcagcaaacgctggattgcctggtggtgacggaagtgaccttccgtctgctctccgagcaggatatcgctacctacgtagccagtggcgaacctttagataaagcaggcgcatacggtattcaagggttgggtggttgttttgtcaggaagataaatggcagctatcacgccgtagtcggcttaccgctggtggaaacgtatgagttgctgagtaactttaactcactgcgtgaagaaaagggataa

SEQ ID NO: 88703 - DNA, 489 bp, Enterobacter aerogenes
gtggcaagttatcgtagccagggacgctgggttatctggctctcgtttcttattgcgctattgctgcagattatgccctggccgcaggacatcaccgtcttccggccaaactgggtgttgttgattctgttgtactggatcctcgcgctgccgcaccgggttaacgtcggtaccggatttgtgatgggggcgattctcgacctcatcagcggttcgaccctcggcgtacgtgcgctgtcgttaagtatcgttgcctatctggtcgctttaaaatatcagctgttccgtaatctggcgctctggcaacaggcgctggtggtcatgctgttgtctcttgccgttgatatcattgttttctgggcagagtttttagtgatcaacgtctctttccgtccggaagtgttctggagtagtgtagtaaacggtgtgctctggccgtggctattcctgctaatgcgtaaagtgcgtcagcaatttgcggttcaataa

SEQ ID NO: 88704 - DNA, 999 bp, Enterobacter aerogenes
atgaagccaatttttagccgtggcccgtcgctacagattcgccttattctggcggttttggtggcgcttggcgtcattatcgccgacagccgcctgggtacgttcagccagattcgaacgtacatggatacagccgtcagtcctttctactttatctcaaatggtccccgggaactgctcgacagcgtatcgcaatcgctggcgacccgcgatcagctcgaactggaaaaccgcgcgctgcgtcaggaactgctgttgaaaaacagcgatctgctgatgctgggtcaatacaaacaagaaaacgcccgtctacgtgagctgttaggctcgccgctgcgtcaggatgagcagaagatggtgacccaggttatctcgacggttaacgatccctacagcgatcaggtcgttatcgacaagggcagcgtcaatggcgtttatgaaggccaaccggtcattagcgacaagggcgttgtcggccaggtggtggcggtagcgaaaatgaccagccgcgtgctgctcatttgcgatgcgacccatgccttgccgatccaggtgctgcgtaacgatatccgagtcattgcagccggtaacggttgtactgatgatttacagcttgaacatctgccggcgaataccgatattcgcgtcggcgatgtgctggtgacctccgggctcggcggacgcttcccggaagggtatccggttggggtagtctcctcggtacgtctggatactcagcgtgcatacacggtgatccaggcccgtccgaccgccggactgcagcgtttgcgctatctgctgctgctgtggggcgccgatcgcaacggcgctaacccgatgactccggaagaggtgcaccgcgttgccaatgagcgcctgatgcaaatgatgccgcaggtgctgcctgcgcctgatgcgatggggccgcagatgccggcgccggcgacaggcctgacgccgccgccgtccgcgcaacctctgccagcaggggggcaatag

SEQ ID NO: 88705 - DNA, 1044 bp, Enterobacter aerogenes
atgttaaaaaaatttcgtggcatgttttccaatgacctgtccattgacctgggtaccgcgaatacccttatttatgtaaaaggacaaggcatcgtattgaatgagccttccgttgtggccattcgtcaggatcgtgccggttcgccgaaaagcgttgccgctgtaggtcatgaagcgaagcagatgctgggccgtacgccgggcaatatcgcggcgattcgcccgatgaaagacggcgttatcgccgacttcttcgtgactgaaaagatgctgcaacactttattaaacaggtgcatagcaacagctttatgcgtccgagcccacgcgtgctggtgtgcgtgccggttggcgcgacccaggttgagcgtcgtgctatccgcgaatccgcgcagggcgctggcgctcgtgaagtcttcctgatcgaagagccgatggcggccgcgatcggcgcaggcttgccggtttctgaagcgaccggttctatggttgttgatatcggcggcggtactaccgaagtcgcagttatctccctgaacggcgtggtctactcttcttccgtacgtatcggcggcgaccgtttcgacgaagccgtgatcaattacgtgcgccgtaactacggttccctgatcggcgaagcaaccgctgagcgtatcaaacacgaaatcggttccgcttacccgggtgatgaagtacgcgaaatcgaagtgcgcggccgtaacctggctgaaggcgttccacgcggcttcaccctcaattccaacgaaatcctcgaagcgctgcaggagccgctgaccggcatcgtcagcgccgttatggtcgcgctggaacagtgcccgccggagctggcatccgatatctccgagcgcggtatggtcctgaccggcggcggcgcgctgctgcgtaaccttgaccgtctgttaatggaagagacagggatccctgtcgtagttgcagaagatccactgacctgcgtcgctcgtggcggcggtaaggcgctggaaatgatcgatatgcacggcggcgacttgttcagcgaagagtag

SEQ ID NO: 88706 - DNA, 1941 bp, Enterobacter aerogenes
atgcgattaacgacgaaattctcagcatttgttacgctgctcaccagcctgacgatttttgtcacgctgatcggcgcgtcgctgagcttttacaacggcattcagattaaggttgagaatcgcgtacaggcggtggcgacgatgctggatagccgcctggtgaccacctcttttgagaagctcgaaccgcaaatggacgagctgctcacgccggtagaagtcgaacatattgattttctgctcaacggcaaatcgctttacagccatacccgcggtgatagttaccgtccgctgggcagtaacaatcagtatcgtgaaatgacggtaccctcgcttaaacatcccggaatctcgattcgtctggtctacatggacccgatggtcaattacttccgctcgcttcacgtcaccgcgccgctctccttcgccatcggcttcatggtgctgattatcttcttttcgattcgctggatccgccgccagctggcggggcaagaactactggagctgcgcgcgcgacgcattctcagcggcgagcgcgggccgcaggtgcgcggttcggttcatgaatggccggccagtaccagcagcgcgctggatatgctgctttctgagctgcagttcgccagcgatcagcgcagccgcatggataccctgattcgctcctacgccgcccaggattccaaaaccggccttaacaaccgcctgttctttgataatcaactggcgacgctgctggacgatcaggaaaaagtgggggcgcacggtatcgtgatgatgattcgcctgccggagtttgatctgctgcgcgacaactggggacgggcggcggcggaagagcattacttcacgctaattaatctgctgtctacttttattatgcgttatcccggctcgctactggcgcgctatcaccgtagcgatttcgccgtcttattgccgcatcgcactcttaaagaggccgatagtatcgccgggcagttactgaaggcgatggatgcgctgccgtcaacgcgggtgctggataaagacgacacgatgcatatcggcatctgcgccttccgcagcggccagtccacctctcaggtgatggagcacgccgaagccgccacccgcaacgccgtgctgcaggggagtaatagctgggcggtttacgatgattcgctgccggagaaggggcgcggtaacgtgcgctggcgaacgcttatcgagcagatgctcagccgcggcggcccgcgcttgtatcagaaaccggcggtcatgcgcgatgggcgggtacatcatcgcgagctcatgtgccgcatctatgacggtaaagaagaggtgattgccgccgagtatatgccaatggtgcagcagtttggcttagcggaagagtacgatcgcctacagattacgcgtttgctgccgttattaagttattggcctgatcaaacgctggccctgcaggtgaccgtggagtcgctgattcgcccgcgtttccagcgctggctgcgcgataccatgatgcagtgcgaaaaatcacaacgtcggcggattatttttgaacttgcagaggcggatgtttgtcaatatatcggccgtttacacccggttatgcggttgataaacgcgctgggcattcgcgtcgctgtggttcaggccgggttgacgctggttggcaccagttggatcaagcagctggacgtagaagtgatcaagctgcatcaagggctatcgcgcaatattgaaaaacgcagcgagaaccagttactggttcaaagtctggtggaagcctgtaaagggatgccggtacaggtttttgcgacgggagtacgcagtcgcagcgagtggcaggtgctgtcgcaatgcggcgtgaccggcggtcagggggaattttttgccgcctcacagccacttgacacaaatgtgaaaaaatattcgcaaagatactcggtttga

SEQ ID NO: 88707 - DNA, 975 bp, Enterobacter aerogenes
atgcaggcattaattttagaacagcaggatggcaaaaccctttcctcggtgcaaaacatcgatgccaacctgttgccgccaggcgatgtgactgtcgatattcactggtcgagcctcaattataaagatgcgttggccattaccggcaaaggaaaaattatccgcaactttccgatgattcctggtatcgattttgccggtaccgtccacgccagcgaagatccgcgttttcacgttggccagcaggtattactcaccggttggggcgtgggagaaaatcactggggcggcctggccgagcgcgcccgcgtcaaaggcgaatggctggtggccatgcctgaaggtctcgacggacgcaaagcaatggcgatcggtaccgcaggttttaccgccatgctatgcgtgatggcgctggaagacgccggcgtgcgtccgcaggatggagagatcgtcgtaacaggcgccagcggcggcgtcggcagcacggcagtcgctctgctgcatcatctgggttatcaggtggcggcggtttccgggcgcgaaagtacccatgactatctgaaaagcctcggcgcgcagcgtattttgggccgcgacgagttcgctgagagccgtccgctggaaaaacaaatctgggcgggtgctatcgataccgtcggcgataaagtgctggctaaagtactggcacaaatgaactacggcggctgcgtcgcggcctgcggcctggcgggcggtttcgcgctgccgaccaccgtgatgccgtttatcctgcgcaacgtacgcctgcagggcgtcgattcggtaatgaccccgcccgcgcgccgcgcagaagcctggcgccggctggtgcgcgatctgccggagtctttttacgcgcaaagcgcgaccgaaatcaccctggccgatgccccggccttcgccgacaaaatcatgaacaaccagatccaggggcgtacgctggtcaaaatcggctaa

SEQ ID NO: 88708 - DNA, 1002 bp, Enterobacter aerogenes
atgaaaaccagaaaactgacggaagccgacgtaacggcggaatcggtatttaacctacagcgccgccaggtgctgaaaatgctcggtatcggcgcgacggcgatgtcgctctcaacgaaggcccatgccgacctgctcgattggtttaaaggccacgatcgcccgccggcgcctgccggaaaggcgctgacctttgataaacccgcagcatggcaaagtaagctcgccctcaccccggaagataaagtcgccggctacaacaacttttatgaattcggcctcgataaagccgatccggccgctaacgcaggcagcctgcgcactgacccctggacgcttaccatcggcggcgaagtcgccaaacccctgacgctcgatcacgacgacctgacccgtcgtttcccgctggaagagcgtatttatcggatgcgctgcgtggaggcctggtcgatggtcgtgccgtgggtcggcttcccgctgcataaactactcgcgctggtggagcccaccagcaacgcccgctacgtcgctttcaaaacgctgtatgcgccagaacaaatgcctggacaaaaagatcgcttcatcggcggcggcctggcctatccctatgtcgaagggttgcgccttgatgaagcgatgcacccgctcacgctgatgagcgttggcgtctatgggaaagcgttgccgccgcaaaacggcgcccccatccgcctgaccgtgccgtggaagtacggctttaaagggattaaatctatcgtgagcatcgaattaacccgcgagcggccgccgaccacctggaatctggcggcgccggatgaatacggtttctatgccaatgtgaacccgcacgtcgatcatccgcgctggtcgcaggccagcgagcggtttatcggcgccggcggcgtactcgacgtaaaacgccagccaacgttgctgtttaatggctatgccgaggaagtcgcctcgctgtatcgcgggcttaacttacgggagaatttctag

SEQ ID NO: 88709 - DNA, 600 bp, Enterobacter aerogenes
gtgcgtctgagcgttaaacagataggttggctgaaagttgcgctgcatttagccggttttttaccgcttgtctggctgttctgggccggacatcagggctatttcagcgccgatccggcaaaggatatccagcattttaccggacggatggcgctgaagtttttgctcgccaccttgcttattacgccgctggcgcgctacgctaaacagccattattgatacgcacccgccggttattagggttatggtgctttgcctgggccacgttgcacctcaccagctatacgctgctggagctcggcattaacaatctggcgctactcggttccgagataatcaaccgtccgtatctcacgcttggtttaatcagttggttggttttactggcgctggcggcgacgtcaacccagtacatgcaacgaaaattaggccgtcgttggcaaacattgcacaacttcgtctatctggtggcgatcctcgcccctatacattatctgtggtcggtgaagattatatcgccgcagccgctgatttatgccgggctggcaacggtacttttagccagccgctacaagaagtttcgccagtggtggcgctaa

SEQ ID NO: 88710 - DNA, 453 bp, Enterobacter aerogenes
atggctgacaagtttcgcattttgcttttgaacggaccaaaccttaatatgctcggcagccgtgaacccgagaagtatggttcgctaacgctggcagaaattgttaaccgtttaaccgcagaagcggaagcgctaaacgtgacgctcgaccacctgcaatccaatgcggagttcgcgctcatcgaccgaattcatcaggctaaagactctgtggactatatcctgatcaatccggccgcgtttacgcataccagcgtggccatccgcgacgcgctgcttgccgtgagtatcccgtttatcgagatccacctgagcaacgtgcatgcgcgcgagccgttccgtcaccactcgtatctgtctgatgtcgcctcgggcgtgatctgcggattaggtgcggacggctattcatacgctttacagacggcggtaaaacgcctgtcacaaacacactaa

SEQ ID NO: 88711 - DNA, 462 bp, Enterobacter aerogenes
atggatattcgtaagattaaaaaactgatcgagctggttgaagaatcaggcatctccgaactggaaatttctgaaggcgaagagtctgtacgcatcagccgtgcagcgccggctgctagctatccggtaatgcagcaagcctatgctgcgccaatcgcccagcctcaggcgccagccgccgcagcgccggcagcagcacctgccgctgaagcgaaagcggaaatcagtggtcacatcgtacgttccccgatggtcggtactttctaccgcaccccgagcccggacgcgaaagcctttgtggaagtcggtcagaaagttaacgtgggcgacaccctgtgcatcgtagaagcgatgaaaatgatgaaccagatcgaagccgacaaagccggcgtggttaaagccattctgatcgaaagcggccaacctgtagaattcgacgagccgctggttgtcatcgagtaa

SEQ ID NO: 88712 - DNA, 1350 bp, Enterobacter aerogenes
atgctggataaaattgtcatcgctaaccgtggcgagatcgcactgcgcatcctgcgtgcctgtaaagaactgggcatcaagaccgttgctgtgcactccaccgcggatcgcgatttaaaacacgtattattagcggatgagacggtctgcatcggcccggctccgtccgtaaaaagctatctgaacatcccggctatcatcagcgcggcggaaatcaccggcgcggtagcgattcacccgggttacggtttcctttccgagaacgctaactttgccgagcaggttgagcgctccggtttcatcttcatcggcccgaaagccgacactatccgcctgatgggcgacaaagtgtccgccatcaccgcaatgaagaaagctggcgttccgaccgttccaggttctgatggcccgctgggcgacgacatggacgctaaccgcgcgcatgccaaacgcatcggctacccggttatcatcaaagcctccggcggcggcggcggtcgcggcatgcgcgtcgtgcgcagcgacgctgaactggcgcaatccatctccatgaccaaagcggaagcgaaagcggctttcaacaacgacatggtctatatggagaagtacctggaaaatcctcgtcacatcgagattcaggtgctggcggacggccagggcaacgctatctatctggcggaacgcgactgctccatgcagcgtcgtcaccagaaagtcgtcgaagaagcgccggcgccaggcattaccccggaactgcgtcgctacatcggcgaacgttgcgcgaaagcctgtgtggatatcggctatcgcggagcgggtacctttgagttcctgtttgaaaacggcgagttctacttcattgagatgaacacccgtattcaggtagaacatccggttaccgaaatgatcaccggcgttgacctgatcaaagaacagctgcgcatcgcggcgggtcagccgctgtctatcaagcaagaagaagtgcaggttcgcggtcatgcggtggaatgccgtatcaacgctgaagacccgaataccttcctgccgagcccgggtaaaattacccgcttccacgcgccgggcggttttggcgtgcgctgggagtctcatatctacgccggttacaccgtaccgccgtactatgactcaatgatcggtaaactgatctgctacggcgaaagccgtgatgtggcgattgcccgcatgaagaacgcgctgcaggaattgatcatcgatggcatcaaaaccaacgttgagctgcagatgcgcattatgagcgacgagaacttccagcatggtggtaccaatatccactatctggagaaaaaactcggactgcaggaaaaataa

SEQ ID NO: 88713 - DNA, 243 bp, Enterobacter aerogenes
atggacaaaagatttgttcaggcccataaagaagcgcgctgggcgctgtggctgacccttctctatcttgccgcgtggctggcagcggcctatctgcctggcgtcggtatcggctttaccggcctgccgcactggttcgaactggcctgcctgctggtgccgctgctgttcgtcctgctgtgctgggcgatggtgcgctttatcttccgcgatatctctctggaggataacgatgcagcttga

SEQ ID NO: 88714 - DNA, 1452 bp, Enterobacter aerogenes
atgcagcttgagattatcgtggtgctgatcgcttatctgtttgtcgttttcggtctgtctctttacgcgatgcgtaaacgcagtaccgggaacttcctcagcgagtatttcctcggcagccgatcgatgggcggctttgtattagccatgaccctcaccgccacctatattagcgccagctcgtttatcggcggccctggcgccgcctacaaatatgggctgggctgggtactgctggcgatgatccaggtaccgacgatctggctctctctcggtatcctcggcaagaagttcgcgatcctggcgcgccgctacaatgccattacccttaacgatatgctgcaggcgcgctaccaaagccgcgcggtggtatggattgccagcgtcagcttgctggtggcctttgttggggccatcgcggtgcagtttatcggcggcgcgcgcctgctggaaaccgccgccgggatcaagtacgaaaccggactattgatatttggtatcacaattgcgctctacaccgcttttggcggtttccgcgccagcgtactcaacgataccatgcaagggatggtgatgttgatcggaacgatcgtcctgctggttggtgtagtgcatgccgccggaggcctgcatctggcggtagaaacactccagcaaatcgacccgcagctggtgtcgccccacggcgccgatgatatcctcacgccaacctttatgacctcgttctgggtgctggtctgtttcggcgtcatcggcttgccgcataccgccgtacgctgtatctcctataaagacagcaaggccgtacaccgcgggatcgttattggcaccatcgtcgtggcgattctgatgttcggtatgcatctcgccggcgctcttggccgcgccgtcctgccgggcctcaccgtgcccgatcaggtgatcccgacgttgatggttcaggtgctgccgccatgggccgcagggctgtttttagcggcgccgatggccgcgattatgtctaacgttaacgcccatttactgcaggcatcggctacgatcattaaagatctgtggctcagcgctcagccgacgaaaaagcgtaacgagcagaagctgaagcggatctcaacgatcgccaccttagtgctcggcatacttatgatgctggccgcctggcggccgccggaaatgattatctggcttaatctgctggcctttggcggcctggaagccgtgttcttatggccgctggtattgggcctttactgggagcgggcaaacgctgccggcgcgctcagcgcgatgttagtgggcggcatactgtatgccgtgctcgcgacgtttaacattcagtacctgggcttccaccctatcgtgccctcgctgctgctaagtttgttggcttttgtcgtcgggaaccgcttcggtcaacccgtaccaccagcccctattatgactactgataaataa

SEQ ID NO: 88715 - DNA, 882 bp, Enterobacter aerogenes
atgccttggatccaactaaaactgaatacgaccggcgctcacgcggaagaactgagcgacgcgctgatggaggccggcgcggtctcgattaccttccaggacacccacgacacgccggtgttcgaaccgctgccgggtgaaacccgtttgtggggcgataccgacgttatcggtctgttcgacgcagaaagcgacatgaacgaagcggttgctatccttgagcagcatccgctgctcggcgccggcttcgcgcataaaattgaacaactggaagataaagactgggaacgcgaatggatggataacttccacccgatgcgtttcggcgaacgcctgtggatttgcccgagctggcgcgatgttcctgatgagaatgcagtcaatgtgatgcttgatccaggactggcctttggtaccggcactcacccaacaaccgcgatgtgtctgcaatggctcgacggccttgacctgcagggcaaaacggttatcgattttggctgcggttccggcatcctggcgatcgcagcgctgaagctgggcgccgccaaagctatcggtattgatatcgatccgcaggccattcaggccagtcgtgataacgcccagcgtaacggcgtctccgaacgccttgaactgtatttgccgcaggatcagccagaagccatgaaagccgatgtggtggtcgcaaacatcctggcaggcccgttacgtgagctggcccctttaatcagcgtcctgccggttacaggcggcctgcttggcctttccggaatcctggcaagtcaggcggaaagcgtctgcgaagcctacgccccgctcttcaccctcgacccggtggtggagaaagaggagtggtgccgaattaccggacagaaaaactaa

SEQ ID NO: 88716 - DNA, 873 bp, Enterobacter aerogenes
atgggagcaggtttaaccgtctccgagatgatgtcctccaacccgcaggtatgggagagtgacaagtcccggttacggatggtgcacattgatgagcccggtattcgtaccgtgcaaatcgccggtagcgtaccggaagagatggccgcggccgcccgtattaacgtggaaagcggcgcccagattattgatatcaatatggggtgcccggctaaaaaggtgaatcgtaagctcgctggttcagccctcttgcagtatcccgatcaggtgaaatcaatcctgaccgcggtcgtcaaggcagtggacgttccggtgactctcaagattcgcaccggttgggaaccggaacaccgtaactgtgtagagattgcccaactggctgaagaatgtggcattcaggctctgactattcacggacgcactcgcgcctgcttgtttaacggagaagctgaatacgacagtattcgggcagttaagcagaaagtttccattccgattatcgcgaatggcgacattactgacccgcttaaagccagagccgtgctcgactacacgggggctgacgctctcatgataggccgtgcggctcagggaagaccctggatctttcgggaaatccagcattatctggacactggggagttgctgccccccctgccgttggcagaggttaagcgcttgctttgcgcgcacgttcgggaactgcatgacttttacggtcaggcaaaagggtaccgaatcgcgcgtaaacacgtctcctggtatctccaggagcatgctccaaatgaccagtttcggcgcacattcaacgccattgaggatgccagcgaacagctggaggcgttggaggcatacttcgaaaattttgcgtaa

SEQ ID NO: 88717 - DNA, 297 bp, Enterobacter aerogenes
atgttcgaacaacgcgtaaattctgacgtactgaccgtttctaccgttaactctcaggatcaggtaactcaaaagcccctgcgtgactcggttaaacaggcactgaagaactattttgctcaactgaatggtcaggatgttaatgatctgtatgagctggtattggctgaagttgaacagccactgttggacatggtgatgcaatacacccgtggtaaccagacccgcgctgccctgatgatgggtatcaaccgcggtactctgcgtaagaaactgaaaaaatacggcatgaactga

SEQ ID NO: 88718 - DNA, 765 bp, Enterobacter aerogenes
atgtcagtatctgcatttttgctaaataatattttttatggaatgctaaattggctggtgtatcagtcaattctgtattcaccgttaggtagcgagtgggaaaaggttatggccagaaaaaccaaagaggacgccttaagaacgcgtcaactcctgattgagtccgccattcagcagttcgcgcagcgcggcgttaccaataccacgctgaccgatatcgctgacgccgcgggcgtcacgcgtggagcggtgtactggcatttttccagcaaggcggagttatttaatgagatgtggcagcagcagccgccgctcagagagctactgccccatcaacagtgggagctggataaccaaaatccgttaacagggttacgtaaaaaatttattaccggattacaatatatcgctgagaattcccgacagcaggcactgctacaaattctttatcataaatgcgagtttaccagtgacatgctgccggaaagcgaaatccgcaaacgaattggcttcaattacgccataatccgtgacgtcctgcagtgttgcgtaagaaatagattattgccggcggaaacaaatatcgaaattacgttgataatattacacggcgcttttacaggaattatcaaaaactggttaatggatcctgaacaattcaatctctatcagcaggcgcccgtgctggtagacaatattatgtcggcgttatcgctgcaacaacctgaccatagcgtgtggtcaatggctgctgtggggcagtag

SEQ ID NO: 88719 - DNA, 1140 bp, Enterobacter aerogenes
atgacgagtcatgccagagtatctcttttatccagcctaattatctccgccttgttgcttaccggttgcgataattcaggcgaccagcaggcacaacctcaggcgccgcaggttagcgtacatgtagtacacagtgaaccgctttccgtcaccactgagctcccagggagaacatcggccttccgtgtcgctgaagttcgccctcaggtcagcggtattatcctgaaacgcaactttgtcgagggcagcgatatcaaggccggtgaatcgctctatcaaatcgaccccgctacttaccaggcggcctggaacagcgccaaaggcgacgaggcaaaagccgaagccgcagcggctatcgcccatctgacggtgaaacgttatgttcctctgcttggaactcagtacatcagtcagcaggaatacgatcaggccgtcgctaccgcgcgtcaggccgatgccgatgtcgtagcggctaaagccgcggtcgaaaacgcccgtatcaatctggcttacaccaaggtgacttcgcccatcgacgggcggattggtaaatccagcgtaaccgaaggcgcactggtgaccaacggccaggcggacgccatggcgacggtgcagcaactcgatccgatctatgtcgacgtaaccgaatccagcaacgattttatgcgcctgaaacaggaaagcctgcagcgcggtgatgacagtaaaagcgtgcagctgattatggaaaatggccaaccctattccctgaagggatcgctgcaattttctgacgtgaccgtcgatgaaagcaccggatccattacgctgcgcgcggtattccctaatccgcaacacactcttctgccgggcatgtttgtccgcgcccgtatcgatgaaggcgtcaatccgcaggcgattctggtaccgcagcagggggttacccgcacgccgcgcggcgatgccacagtgttaatcgttaatgcgcagaaccaggtggaaaaccgtgaagtcaccgccgcccaggcgataggcaataaatggttaatcaccagcggcctgcaaaacggcgacaaagtcatcgttagtgggttacagaaggttcgcccaggcgtcaccgtgaaggcgacggaagataccactgcctccgccgcacaataa

SEQ ID NO: 88720 - DNA, 3111 bp, Enterobacter aerogenes
atgtctaagttcttcattcatcgaccggtgtttgcatgggtgctggcgatcatcatgatgattgccggcggcctcgccatcatgcagcttcctatcgcgcaatatcccacgattgcgccgcccgcggtagccatctcggcaacctacccgggtgcagatgcgcaaaccgtgcaggacaccgtcacccaggttatcgaacagaacatgaatggtatcgataatctgatgtacatgtcctctaccagtgattcatccggtagcgtcaccatcacgctcacttttcaatccggcaccgatccggatatcgcccaggtgcaggtgcagaacaaactgcaactggcgacgccgctgctgccacaggaagtacagcagcaaggtattagcgttgagaaatccagtagcagcttcctgctggttgccggatttatctctgataatccaagcactacccaggatgatatttccgactacgttgcctccaacatcaaagaccctatcagccgccttaacggcgtgggcgatgtacagttgttcggtgcgcaatatgccatgcgtatctggctcgacggcaacctgctgaataaatataacctcacgccggttgatgttatcaaccagttgaaggtgcaaaacgatcagatcgccgccggacagcttggcggtacaccatcggttaaaggtcaacagcttaatgcctcgatcattgctcagactcgcctgaaagatcctgaggaattcggtaaagtcacgctgcgggttaacgccgatggttccgtggttcgcctgaaggatgtcgcgcgcattgaactgggcggcgagaactataacgttgtcgcgcgcattaatggcaaacccgcctctggtttggggatcaagttggcgaccggcgccaatgcgttagataccgctacggcgatcaaagcgaaacttgccgagctgcagcccttcttcccgcaagggatgaaagttgtttatccctacgacaccacgccgttcgttaaaatctccattcacgaagtggtcaaaacgctgtttgaagccattatcctcgtcttcctcgtgatgtatctgttcctgcagaacattcgcgcaacgcttatcccgacgatcgctgtgccggtcgtcttgctgggtacttttgcggtgctggcgatgttcggctactccatcaacacgctaaccatgtttggcatggtgctggcgatagggctactggtcgacgatgccatcgtggtggtagagaacgttgagcgcgtcatggtcgaggacaagctttcccccgttgaagccacagagaaatcaatggagcagattcagggggcgctggttggtatcgccatggtgctctcggcggtattcgtcccgatggccttctttggcggctcgaccggggcgatttatcgtcagttctccatcactatcgtttccgcgatggcgctgtctgtactggtcgcgctggtactgaccccggcgctatgcgcaaccatgttaaagccagcatccgcagaccatcatggcaaaaaggggttcttcggctggtttaatgccaggttcgaccaaagcgttaaccactacaccaacagcgtaagcgggatcctgcgcggcaccgggcgctacctggttatctatctgctgatcgttatcggcatggcaatgctgtttgtccgcttgcctacatccttcctgcctgatgaagaccagggcgtgttcctgaccatggttcagttgcccgctggcgctacgcaagagcgtacgcaaaaggtgctcgactccgtcagcgactactatctacagaaagagaaagctaatgttgagagcgtgttcaccgttaacggctttagcttcagcggacaaggacaaaactccggtatggcgtttgtcagtctgaaaccatgggaagagcgcagcggttcggaaaacggcgttgaagccattattaagcgtgccaccgccgcatttagccagattaaagatgcaatggtcttcccgttcaacatgccggccatcatcgagttaggtaccgcgaccggtttcgactttgagctgattgaccagggtggcttaggacacacacagctaactcaggcacgaaaccagcttctggggatggtaaaacagcatccggaacagctggtacgcgttcgccctaatggccttgaagatacaccgcagtttaaactcgacgtcgatcaagagaaagcgcaggcgctgggcgtctcgttatccgacattaacgaaacgatatcagctgcactgggcggctattatgtgaatgactttattgaccgcggccgcgtgaagaaagtctatgttcaggccgatgccagtttccgtatgctacccggtgatatcaataacatgtatgtccgcagctctaacggtgaaatggtgccgttctcggcatttgttacttcacgttgggtatatggttctccgcgtctcgaacgttacaacggcctgccttcgatggaaatcctcggcgaagcggctccgggtaagagtaccggggaagccatggccttgatggaacaactggccagtaaactccctgcgggtattggttatgactggacgggcttgtcatatcaggaacgtttatcaggcaaccaggcgccagcgctatatgctatttcgctgatagtcgtcttcctctgcctggctgcactctatgaaagctggtctattccattctcagttatgctggttgtgccattaggggtgattggcgcattattagcagcctcacttagaggattgaataatgacgtttatttccaggttggcctgttaacgactattggtttatctgcaaaaaacgccattcttattgttgagttcgccaaagaccttatggataaagaaggcaaaggtattattgaggcgaccctggaagcatcccgtatgcgtctgcgccctatattaatgacttcattagcctttattctcggggtcatgccgttagtgattagccacggcgctggtagcggcgcgcaaaacgctgtcggtaccggtgtgatgggcggtatgcttaccgcaacgctgctggccatcttcttcgtgccggtgttctttgtggttgtaaggcgtcgctttacccgccacgcagaataa

SEQ ID NO: 88721 - DNA, 222 bp, Enterobacter aerogenes
atgaaaaaattaatattagtgacattgttagcaacgttgcttgctggctgtgcccatgattccccgtgcgtgccggtctatgactcgcagggccgactggtgcataccaacacctgtgtaaaaggcacaacacaggataactgggaaacggctggcgcgatcgccggtggggccgcagcggttgccggtctcacgttaggaatcgtggcgcttacgcgttag

SEQ ID NO: 88722 - DNA, 1644 bp, Enterobacter aerogenes
atgtctatcggccctatgtctacccgcaaaatcacccactggtttgcaaggcgatcctttcaaaaccgcatcttcctgctgatcttatttacctcgaccgtcgtcatgttggccatgtcctggtatctgacagacattaccgaggaacgtcttcattaccaggtcgggcaacgggcgctgattcaggcgatgcaaatttcggcgatgccggagctggtggaagcggtccagaaacgcgatctcgcgagaatcaaagaacttatcgaccccatgcgttcattctctgacgccacctacattaccgttggcgatgcgcaaggccgacgtctgtaccacgttaaccctgatgaaatcggcaaatcgatggaggggggcgatagcgatgaggcgctgtataacgccaaaagctacgtctctgtgcgcaaaggttcattaggatcatcgttacggggtaaatcgccgattcaggacgccagcgggaaagtcatcggcatcgtgtcggtcggctataccatcgaacagttagagaactggctcagtctgcagataagttcgctactgatcccgatggcgattatcctgctattactgctgtattgcgcccgccgcttctcgttgcatatcaaaaagcagatgctcaatatggagccccagcagctatcgcaactgctcatccagcaaagcgtgctctttgaatcggtgtttgaagggcttatcgccatagactcaaactataaaataaccgcgataaatcagaccgcccgccgtctgcttaatctgagccagccagagccgacgctaatcggcaaagggatcagcagcgttatttcgcaagaggccttcttctacgatgcgcctcacgagaataagaaagacgcgatcgtcacttttaatcagatcaaagtgatcgccagccgtatggcggtgatcttaaataatgcgccccagggatgggtaattagttttcgtagcaaagatgatatcaataccctcagcctgcagctcagccaggtgcagcagtacgccgataacctgcgcgccgtacagcatgaacaccgtaatttgatctcgactatcgccggactgctgtttctcaaacgctacgatcacgcattggatctgattcagcaacagtcagaaagccaccagaaggtgctcgattttattgcgcgtaatttccaggataatcaccttgccgggttactgatcggtaaatattaccgggccaaagagctcggccttgaactggtgttcgacccatcctgtttcgtcgataaacttcccggcgcgctttcgcacagcgaatggatctcgatcgtggggaatcttctcgacaacgcctacaatgccactttgcgccagccgctgggatcgaaacagatcgaatgtttgattaacagcgatggtcatgaactgattgtcgagatcgccgatcagggttgcggcattgacgaggcactacgcgatcggatcttcgaacgcggcgtcaccagcagcgccagcggcgatcacggtattgggctctggctggtacgcagttacgtagatcaagcaggcggcagtatcgtcgtcgaaaataatattccttttggcaccatctttactctttatatccccctgacccgagatgaacatcatggatag

SEQ ID NO: 88723 - DNA, 705 bp, Enterobacter aerogenes
atggatagcattactactcttatcgttgaagacgaacctatgctggcggaaatcctggtggataccatcaaacagttcccccagttcaacgttatcggcattgcggataaactggaaagcgcaaaaaaaatgctgcgtctctaccagccgcagctgatcctgttagataactttctccctgatggcaagggattggatctgattcgccacgccgtcagcaccaactacaaagggcgaatcatttttattaccgctgataatcatatggataccatcagtgaagccctgcgtctgggggtatttgattacctgattaagccggtgcactatcaacgtctacaacacaccctggagcgcttcgcccgctaccgcagttcgctgcgttcaagcgaacaggccagccagactcacgtcgacgccctgtttaatattcaggctcgcgagcaaacagagcccgctgaagcgccgctgcgcgggatcgatgaaagtacctttcatcgtgtgctgcagctgttctctgacccgaaagtggtgcataccgctgactctctggctcgcatcctcggcagcagtaaaaccaccgcccgccgctatctggaacaaggcgtcaaaaacgattttctggaagcggaaatcagttatggcaaagtcggcaggccggagcgtatttatcgcggcaagcatccctacccggagcatgcctga

SEQ ID NO: 88724 - DNA, 630 bp, Enterobacter aerogenes
atgactgaacgtgtttattacgccagcgacgccaccgaagggcgcgcacagattatcggctgtcgcgccgaagccgatggccgttacgccattgaacttgatcgtacgctgtttcatccacagggcggcggccaaccgtcggatagcggatggatcgacgagcaggtcgtgacggcggtcgcaacgcgcggcgatagcgtactgcatatcgttgagcagccgctgccgctgggcgaggtgaagatacgaattgatgcctctgcgcggcagctacatgcccgtctgcactcagccggtcatttgctgggactggcaggtgagcagttaggctggcgaccggtgaaggcgcatcactggcctggagaggggcggattacgtttgctgccggcgctggcgccgtattaccggaagccagcgcattgctgacacaggtgagcgcgtggcagcagcaggatttaccgcgccgcatcatcttcgctaatggcttgcgcgcggtgggatttggcgatttgccggcttatccctgcggcggtacccatgttgccagtctggcggcgctggggaatattgttatcagccagctgaaaatgaaaaaagggcagatgatcgtcagctataacctcgagtaa

SEQ ID NO: 88725 - DNA, 933 bp, Enterobacter aerogenes
atgaatttgaaccttctacctgacctcgccctctttgtacaaattgtcgagcaaggcagcttttccgccgtcgctcgccagaacggccttaccccctccgccgtgagccgcagcgtctcgcggctggagcaggagatgagctgcaagctgctgcaccgaaccacccgcaaactacggctgagcgatgccgggaaagcggtgtatgaacctgcgcttgaaatgctggaagcagcgcgacaggccatggactccgccgggagtacccaaacggtggctcagggcaaactgaccctgagcgtgccgaaggccgtcggacgctttgtcatccatccgctaatgatgagctttttcaaccaatatccgcaggtagacgtctgcttacggttggaagaccgcgaccttgattttatcgatgacggcattgacctggcgctacgcatcacccatagcccctcccctggcctgcatggcaaaccgctgatgccgatcgctcatctcatctgcgccactgaggagtatttacagcgccacggtacgccgcataccccgcaggatctgcgcgcgcatagctgcatcagccttggcgaaacgcccgccgacgcgcggtggaaatttcgtcgcgaaggcaaaagcgaaacggtgcatacgcatgggcgctacgccgctaaccacaccgccgtgcgtctcgatgctgttaagcagcatctgggtatcggcagtctgccgctgtttaccgcccgcgaagcgctggcaaagggtgaaattgtgcaggtgctgccggaatgggaatttatcagcagctattccggcaatctgtggttgttatgggcaggccataagcatatgcccgccagaatgcgggtgatgattgattatcttagcgagaaggtgccggcgttgaacgcaggcaacacattgtcagccgccaactaa

SEQ ID NO: 88726 - DNA, 2286 bp, Enterobacter aerogenes
atgatcaaattacacgatcgtggggtatatttatcccatcagtatgggattattccggaagaggagtgcgcaaatcctgtcgctaaagatattgcgcggaagggaaccatcgcctggtcaatactgtcagcacataatatttctggcgatgaacagaaattaaaaataaagtttgattccatggcttcccatgatatcaccttcgtgggcatcatccagacggccaaggcctctggaatgacgcgctttcccttgccgtatgttttaaccaattgccacaattcactttgtgcagtgggcggtaccattaacagcgacgatcatatttttggtcttacatcagcacagaaatatggcggcatttatgtaccgccgcatatttccgttattcaccaatacatgcgcgagatgatggccggcggtggccaaatgatactgggctcggatagccatacgcgttatggcgcgctggggacgatggccgtcggtgaaggcggcggtgagttagttaaacaactactgggaagcacctgggatattgattatcccgatattgtcgcggtgtatttaaccggtaaacctgccgctggcgttggccctcaggatattgcgctggcaatgattggtgcggtattcaaaagcggttatgtgaagaacaaagtgatggagttcgtcggccccggcgtggccagtatgtcgaccgactacagaaacagtattgacgtcatgactaccgagaccacctgcttatcctccatctggcagaccgatgaagagacgaaaaactttttgcggcttcatggtagagagaaagactatcgggcgctgtcagccaaagagatggcttactacgatggctgcattgagatcgatttaagcaccatcaagccgatgatcgcactaccgtttcaccctgccaatgtctatgaaattgatacgcttaatcagaatttgccggatattttacgcgaagttgaaattgaatctgagaaaatctcgctggggcgcgcgaagctgtctctattggacaaaatagagaatggcaaattacgcgttcagcaggggattattgctggttgcgcgggaggaaattatgtcaacgtggcgcaggcggctaatgccctgaggcatcattcctgtggcgacaatattttctcactttctgtatatccctcctctcagccggtgctgatggcgttaacgaaaagggggatgatcaatgatttaatgagcgcgggcgccattattcgtaccgcattctgcggcccttgctttggcgccggcgataccccgatgcataacggcttgagcatccgtcatacgactcgtaactttccgaaccgtgaaggttccaagcctggtaatgggcaaatgtcagcggtggcgctgatggatgcgcgttcaattgccgcgacggccgctaacgggggattgttaacctcggcggcggagcttgattgttggcacgaagctcaggaatatgaatttgatgtttccccctataaaaaccgggtttaccagggattcgttaaaggtgttacgcagcaaccgctgatctatggcccaaatatcaaagactggccggaaatgaatgcgttaacggataatattctgttagccgttacttcaaaaataatggatccggtgaccactaccgacgaactgataccatcaggtgaaacatcatcgtttcgttcaaacccgttaggcctggcggaatttaccctttcccgacgcgatccgcagtatgtggagcgggctaaaaaaattgccgccatcgagcaacaacgcgtcaatggtgaagatctttgccgtttaaatccacagctggaaaatatattttcccagatacggctgctgccgggtcaggaaaatattaccgcggcacagacggagatcggtagcatgatctatgcggtgaaacccggtgatggctcggcgcgagagcaggctgccagctgccagcgagtacttggcgggttggcaaatatttgtcaggagtatgcgaccaagcgctatcgttccaatgtgattaactggggaatgctgccgctgcagatgaaagaggcgcctgatttcgaggtcggcgattttatctatatcccggcaataaaaagcgcgctgaagggcgagttaagtgatatcaccgcttttgtcgttagcgaccatcgcccggtgcagcagataacgctgtatatggagaaattaacctcatcagaacaagatattatcaaagcaggtggccttattaattataataaaaatcaattaataaacggccattaa

SEQ ID NO: 88727 - DNA, 345 bp, Enterobacter aerogenes
atgtcaccagtagcaattacattgtcactgttgttattttcaattgtgatgtttgtttgggaaaaaatccctctggccgctacggctatgatcgtctgtattactttagtcgtaacaggcgtttttgatgtaaaaacggcttttgcgggttttattaatcagaacgttattttatttgtggcaatgttcgtggttggcggcgccttatttgagacaggggtgacggataaaattggcggaatcgttacccgttacgctcgctcggagaagcagctcatcgttattattatgttggtttgcggaatactctctggttttctgtctaattacacgcgtgattactga

SEQ ID NO: 88728 - DNA, 1434 bp, Enterobacter aerogenes
atggataaaaaaacattatgcaagctattagtgcttgttgccatcccattacttattagtctattttcggccccggctgggttgactgaacttgcatgggtattgtcaggtatttatctggctgcaattgttggtttagtgattaaaccattttctgaaccagtcatactgttagtcgctgtggctgcctccatggttatcattggcaatttaggtgatggttcaataaaatcatcgagcgtattaagtggctatgcatcaggtaccacctggttggtgttttctgcatttaccttaagtgccgcttttgttattactggtttaggtaaacggattgcatatattcttattggcaagatagggagtaccacacttggcttaggctatgttaccgcctttctggatctgattctttcacccgcgacaccgtcgaatacggcccgtgctggcggtatcgtattacctatcatcaatagcgtggctgtcgcgctagggtcggaaccagagcatacggcaaaacgcgttggtcattatttaatgatgaacgtctatatggttaccaaaaccaccagttatatgttctttaccgccatggcgggtaatatcctggcgctcaaaatgattgaggatatttgccatatcaaattgagctggggtggatgggcattggctggcatattgccaggcttaatcatgctgttactgacaccgcttataacctataagctatatccgcccgaattaaaaaaagtagataataaagccattgccaaagaaggtcttgagtctttagggccgatgaccttgcgtgagaaaatgctctcctgcttgtttgtgatggcgttagcgggttgggtatttagcacttcgcttggggttaatgaatcaacggtggcgatttgcgtcatggcgttgatgctgatattaaaaattgttacctgggatgatgtcattaaaaataaaggtggctggaacacactaatttggtacggcggtatcattggtttgagttctttgctttccaaagttggttttttcttgtggttggccgagttactgaaaaataacatttcatttggcagtcatagtacgctggcattcgttgtcatcgtcgcgttgagtatactggttcgttatttctttgcctcgggcagcgcctatattgtggcgatggttccggtctttgccatgctggcgaatgtttccggtgcgccagttatgttaaccgcgttagcgctgctgtttagtaattcctatggcggtatggtcacccattatggtggcgcggctggcccggttatatttggggttggttataatgatattaaatcctggtggattgttggcggtatattagcgctgttaacttttattctgcatatcaccgttggggtatggtggtgggaattattaatgtactggaaagtgatttaa

SEQ ID NO: 88729 - DNA, 1056 bp, Enterobacter aerogenes
atgaaacaaattccgtgtgttctcatgcgtggtggaacatcaaaaggcgctttcctgttagcagatgatctaccagaagatattcaaaaacgtgatgaaacattattaactatcatgggttctggccatgaactggaaattgatggcattggcggcgggagtccgcaaaccagtaaagtggctattgtcagtaaatcgaccagccagcaagcggatattgactacttatttgtacaggtcattgtcaatgagcgacgggttgatattacgcctaattgcggcaacatgctgtgcgcagtcggcgggtttgctatcgaaaaaggacttgtcgcggcgaattccccagtaacgcgggtgcgaatcagaaacgtcaataccaacacctttgttgacgcagacattcaaaccccggacggccaggttgtttatgaaggagatacccatattgatggcgttccagggcatgcggccccggtaggcctgacattcttaaacgccgccggggcgaaatcgggccagcttttcccaaccggcaaccgggttgatatttttgatgatactcgcgtcacctgtatcgatatggcgatgccgatggttattattccagcgcatagcttgggtaaaacagggtatgaatcggcggcggaattagatcaggataaagaattttttcagcgccttgaatcaatacgtaagcaagcaggcgtggcaatggggtttggcgatgtctcgaacatggtaatacctaaaccagtgctggttgctccacctcaacatggtggaacgctgagtgttcggtatttcatgcctcataactgtcataaatcgttggctattacgggcgctatcggtctggcgagttcttgtattattgctgataccgtagttaacgagctgacgagaatgtcgggtgagggattaatcagagttgaacaccctagcggaagtattgacgtcagtttaagtaatgctaatgaaactcctgaaaatattcgcgcatcggtgattcgtaccgcacgtaaaattctttctggcatggtttatctccctgaataa

SEQ ID NO: 88730 - DNA, 939 bp, Enterobacter aerogenes
atgaacaatgaactatccggaatgaaagcttttgtcactgttgccgagctgggttcatttagcaaagcggcagaagtacttaacctgacgcaacccgcattgacccgcaaaatacaaaaaatagaaagtaacctcaatacagcccttttcgaaagaaccacccgaaaaatcatgctcactcaagcaggaaaaatgcttcttccaaaggcaaagtcactgattgccagccttgatgccgccatttttaacatcagcaacctgacttctaatgtgcatgatacggtaacgctttcttgtatcccgacggcggtattttattttttacctcgcgccatcgttcaatttaatcagcgttacccccatatcaaagttcgaatttatgaacaaggtatagaaaattgcatggcctcggtgagaaaaggcgaagtcgattttggaataaatatgaacttcatcacacatcccgacatcgaatttagcccactcgttaatgaacccttcgtgctggcttgccggcaggatcatccgctggccagtaaaaaattagtggaatggcgggagctcgtctcgcagagattagttggcgtcagacgctcgagcggtaatcggcaactgattgaaagttgcctgcaggataagccatggaaattagattggttttacgaagtcagacacttatccacctctctgggtctggtcgaggcggggcttggcatatcggccttgccctgcctggccatgccgcatcacgctaacagcgctgtcgtcagcgtgccgctggtcgaaccggtaatcaggcgcacgattggcatgattcgcgttaaaaaccgccctctttccgcagcggctgaacgcttcgcgtcattattactgctcatgtggacggatgaagcgagcgagttatggtgtaatgtggtcgattcacaccagcagctataa

SEQ ID NO: 88731 - DNA, 915 bp, Enterobacter aerogenes
atgcgcttaccgattattctcgacaccgatccgggtattgacgatgcggcggcgatcgccgccgcgctcttctcgccacagttggatttgcaattaatgaccacggtggcgggcaacgtctcggtggaaaagacgacccgcaacgcgctgcaactgctgcatttctggaatgccgatgtaccgctggcgcaaggcgcgtcgatgccgctggtacgtccgttgcgcaatgccgcctcggtgcatggcgagtccggcatggagggttatgctttcgtcgaacataaccgtcaaccgctggcaaaaccggcatttcaggcgatccgcgatgcgttgatacacgcgccggaacccgtgaccctggtggccatcggcccgctaaccaacattgccttgctgataacgcagtatcctgagtgcctgtttaatattcgtcgactggtgctgatgggcggctcggccgggcgcggcaactttacccccaacgccgagtttaatatcgccattgatcctgaagccgctgcgaaagtcttccagagcgggctggagattgtgatgtgtgggctggacgtcaccaataaagcgatgctgagtgcggactatctggtcacactgccaacgctcaatcagacaggcaaaatgcttcatgcgttatttagccattatcgcagcggcagtatgagcagcggtctgagaatgcatgatttatgcgctattgcgtggttggttcgtccggatctgtttacgctcaaaccctgctttgtggcggtagagacgcaggggacctggacggctggcgctaccgtggtagatatcgaagggcgtctgggacaaccggccaacgcacaggtggcgttggatttggatgtcgcgggttttcaacattgggcggcggaggttttcgctctcgcgccgtga

SEQ ID NO: 88732 - DNA, 951 bp, Enterobacter aerogenes
atgcagatcctgttggctaacccgcgcggtttttgcgccggcgttgaccgcgctatcagcattgtagaaaacgcgctgacgctgtacggcgcgccgatctacgttcgtcacgaagttgtccataaccgctacgtcgtcgatagcctgcgccagcgtggggcgatttttatcgaacagattagcgaagtgccggacggcgcgatcctgattttctccgcccacggggtttcgcaggcagtacgcaacgaagcgaagagtcgtgacctgacagttttcgacgctacctgcccgctggtaactaaagtccatatggaagtcgctcgcgccagccgccgcggcgaagagtcgattctgattggccacgccgggcatccggaagttgaaggcaccatgggccagtacaataaccccgaagggggcatgtatctggttgagtcgccggaggatgtgctgacgctggaagtgaaaaacgatgcccgactgtcgtttatgacccagaccacgctctccgtcgatgatacttctgacgttatcgacgcgctgcgcgagcgcttcccgaaaatcgtcggcccgcgtaaagacgatatttgctacgccaccaccaaccgtcaggaagccgtacgcgcgctggcggagcaggctgatgtggtgctggtggtcggttcgaaaaactcttcgaactccaatcgcctggctgaactggcgcagcgaatggggaaagcggcctatcttatcgacgatgccaccgatatccaggaacaatgggttaagtctgctgcctgcgttggggtaacagcgggcgcgtcggccccggatatcctggtgcagaatgtgattgcccgtctgcaggagctgggcggcggcgaagcggtgccgttggaaggccgtgaagagaatatcgttttcgaggtgccgaaagagctgcgtgtagatgtccgtgaagtagaataa

SEQ ID NO: 88733 - DNA, 450 bp, Enterobacter aerogenes
atgtctaactctgtacagagcaacagcgcggtgctggtgcacttcacgctgaaactggatgatggctccaccgccgaatccacgcgcggcaacggcaaaccagcgctgtttcgtcttggtgatgcctcgctttccgaagggctggagcagcatctgctggggctgaaagccggcgataaaaccacgttctcgctggaacctgacgccgcctttggcgtacctagcccggatctgatccagtacttctctcgccgcgagtttatcgacgccggcgagccggaaatcggcgcgattatgctctttaccgcaatggatggcagcgaaatgcccggtgtgatccgcgaagtgaacggcgattccatcaccgtcgacttcaaccatccgctggccgggcgtaccgttcattttgatattgaagtgctggaagtcgatccggcgctggaggggtaa

SEQ ID NO: 88734 - DNA, 498 bp, Enterobacter aerogenes
atgagtaaatcgatctgttcaacggggctacgctggctgtgggtcgtcgtagccgtgctgattatcgatctgggcagcaaattcctgatcctccagaacttcgctctgggggagacggtttcgctgtttccatcgcttaatctgcattatgcgcgcaactacggcgcggcttttagcttcctcgccgacagcggcggctggcagcgctggttcttcgctgggattgccgttggtatctgcgtggtgctggcggtgctgatgtatcgttcgaaggcgacgcaaaagctgaacaacattgcctacgcgctgatcattggcggcgcgctgggcaacctgttcgaccgtctgtggcacggctttgtggtcgatatgatcgacttctatgtcggcgactggcatttcgccaccttcaaccttgccgatagcgccatctgcatcggcgcggcgctgatcgtgctggaaggcttcttgccttccagtgataaaaaaacatcataa

SEQ ID NO: 88735 - DNA, 2817 bp, Enterobacter aerogenes
atgagtgactataaatccaccctgaatttgccggaaacagggttcccgatgcgtggcgacctcgccaaacgcgagccgggaatgctggcgcgttggaccgatgatgacctgtacggcatcatccgtgcggcgaaaaaaggcaaaaaaaccttcattctgcatgatggccctccttatgcgaatggcagcattcatattggtcactcggttaacaagattctgaaagacattatcgttaagtccaaaggactgacgggttttgactcgccgtacgttccgggttgggactgccacggtttgccgatcgaactgaaagtcgagcagcaatacggcaagccgggtgagaaattcaccgccgcagaattccgcgccaagtgccgcgagtatgccgccgagcagatcgacggccagcgtaaagactttatccgcctgggcgtgctgggcgactggtcgcgtccgtacctgaccatggacttcaaaactgaagccaatatcatccgcgcgctgggtaaaatcatcggcaacggtcacctgcataaaggcgctaagccggtgcactggtgcgttgactgccgttccgcgctggcggaagcggaagttgagtactatgacaaaacgtctccgtctatcgatgtggcattccacgcggtagataaagccgccgtgctggcgaagttcggcgtagccgacgttaacggcccggtttctctggttatctggaccaccacgccgtggaccctgccggccaaccgcgctatctctctgtctcctgagttcgactatgcgctggtgcaggttgacggccaggcgctgatcctggcgaaagacctggttgagagcgtgatgcagcgcattggcgtggcggattacaccatcctggcggcggtacagggttccgagcttgaactgatgcgctttaagcatccgttcctcgatttcgatgtgccggcgatccttggcgaccacgtgacgctggatgcgggtaccggcgcggtacataccgccggcggccacggcccggacgactacactatcagccagaaatatggactggaaatcgccaacccggttggcccggacggttcttatctgccggggacttacccgtctctggatggtatcaacgtcttcaaagccaacgacatcatcgtcgagatgttgcgtgacagcggcgcgctgctgcacgtggaaaaaatgcagcacagctatccgtgctgctggcgccacaaatcgccgatcatcttccgcgctaccccgcagtggttcgtcagcatggatcaaaaaggcctgcgcgcgcagtctctgaaagagatcaaaggcgtgcagtggatcccggactggggccaggcgcgtatcgaatcgatggtggccaaccgtcctgactggtgtatctcccgtcagcgtacctggggcgtgccgatgtcgctgttcgtgcataaagaaacccacgagctgcacccgcgtaccctcgaactgatggaagaagtggcgaaacgcgttgaagttgacggcatccaggcgtggtgggatcttgattcccgcgacatccttggcgatgacgctgacagctacgaaaaagtgccggataccctcgacgtgtggtttgactccgggtctacccactcttctgtggttgatgtgcgtccggaattcgccggtcacgccgcggacatgtatctggaaggctccgatcagcatcgcggctggttcatgtcttcgctgatgatctccacggcgatgaaaggcaaagcgccatatcgtcaggtactgacccacggcttcaccgtcgacggccagggccgcaaaatgtccaagtctatcggtaacaccgttagcccgcaggacgtgatgaacaaactgggcgccgatattctgcgcctgtgggtggcttccaccgactataccggcgaaatggcggtctccgatgagatcctcaaacgcgccgcggacagctatcgtcgtatccgtaataccgcgcgcttcctgctggcgaaccttaacggtttcgatccggcaaaagatatggttaaaccggaagagatggtcgttctggaccgctgggcggtcggctgcgcgcaggcggctcaggaagatattctcaaagcctacgaatcctacgacttccacgaagtggtgcagcgcctgatgcgcttctgctccatcgaaatgggctcgttctatctcgacatcatcaaagaccgccagtacaccgcgaaagcggacagcgtggcgcgtcgcagctgccagaccgcgctgttccatatcgtggaagcgctggtgcgctggatggcgccgatcatgtccttcaccgcggacgaaatctggggctatctgccgggcgagcgtgaaaaatacgtcttcaccggcgagtggtatgaaggcctgttcggcctggccgatgacgaagcgatgaacgacggtttctgggatgaactgctgaaagtgcgcggcgaagtcaacaaggtgatcgagcaggcgcgtgctgataagaaagtcggtggttctctggaagcggcggttacgctgtatgccgatgctgacctggcggccaagctcaacgcactgggcgaagaattacgatttgtcctgttgacctccggcgccaacgttgccgattatgcacaggcgccggccgatgcctggcagagcgatctgctgaaagggctgaaagtggtcctgagcaaagccgagggcgagaagtgcccacgctgctggcattacaccagcgatgtcggcaaggtagcggaacacgcagaaatctgcggtcgctgtgtcagtaacgtcgccggtgacggcgagcaacgtaaattcgcctga

SEQ ID NO: 88736 - DNA, 939 bp, Enterobacter aerogenes
atgaagctgatacgcggcatacataatctcagtcaggccccgcacgggtgcgtgctgaccattggaaatttcgacggcgtgcatcgcgggcatcaggcgctgctgcagcgcctgcgcgcagagggccgccagctcggtctgccggttgtggtgatgatttttgagccgcagccgctggagctgtttgccgccgataaagcgccggcgcggatcacgcggctgcgtgagaagcttggctacctggcggaaagcggtgtcgactacgtgctgtgtgtccgtttcgaccggcgtttcgccgcgctgacggcgcaagatttcatcagcgaactgctggtgcgtcagctgggcgtgcggttccttgccgttggcgatgatttccgctttggcgctggtcgtcagggggatttcttgttattacagaaggccggggcggagtacggttttgacgtcaccagtacccagaccttttgcgaaggtggcgtgcgtattagcagcaccgcggtgcgtcaggcgctggccgacgatgacctcgcgcaggcggaaaacctgctggggcatccgtttaccatctcaggtcgcgtcgtccacggcgatgagctggggcgcaccataggtttcccgacggcgaacttaccgctgcgtcgtcaggtttccccggttaaaggggtctttgcggtagaagtgacagggctcggcgataagccattacccggcgtcgccaacattggcactcgtccaacggtctccggcgtgcgacagcagctggaagttcaccttctggacgttgtaatggacctctacggtcgccatatagatgtaatactgcgtaaaaaaatacgtaacgagcagcgttttgcgtcgctggatgagctaaaagcgcaaatcgcacgagatgagttaacggcccgcgagtactttgggctcaccaggcagggataa

SEQ ID NO: 88737 - DNA, 210 bp, Enterobacter aerogenes
atgacgcgcagctttgtttttgtggatcagacctttagcagcctgacggtccacgattggttgcatttcgttaaatgctttctgtgcagcagctttgtcgccagcttcgatagctgcgtatactttcttgatgaaagtacgcatcatagagcgacggcttgcgttgtgcttgcgagccttttcagactgaacggcgcgcttcttagctga

SEQ ID NO: 88738 - DNA, 900 bp, Enterobacter aerogenes
atgtcgcatatcaattacaaccatttgtactacttctggcacgtctatcgggaaggctcggtcgtcggcgccgccgaggcgctgtatctgacgccgcagacgattaccgggcagattaaggcgctggaagaacgattgcagggcaaactctttaaacgtaaaggacgaggcctggaacccagtgagctgggagagctggtgtttcgctacgcggatcgcatgttcaccctgagccaggagatgcttgatatcgtcaattatcgcaaagagtcgaacctgctgtttgatgtcggcgtcgccgatgcgctatccaagcggctggtgagcggcgtgctggatgcggcggtagtggaagatgaacaaattcacctgcgctgttttgaatccacccacgagatgctgctggaacaactgagccagcataagctggatatgattatctcggattgcccgattgattcaacccagcaggaagggctgttctcggtgaaaatcggtgaatgcggggtgagcttctggtgtatgaatccgccgccggaaaaaccgtttcccgcctgtcttgaggaacgtcgcctgctcattcccggtcgccgttccatgctcgggcgcaaattgctgaactggtttaattcgcaggggctgcaggtggaaattctcggcgagttcgacgatgcggcgcttatgaaagccttcggcgcggcgcataatgcgatttttgtggcgccaaccctctatgctcacgatttctatgccgatgagtcgattgtcgaaattggccgcatggaaaacgtgatggaggagtatcacgctatttttgccgagcgaatgattcagcatcccgcggtacagcgtatctgcaaccgcgattattcatcgctatttgcgcagccgcaaagctaa

SEQ ID NO: 88739 - DNA, 1233 bp, Enterobacter aerogenes
atgtgttggcggctgtatcatacttttatcgagttattgaccaataaggtgagagtaaaagtgaaacatctgcaacgatttttcagtagcgatgcttccgggggcattattctaatctgcgccgccgcactggcgatgattatggccaatagcagcgtcaccagcggtctgtatcatgcttttttagataccccggtacagctgcgcgtcggcgcgctggaaattaacaaaaacatgctgttgtggatcaacgatgcgctaatggcggtgtttttcctgttaattggcctggaggtgaagcgtgagatgatccagggggcgctcgccagccgtcgtcaggcggtgttcccggtagttgccgcgattggcggcatggtggtgccggcgcttatctatttagccttcaatgcccaggatcccgttgcgcgggaagggtgggcgatcccggcggcgaccgatatcgcctttgcgcttggcgttttagcgctattaggcaaccgggtaccaacggcgttgaaaattttcctgatggcgctggctattattgatgacctcggggcgatagtgattatcgcgctgttttataccaacgatctgtcggtactgtcgttggccgtcgccgctggcgcgattgtggtactggcggcgctcaatctctgcggcgtgcggcgcaccggtatctatatcctggttggcgcggtgctgtggacggcagtactgaaatccggcgtacatgcgaccctggcgggggttatcgtcggctttatgatcccgttgaaggagcagaatggtaaatcgccagcgaagcagcttgagcatgtgctgcatccatgggttgcgtttctaatcctgccgctgttcgcttttgccaatgccggggtttcgctgcagggcgtcacgttcgcagggctgacttcgctgctgcctctggggattattgccgggctgtttgtcggtaagccgcttggcattagcctgttctgctggctggcgctgaagtttaagtgggcctcgttgccgccaggaacccgcttcccgcagattatggcggtcggcgtactgtgcggaatcggcttcaccatgtcgattttcatcgccacgctcgccttcagtagcgttgaccccggattgatcaactgggccaagctgggcattctgatagggtcgattctgtcagccatcattggctacatgattctgcgtaagcgcgtaacggatcctcacagcgtgtaa

SEQ ID NO: 88740 - DNA, 291 bp, Enterobacter aerogenes
atgcaattcaagaaaggctggttagggctggcggccatttcactgttcacaattggcggcgcgcgggctcacactgccggtaatatccaattttttggcaatgtagttactgaaagttgctggaacgaaacggaaagtagcgagattttgtgccagcgcgccgatcgcatcgaacgccacgtgattgtggaaaatatcaccacttcgctggcttcggcttacgcaacggtggagaaaagttatctcgatgccgacaagcagctcactctgctgcgggtggtctatgattaa

SEQ ID NO: 88741 - DNA, 840 bp, Enterobacter aerogenes
atgcgcaaactttcctgtaaatcggcggcgtggctagcgcttggcgccatcatctctttttccacgttggcggcgaagaccgacccggcgataggtgatattgggccgaccgctgaggcgtatatcgccagccatccggataaagttggcgaagcggtagcgacctatctggcggatcatcccgaattcctgattgccgccagcgaaacgctacatcagcgccagcaggttgcccagaagcaggcttatgtgcagctggcgctgcagtaccgctctgagctgctgagcgacagctctccctccgttggcccggcggatgctaaagcggcggtggtgatgttttttgactaccagtgttcctggtgcagcaagatgtcgcccgtggtggaaacgatggtgaaatcgaatcctgatacgcgttttatctttaaagagtttccgatcttttcatcccgctggccggtgtctggtttggcggcgagaatcggcgaacaggtgtggctgaacgatggcggggcaaagtatttggcctggcataatgccctgtacgccacgggtaaagtggagggacagctcaccgagcaggatgtttacgcgctggcgtcgcactatctcacccagccgcagattagggcggttaaaactgcccagcagagcggggcggtacatgatgcgctgctgagcaatcaggcgctggcgcagcatatgaacttttccggaaccccggcttttgtggtgatgccgcaggcagcggctccggatgccgggcgtatctcggcagtgccgggcagcacgtcgcaggatgcgttgcagatggcaattcagaaagctaaaggttaa

SEQ ID NO: 88742 - DNA, 699 bp, Enterobacter aerogenes
atgaatagacgacttttctactggccagggctctggctgctgcccgtagcaataagccatgcaggcgtggtgattggcggcacgcgctttatttatcacgccgagcggacgacgctgagcgttccgctgcgcaatacctcggatagtgactggctggtggacagccacgtactgagtggtggacgctggcccggcgccgatgatttgtcgcctcgaaaaccgccattcgtggtcacgccgccgctctttttattgcgcgcaggccaggagaacacactgcgtgtcgcatggagcggcgaggcgctggcgcgggaccgtgaaagcttgtttacgctgagcattgccgctattccatcgggaaaaaccggcgccaatagcgtgcagatggcatttcgctcggcgttaaaactgatttatcgacctgtggggctaatcggcgatccgcagcaggcctatcgtcatctggtctggaacttaacggcggatgggctgacggtacgtaattcaggaccctattacgtcaccctcttttcaatccgcgtcaacggtacgccgatcgacgctgccggtgtggtcgcgccgttttctacccgccgcacagagtggtgtcgacaaacgacgcgctgcgccgtgcgttggcaaagcctcaacgatgccgggggcgtaatgccgccggtcacggcaactgcgcaacggtga

SEQ ID NO: 88743 - DNA, 519 bp, Enterobacter aerogenes
atgattaaaaaactgtacctctgctgggggctggctctggcggcaagcggtgcgctggcccatgacggccgggtctacgtcaccggaaccattaccgacaacacctgcacgctgtcgccggattccgagaacattcaggtcgatatgggaaccgttagcaaccgccagttttatcaggcaggcgccggcgcggagtggcagcctttttcgatcacgctacaaaattgcggcagcaccgccagcggcgtaacggtgagctttagcggtaccagcgatccgcaagatggcgatttgttcgcggtgaataccggagcggataccgcaagcggtataggaattgcgctctatgacaagaataaacagcaaatcgcgccgggggcgcagagcgatgtgctggcgctaaccgcgggcgccgcgtccgaacgtttacagttttatgcccgctatgtggctgatggcgccccggtggcgccgggggctgccgatgcttccgcgactttcgtactgagttatgaatag

SEQ ID NO: 88744 - DNA, 537 bp, Enterobacter aerogenes
atgcgcctgattcgttacttcttcttattgatcctgctatgcggcaacggttgctatggcgacgatagcggttacaacctggaattcaccgggaccattgtggcgcaaacctgcgatatcgaaatttccagcctcagccagagtatcgatttaggtcagttctcagtggcagattttccctctaccggtacgacgacgaagttcaagccgttcaacatcaacctgaaaaactgctcgcgcggtattaccggcagcaaaatctggtttaccggtaccgccgacagcgacaatccggcgctgctggcattgagcgataccggcatgggtagcgaaaaaatgctggcaagcggcgttggcgtggagatccttgatgaggaccaggatgccgtcagcatcaataacaccagttcggtggtctacccgctgaaaacgggccgcaataccttatcgttctatatccgctacaaatctacccggccaaccgtgacctccggcaatgcgacggcggtgatgtatttcgacctgcaatatgaatag

SEQ ID NO: 88745 - DNA, 1008 bp, Enterobacter aerogenes
atgaagcctgtctcttttcttgttctgttaatggggctgctgctggcccgcggtagtctggcggccgtttgccagaacaccaatggctcgcccgcgacggtcgattatgacctgacgacgacgctaacggcggcgcaaaatcaggccggtaccaccacacaacttagtaaaaaccaggatgtgaacgtgcaggcggtttgtcccgccggctcttcggattccgggaggacgtatcgttcgtatgtcgcttcttcatcgatagtggaaaccaacggcgactggaaatatatgcagctggatggcgcctatcttgaaggagcaatgcgcattgaagattcggcggccggggaattttatccaccaatggattatgtctatatgggctatgacgccaacgttaacaacggctcgccttttccggtacatgattcgaatctggtattccagcttaaggttgtgaagccatttattggcacggtaaatatcgagccgaagaccatgtttaatgtctatgtcaccaccaccggggacgacccgctgagtaccgtggtatatagcattgtctacagcggcagcgtgaccgtgccgcaaagctgcgaaattaacgccgggcaaaccattcttgtggattttggctcgctgtacagcggcggtttcaatcgcgccggggaaaaaccaacgggtgtccgtaagaaaagattcaccgtgccggtgaagtgcagcggggtggattcgcaggtcaacttaagtctgcggttgatagccaccgccgatagccacttaagccaggctattgcctccgacaatcctgatgttggcgtggtggttgagagcagcgacggcgcggtattaacgccaaatgacgccagcagcgtcgagcctttcacgacggatgaaaacggacacgcgactatttccctacaggcgtatccagtcagtaccaccggccagacgccggcggagggcgccttcaccgcgctggctaacttacgggtggatttcgactaa

SEQ ID NO: 88746 - DNA, 2607 bp, Enterobacter aerogenes
gtgttgaaactcgatgtcgccgctcgccagttgacggtgggtagactgccggcgcttatcagcctggctctgatctcggcaagcgtatgcacgctgccgcgcagctgggctgaaaactattttaacccggcctttttatctgacgatccgtcgaagatcgctgacctttcgcattttgagggtaacggtcaggctccgggagtttatcgggttgatgtctatcttaatggcgcattgttggcgacgcgcgatattgcttttcgtgcgaaccagcaggccgccgatggctcgggccttcgcgcctgtctgacgcctgagatgctcaacggcatgaacgtgaatattagcgctttcccacaattggcgaaggccgctacgggcgactgcgtcgatcttgcggctacgatccctgccgcctccaccgcttttgattttagtcagcagcggctgaatatcagcattccgcaggcggcgctgaacagccgggcgcggggctatattccgccgcaaaactgggatgaaggtattaatgcgttgttgctcaactatacgtttaccggtgcgaatagccgggaccgtagcgctggcggtaccgatagcgatagctacttcctcggtctcaatagcggagtaaatcttggcgcctggcgtctacgtgattattcgacatggaactacaacagcgataatcagcaacagaaaagcgactggcagcacatcagcacctacgttgaacgcgatgtggcggcgctgaaaggcgaactgacggcgggcgacagctacaccccctcaggcgttttcgatagcctgccgtttcgcgggctacagttggcgtccgatgacaatatgctgccggacagcatgaagggcttcgcgccgactattcacggcatcgccaaaagcaacgcccaggtgacgattcggcagaatggctacactatagaccagcgctatgtaccgcctggcgcattcaccatcgacgatctctatccgacctcctccagcggcgatctcaacgtcgagatcaaggagtccgacggcagcatctccagctataacgtgccttatgccgccgtaccggttctgcaacgcgaggggcgggtgaaatatgccgccaccgcggcgacctatcgcggtgatagcagccaaaaacgcgaggtgagtttcggccaggcgaccctgatgtgggggttgccgcatggctttacgctgtacggcggaacgcagttttcctccgattaccgcgcgctggcgctgggcactggagctaacttcggcgactggggggcgatttccgtcgatcttacgcaagcctacagtacgctggcggatgagagcgaacatcaggggcaatcgctgcgctttttatatgccaaatccttaaacgacctgggcacccattttcaattgttggggtatcgctactcaacctctggtttttatacccttgatgataccgcgtggaagcggatgtcaggctataacgacccgcaggaggatgacggcgatcgcgatactggcgatgactacaacctgtattacaccaaacgcggcaaggtacagatcaacctctctcaacagttcggtcattttggctcactgtacgtcaccggtagccaacagagttattggcacaccgatgaaaccaataaattgctacaaattggctacagcgacacgctggctgggatctcgtggagcctgtcatatagcagtagccgcgcgcccggcgaggaggaacgcgaccaggcgctggcgctcaatctttcgctaccgctcagccagtggctttctcacggcgacgatattacccagcgtcgtcataacgtttatgcgacgttttccaccagtagcgatggacacggcggcgtgacgcaaaatagcggtatcagcggcacgttgttggatcaaaacaacctgagctatagcgtccagcagggctatcagaatcagggggttggcgcgagcggctccgccagcctcgaatacgacggggcaaagggcaacctgaatgtcggctacaacaacagcaaccatggtgattatcggcaactgaactatggcctcagcggcggcatggttgcgcatgctcatggtctgactctcagccagccgttgggtgacaccaatgttcttatcgccgtgccgggggcagggaatgtcaatatcgaagatcagccggggatccacaccgatggccgcggctacgcggtggtaccgtatgccactacttaccgccagaatcgcatggcgctggacgtcaactcgctaaaagacgatgtcgatatcgatgatgcggtgatcaatgtcgttcccacccaaggggcgttggtgctggccaactttaccgcccggatcggcgagcgcgcgctattgacgctaagccattacgggaaaccgctgccgtttggcgctacggtatccattgctggcgcggcggaagaaggcatcgttggcgacgatggcgaagtgtatctctcaggccttagcccgcagggcacgctgaaagcacaatgggggccgcagcctgaccaacaatgtctcactcattatcatctccctgacgttagccagcctttggtgcgtcagcatctggaatgtcgctaa

SEQ ID NO: 88747 - DNA, 720 bp, Enterobacter aerogenes
atgcatttcatctcctccctggttatcaaaagaatgagtacgcgaattaccccgattttatttttattagtactgctggcggcgctgggaatgactcagctggcccatgcgggtggtattgcgctgggttctacccgggttatttatccgcagggtgataagcaggtctctctgccggtgataaactcttccagcaataatgtatttttaattcagtcgtgggtggcgaatgccgatggcggcagaagcgccgattttgtcgttaccccgccgctgttcgtcattcagccggggaaagaaaatctgctgcgtattatgtacgttggcccctccctgccgacagatcgcgaaagcgttttttatctcaacagtaaagccattccctcggttaataaaagtaaactggcggcgaattcgctgcaaatcgccacgcaaagcgtcattaaactatttatccgccccaaacacttaccggttgcctcggttgacgctccggcaatgttgcgctgccagcgtgcaggcgaccgcctgactatcgtcaatccatctccctattatgtctcgctggttgatattcatgttggcgggcagaaattagccaattcaatggtgccgccgaaaagcgagataacgttgcacggcggagcagggcaagcgaccttccagtcaattaacgatttcggcgccaccacgccgctgcaaacctgtctgagtcattga

SEQ ID NO: 88748 - DNA, 543 bp, Enterobacter aerogenes
atgaaaaaacatcttttagtgatggtcatgactgccatgacggcgggcggtatgagctgcgcggcgaatgcggataccgcgacggtctccggcggcacggtgaattttaccggacaggttgtgaatgccgcatgctccgtttccgctgactctatcgatcaaaccgttaccctgagccaggttcgcaccagcaaactgacggcagccggaatggtagccaatcagaaagaagatttctcaatcaaactagaagattgcgataccaccgtcagccagaatgcggcggttatctttaatggtcagcaggacagttcacttgccggttcgctggcgaataccgcaggcgcaggctcggcgactaacgttgcgctgcagctgtacggcccggatggacaggttctgaacatcggcgacacctctggcacgatcaccctgattgatggtgaaaacaccgtaccgctgagcgttgattatgtcgcaaccggcgcggcgactgcaggtaacgtcgcagcgaccgcgaccttcagcatggtctattcctga

SEQ ID NO: 88749 - DNA, 693 bp, Enterobacter aerogenes
atgaaattaaatagtttcgaaaatgataatgagaatgccttgcactcatatattttctctcagcaggctaaaccccatgcagcgattgacgccttattttcagcgctcttgccctttggtaaatctttcgtcgtgcagtcgggtgaagaattttcactatacacagagcagagcagccgcattgtgttgcttgagtccggtatcttctcaatttgccgcagtgatcgaggcttgaacgtgctatcggttttcgccccgtcaattgctggactgatagatagctacggtgtgacatacgatgttcccacccgcccggagcattttttgattgctgaaacagaatgccgtggtcgtgcagtctcgttagcggattttattaaggtgacggatgagtgcaatctttggcacgacgtagctcgttttctcgcttatcgtctgatggtgatgaacgttcgtgaccgggagctggttggcgttgactcttatcttaaggttcgtgcgttattaatcgaaattgccgcctacaacgacgaatatcgccagagcattaatgttctgaactttattcaacgtcgtaccggaatatcgcggagtcgtaccatgaagcttctttctgaattgcgaaagggcggatatatcaatattgatggtggacgcctgttagggattaaaaaactgccactggcttactag

SEQ ID NO: 88750 - DNA, 3072 bp, Enterobacter aerogenes
atgaccattgcaattaaaaatagccagattgatgtgaatagctggtaccagaaagtcactttaaccttcacaaacgaaagtaaccgcccgctagatctgaacctggcgacaattagctttaccgcctccgggcatccggatccgtggggcaatacgggaggcacgctaaaaggagatcgttcgttaactttgcgtgacaccgcccagggaaccctggaattcaatgaaatcatcattaacaacagtagtgaactgctgctgcaggcaggggaaagcggtaccctgttttttagcctggctgccacccaggtaccggtaaaaatgtccacctttacgttaactctggctgacgataccgctgatgaagttgagccagaacctgaagtaccagcggatgacaccgctgatgaggttgaaccagaacctgaagtaccggcggatgacaccgctgatgaggttgaaccagaacctgaagtaccggcggatgataccgctgatgatattgagccagaacctgaagcgcccaccgatgatgcgatcaccggcgcgggactgaccctggtatccggggaggtgaaagcgtccagctggtaccaacgtattgccctgacgctgacgaatcactattcgcagtccgtcgatattaatcagttgaaattaggattcaccgcgacagcgcatcccgatccgtacagcccatttagcggcaccatgctggggaatcaggcggtaacgctggccagcgacggcggctggccgacagaaaaaaataccatcacaatcaataacgacggcgagtatctgttggcttccggtaaatcagcggtgctggagttttatctttcggccacgcaaacgcccgttgcgcttagcgatctgacggtgacgctggcccatgatcctggacgccagggacaaatcattgtgcaattcccggcgcaggcgcagagcacctcgctgaagccggagatcgaactgcagtatccggatggccgccagcagcgctttgccggcgaatggggcgcttcgctgaccattggcgatctgagcgcaggaagctacggtattacggtactggaattgtgtaacgacgagatgagaatttcacccgttgccgaaaactatacattgatactctcgtccggtaacgccgttgaacggtgcccgattgcttaccagccagcggtgctctttgccgcgatcgagctgctgcttgcggatgatgaactggaaggcgcggaagtcgtcgttgagctgtggtcggaagcaggtgtacgcgaacgtaccctgacgctgatggcgaaccaaccgcagcgcgtcactcggctattagcaaatcatcaatatgctatttgcctgcagccgacgacgatgaacaaccagttgctgacaacgtctgcgcagcctgcgaccttcgtgccgaaggtaggcacgacggctcaggcagatgttgcgctacaaaaaacgcccgttgcgagcgacaactttgttgaggtcgcggtgacggtattaggcttaccgcagggcgcagctgctcaacgctatcgtttctgctgcggcagctaccagtacagtttcgtgctggcaagcgatactcgtcagcagaaattaccgctgcgtttatctgccggggaatatagcgtgcaggtcgcggatgtgtatatcgccggtacgccgtggcgttgcgacgtcagcgcgccgttgcgtttgctgcaaagcgttaataacgtcacgcttgagtttatccagggcgttccgttgcaggtaaaaggttggccgaattatctggcgcacggcggcgtgacggtgaatgcggcggagactgtcgatctttatcgcaatgtcccgttcagcgcgctgtttaaatatgatggttttgatggcggcggcgatccgattccggcggcggaagtggacactaacggcgatggcttccttgattatgcctcgctaccgatccataaaaccgtgcctttggttcgcgagatcgaagccgatgccggccgcgcggtgatgccggtgatggtggtctataccgccaatgctagcggcggcagcgcggtatcggacctgcaggacgaacagcgtctacgcaatcactttgggagcttcattacccagtgtctggcggcgcaatcctggaaagatgaccagcatccggttccggcaacctttgtcctcaacccggacttcctgggcgccatgcagcaggagccttatggctataccgcgctgcgtaaagctaatagcgtacaggtcaatgtgcaactggcggcggcgattaatgcgctcccttcgatgccaggtttcagcgcgccgacgctgccgacctttagcaacgatttgtacggctacgtgcaggcgattaactatatcgttcgccagttcgcaccggacatcgtttttggctggcagaccaacgtttgggcgacgggcacggcagattggctgctgcgcgccaatgccgcgccgcgggaacaaggggcggcgatcgctgacttcattaatgaactgggtgtttacagcggcgactatgcgccagattttatcgtatttgataaattcgaacgcgactgcttcagcccggatgccttagcccactacggctggaacgctacctgctggatgaactatctgggcatggtgaaggagaccgccagagcgttgcagaaaccggcgatgttgtggcagatccccggcggccatatgccgacggttgcggaagggaccagtaaaatcgctgcggcgcattttgcgtcaggcggtactttcttcatgggggattcgcggattggcagcgatatcgacaccattaccccgacgctgttaaataccgcggtgaacagcacgacctatggcgtcgcgacggtgggtgattttctgcgccgcgatggcggatacgattggagtcagatgcaggcgttaaatctgccggactataacgtctttgccgtgctgtggggcggcggttcgaccgtcagtattaccactattcattccaacggtgaagatggcggttggttggcggagaaaatggcggagtactacgcggcgccccgctactttagttaa

SEQ ID NO: 88751 - DNA, 2118 bp, Enterobacter aerogenes
atggctaccagcaaactgattaaaggcgatactcttaccgaaaccagcaacgccgctgatggttttaacccagcaactgaagttagcaactatagctatacatcagctcgtgtcgcaaagccggtctataacaaatataaagcagcaaccactaagccgaaggtatttggctattataccgactggtctcagtatgatggtcgcctgcaaggggacgattctaaagataaccgcggtcgcggctacgacctgaccaatatctcaccgactgcttacgataaaattattttcggcttcgttggcgtgaccggtttccataaaaatgatggccaatatcgtgacgtcgtggctgaaggcgcggaacagtgcggtaaagttaagtacgaaccgactttccttgatccatggggtgatttccagtcttacgtcaacgttggacatagcgttagcggctgggatgttgatccgaagaccgtgactcaagaaaattgtaaaggtctgcttggcggtctgcgcgatctgcaggcgaaagccaaacagcagggccataacctggtgctgtccatgagcatcggcggctggaccatgagtaacggcttccatgaaaccgcagcgtctgattccgcacgtaaaacctttgctaaaggcgtggtgaaactgttcaaacagttcccgatgttcagcgaagtggatatcgattgggaatacccgaacgccgaaggcgctggcaacccttgcggcccggaagatggtgaaaactatgcgttgcttattggcgaactgcgtaagcaactggattccgccagcctgagcaatgtgaaaatctccatcgccagctccgcggtcgtgaagacctttgattactccaacgtgaaagcgctgattaaagcaggtctgtacggcatcaacctgatgacctatgacttcttcggtaccccgtgggcggaaagcgttgctcatcacactaacctgaatgcgctggaagagggcggttggggcgtcaacactatcgtggaacatctgctgtctgaaggtttccctgctgaaaatatcaacattggttatgccggctatacccgtaatggccgtaacgttgagctggagtcgctgtctccgctgaaaggcacctataacccgggtaacggcgataccaccggtactttcgaatccggcactaatgaatggtatgacgtgatctacaactacctggatctggaaaaccagaaaggccgtaacggtttcaacgtctacaccgaccaggtcgctgatgctgattatctgtataacccggaatccaagctgttcatgtctctggatactccacgttcagtaaaagcgaagggcgaatatgctgcaagcctgggtctgggtggtatgtttacctggactatcgatcaggacaatggcgtgttgctgaacgcggctcgtgaaggtctgggctatgaaattgaatctgaagtcatcgatatggaaccgttctacttcgaaggcatcaacgtagaaaaagatgaatccgaagaagacgataaggcaacagacgtcaatcatgcgccaaaagcggctatcgagctgctggttgtcggcggttctaccgtccagctgtccggcgccggttcttccgatgaagatgatgatgaactgagctacagctggggcgtaccatctgaaattaccgtcgcggataaaactgcggaagtgattgagtttgtggtgcctgaagtgagcgcgaaaacggccttccagttcactctgtttgtgcgtgactgctacaacgaaccttccactcagcaacgttttgtgctgactgcggttccagcattagctgctcagggcgaacctgaaccggctgatgaagaagaagatgaaaccgacattattccggttccagacgaagatactacaccggctgaagatgacgcctctgccgatgatgcggcagaccaggatgcgccacacgcgctgtgggatgctaacaccgtatacggcgcaagctggggtaccttcgaaaccgtgagctggaaaggtcacaactaccaggtgaaatggtggtcccagggcgaccagcctgacctgaactgcggtcagagcggcgcatggactgacttaggcgcttactaa

SEQ ID NO: 88752 - DNA, 444 bp, Enterobacter aerogenes
atgaaaacttatctcatcaataacaactgcatctacaatgaacagaaatatgaactaagaacgagctcaaactcgcaagttattagaatgacagcaatgcgttctaaatgtcttagcttcattattgaaaacgctcatctggagattatcgaacgccagaaaatcactaatgagctatggggtagcagaagtcattttgtgaatgatgccaatctaacgcagatactgtatttaatcagacgagacctgaaggcgttgggcataaacgatctcttcattaccatcccgcgccagggattacaggtcaataaggatatcgccattgagaaagtcgaaccaaaaaaaccaaaagccaggaagcagtttttccgtaaaacgctggcagccctgaccaccgtcttttccgtcacgctaggtacaatgatgtacatgcatattcattaa

SEQ ID NO: 88753 - DNA, 534 bp, Enterobacter aerogenes
atgaatccaattattgatggaattctgggactggaaggcggttacagcgccaacccgaaggataaaggcggcgagactaactggggtatcacagaagcaacggcgcgagcgcatggttaccaggggaaaatgagtgaactttctcacaatgaagcctatgcaatcctggaaacggattactggatcaaacccggctttgaacaagtatcgcaactttcctgggcggtggcatttgaactctgcgacgccgccgtgaatattggtccccatcacccttgcacgtggctacagcgctggcttaacgtgatgaaccgcgagcagcagtattatccggatataaaagcagatggcagcatcggcccgcaaaccctacatgcgctaaattcctatttatcgcaacgaggtaaagaaggagaagcggtgttagtgaaagcgctcaactgtagccagggcgcttattatctggatatctgcgaaaatcgccgacaaaatgaagagttcatttacggctggattaaaaaccgagtgacatag

SEQ ID NO: 88754 - DNA, 345 bp, Enterobacter aerogenes
atgtctattcctaatcatttagagacaacggaagttgtattactggaagtagaaatacttctgaccattatttctatcggcgcctggggcgggttcgttagtttcctgcttcgcaggaataaagaagaggctggcgaagcccatcagggaattatgacctgcctgacgcaggtagtcatatcttgttttaccagttttctccttagcgctattgctatcgaaaaagggtttagctttaatatggtgctgttagccgctggtttaggcggtgtatttgccggcccgattttaaaaatcctcggagaaaaagttaaaagtgctgttggcggttcgaaactcaaatag

SEQ ID NO: 88755 - DNA, 945 bp, Enterobacter aerogenes
atgggatcgaaaggtgccaataagggctttgattataatttaatcaaggttcttgacgctgtcatttcggcaggtaatgccgtgaaggcggcgaaaaaattggctatcactcccgcagcggtctctctggcattaagacgtctgcaaaacttctatgagcaagagctgtttgtcagaagcaaagatggtttactgccaacggcgaaagcgatcgaaatccaccatagttttcgccaggctatgtcgcttgtcgataatacctttcagactgcaagcaaggccgatgatgcccggattacgatccttggaagtgacttcatcgaaagctattacctttcccaattgtacggtagcgcgcttttcgagcagagcgttatcaaccatttttcgtcccgcaacattagccgcgataaagctaaagagcttttactgacggcacaatgtgatttatcgatcggttctgaaccgttggttgaggccggactcgataatcaagttattgatagctttagaaactttgtctgtatttgcgccaaaggccatttattcagcgaactatcgcagctttctttgcatcagttctactcttcccgccatgccatgtatcaacccggcatttcctctccttccatcatcactgataacggattatttaaagatgatgtttattaccgtggttcccgagctataggctattgcagcgactccatcactggagtggttagcatggtggaaagaaccacattaattgcgctattgcctttaaaacttgcgctgttttataaaaatcagcgtaaatacgatataaatttcattcaacctccacctgaattaatgtttaagtccgtgcaggtttatgcttcatggaacaaaaacagtagaaatatatcagcgataaatgaaacggtttccatgttgcatacgctgtcatcattccgacggtaa

SEQ ID NO: 88756 - DNA, 1131 bp, Enterobacter aerogenes
atggcaaagcaagattattacgagattttaggcgtttccaaaacagcggaagagcgtgaaatcaaaaaggcgtacaagcgcctggccatgaaataccacccggaccgtaatcagggtgacaaagaggccgaagccaaatttaaagaaatcaaagaagcgtatgaagtcctgactgatgcccagaagcgtgcagcctacgatcagtacggccacgccgcgtttgaacaaggcggcatgggcggcggcggctttggcggcggcgcggatttcagcgatatctttggcgatgtgttcggcgatattttcggcggcggtcgtggtcgtcagcgcgcggcgcgcggcgcagatctacgttacaacatggaattgacgctggaagaagcggtccgtggcgtcaccaaggaaatccgcatccctacgctggaagagtgcgatgtctgccacggcagcggtgcgaaatcaggtactcagccgcagacctgtccaacctgtcacggttccggtcaggtccagatgcgtcagggcttctttgctgttcagcaaacctgtccgcactgtcagggacgcggtacgctgattaaagatccgtgcaataaatgccacggtcacggtcgcgttgaaaaaaccaaaaccttgtcggtgaaaatcccggctggcgtcgacaccggcgatcgcattcgtctggctggcgaaggcgaagcgggcgagcatggcgctccgtcgggcgatctgtacgttcaggttcaggtcaaacagcacgcgatcttcgagcgtgaggggaataatctgtactgcgaagtaccgatcaacttcaccatggctgcgcttggcggcgagattgaagtaccgacgctggatggccgcgttaacctgaaagttcctggcgaaacgcaaaccggcaaactgttccgcatgcgcggcaagggcgttaaatccgttcgcggcggtgctcagggcgatctgctgtgtcgcgtggtggtagaaacgccagtgggcctgaatgacaagcagaagcaattgcttaaagagttgcaggaaacttttggcggccctacgggggaaaaaaatagcccgcgttccaaaagcttcttcgatggcgtgaaaaaattctttgatgatttaacgcgttaa

SEQ ID NO: 88757 - DNA, 1917 bp, Enterobacter aerogenes
atgggtaaaattattggtatcgacctgggtactaccaactcttgtgtagcgattatggatggcactaccgctcgcgtgctggagaacgccgaaggcgatcgcaccacgccttctattattgcctatacccaggatggtgaaactctggttggtcagccggctaaacgtcaggcagtgacaaacccgcaaaacaccctgtttgcgattaaacgcctgattggtcgccgcttccaggatgaagaagttcagcgtgacgtttccatcatgccgtacaaaatcgttgccgcagataatggcgacgcctggcttgatgtgaaaggcaccaaaaccgcgccgccgcagatttctgctgaagtgctgaaaaaaatgaagaaaaccgctgaagattatctgggtgagccggtaactgaagctgttatcaccgtacctgcgtacttcaacgatgctcagcgtcaggcaaccaaagatgccggtcgtatcgcgggtctggaagtcaaacgtatcatcaacgaaccgactgccgctgcgctggcttacggtctggataaagaagttggcaaccgcactatcgcggtatacgacctcggtggtggtaccttcgatatctctattatcgaaatcgacgaagttgacggcgaaaaaaccttcgaagttctggcaaccaacggtgatacccacctgggtggtgaagacttcgatactcgtctgatcaactacctcgttgacgagtttaagaaagagcagggtattgacctgcgcaacgacccgctggcgatgcagcgtctgaaagaagccgcagaaaaagcgaaaattgagctgtcttccgctcagcagaccgacgttaacctgccgtatatcaccgcagacgcgaccggtccgaaacacatgaacatcaaagtgactcgcgcgaaactggaaagcctggttgaagatctggttaaccgttccatcgagccgctgaaagttgccctgcaggatgccggtctgtccgtttccgatatcaacgacgtgatcctcgttggtggtcagactcgtatgccgatggtgcagaagaaagttgctgagttctttggtaaagaaccgcgtaaagacgttaacccggatgaagctgtggctatcggcgcagccgttcagggtggtgtactgactggtgaagttaaagacgttctgctgctggacgttaccccgctgtcgctgggtatcgaaaccatgggcggcgtgatgaccgcgctcatcagcaaaaacaccacgatcccgaccaagcacagccaggtgttctctactgcggaagacaaccagtccgcggtaaccatccatgtgctgcagggtgagcgtaaacgcgcttccgataacaaatctctgggtcagttcaacctggatggtattaacccagcaccgcgcggtatgccgcagatcgaagtgaccttcgatatcgatgctgacggtatcctgcacgtttccgctaaagataaaaacagcggtaaagagcagaagatcaccatcaaggcttcttccggtctgaatgaagaagaaattcagaaaatggttcgcgaagcggaagctaacgctgaatctgaccgtaagttcgaagagctggttcagacccgtaaccagggagaccatctgctgcacagcacccgtaagcaggttgaagaagcaggcgacaaactgccggctgacgacaaaactgcaatcgagtctgcgctgaccgcactggaaacttctctgaaaggtgaagacaaagcggacatcgaagcgaagatgcaggcgctggcccaggcttcccagaagctgatggaaatcgctcagcagcagcacgctcagcagcaggctggcggcgctgacgctcaagaaagcagcgcgaaggatgacgatgttgtcgacgctgagttcgaagaagtgaaagacaaaaaataa

SEQ ID NO: 88758 - DNA, 567 bp, Enterobacter aerogenes
atgggcaacactaagttggctaatccggcaccgctgggccttatgggctttggcatgaccactattctgcttaacctggcaaatagcggccttttcgcattcgatgtagctatcctggcgatgggcattttttacggcggcattgcgcaaatttttgccggcctgctcgagtataaaaaaggcaacacctttggtttaaccgcttttacgtcctacggctccttctggctgacgttggtcgcgatcctcctgatgccgaaaatgggcctggctgatgcgccgaacgcgcacttcctgggcatgtatctcggcctgtggggtatctttacgttgttcatgttcttcggcacgctgaaagccgcgcgcatgctgcagttcgtcttccttagcctgacggtactgttcgcgctgctggcgattggtcacctggtcgataacgaaggcattgttaaaattgccggttgggtcggcctggtatgcggcgcgagcgctatttacctggcgatgggtgaagtgttgaacgagcagttcggccgcaccgttctgccgattggcgagccacgctaa

SEQ ID NO: 88759 - DNA, 1305 bp, Enterobacter aerogenes
atgtcacaacacacccgagcactgaatcgacaggattataaaactctgacgctggccgccctcggcggggcgctggagttttatgacttcattatctttgtcttcttcgccgccgtcgtcggcgaactgttcttcccggctgatattccggaatggctacgtcaggtacagaccttcggtatattcgccgcgggttatctggcgcgccctcttggcggcattatcatggcccactttggcgacctggtcggtcgcaaaaaaatgttcaccctcagcattctgctcatggcgctgccgacgctggcgatcggcctgctgccgacttatgcctcaatgggcatcgttgcgccgctgctattactgctcatgcgtattttacaaggggcggcgattggcggcgaagtgccgggcgcctgggtcttcgtggccgaacatgtcccggaaaaacgcatcggtatcgcctgcggcaccctgaccgcgggattgaccgtcggtatcctgttggggtcggtggtggcgacgcttatcaacaccagcatgacgccgcaaggtatccacgacggcggctggcgtattcctttcctgctgggcggcgtttttggcctggtggcgatgtacctgcgtcgttggctgcaggagacgccgatatttctggagatgcagaagcgcaaagcgttagcgcaggagttgccggtgaaggcggtggcgcttaagcaccagaaggccgtcatcgtttcgatgctgctcacctggctgctgtccgccggggtggtggtggtgatcctgatgtcgccggtctggctgcaaaaacattatggctttgcgccggcgattaccctgcaggccaatagcatcgccacgattatgctgtgcatcggctgtctactcgccggtctggcggcagaccgtttcggcgccagccgcacttttatcgtcggcagcctgttgttggcggccgccagttgggccttttaccacctttccggcgccagcccgcagcggctgtttctgctgtatgggacggtggggctgtgcgtcggcgtggtgggggcggtaccttacgtgatggtgcgcgctttcccggcggaagtgcgttttaccggcatctcgttttcctacaacctgtcgtacgccattttcggcggcctgacgccgatcgccgttacgatgctgatgggggtttcgccgatggcgccggcctggtacgtactggcgctgtcgctgatggggctggggttaggtatctggctgcgtcaggggttgacgacgcaggcggttttaccgcaaggagaactgcagcgttaa

SEQ ID NO: 88760 - DNA, 588 bp, Enterobacter aerogenes
atgaataaattacgcatcggcttagtttctatttctgaccgcgcctccagcggcgtttaccaggacaaaggtattcctgcgttggaagagtggctggcgcgtgcgctgacaacgccctttgaactgcagactcgcctgatccctgatgaacagcccatcattgaacaaacgctgtgcgagctggttgacgagatgggctgtcatctggtgttgaccaccggcggcaccggcccggcgcgccgtgatgtgacgccggacgcaactttagcgattgccgatcgcgtcatgcccggtttcggcgagcaaatgcgccaggttagcctacactttgtgccgacggctatcctctcccggcaggttggcgtcatccgcaagcaggcgctgatcctcaacctgcccggccagccgaaagcgattcaggagaccctcgaaggggtcaaagacgcggacggtaaggtgctggtacatggtgtattcgcaagtgtaccttattgtgtacagttgcttgaggggccgtatgtggagacggaagcgagcgttgtagcagcttttcgcccgaaaagcgcgcgacgtgaaactttatcctga

SEQ ID NO: 88761 - DNA, 954 bp, Enterobacter aerogenes
atgacggataaattgacttctctgcgtcagtacaccactgtcgtagctgacaccggagatatcgcggcaatgaagctgtatcagcctcaggatgccaccaccaacccttctttgatcctcggcgcggctcagatccctgagtaccgtaagctgattgacgacgctgttgcctgggctcgcggccagagcagcgatcgcgcgcagcagattatcgatgcttccgacaaactggcggtgaacatcggtctcgaaatccttaaactgatcccgggccgtatttctaccgaagttgatgcccgtctgtcctacgacaccgacgcctctatcgcgaaagcgaaacgcctgatcaaactgtataacgatgccggtatcggcaacgatcgtatcctgatcaaactggcttccacctggcagggcattcgcgccgctgagcagctggaaaaagaaggcatcaactgtaacctgaccctgctgttctccttcgctcaggctcgcgcttgcgccgaagcgggcgtcttcctgatttctccgttcgttggccgtatcctcgactggtacaaagcgaacacggataagaaagagtacgcgccggcagaagatccgggcgtggtttccgttagcgaaatctacgagtactacaagcagcacggctatgaaaccgtcgtgatgggcgcaagcttccgtaacgttggcgaaatccttgagctggccggttgcgaccgtctgaccatcgcccctgcgctgctgaaagagctggcggaaagcgaaggcgctgtcgaacgtaaactggcgttcagcggcgaagtgaaagcgcgtccggaacgcattactgaatcccagttcctgtggcagcacaaccaggatccgatggcggtagacaaactggcggaaggtatccgtaagtttgccatcgaccaggaaaaactggaaaaaatgatcggcgacctgctgtaa

SEQ ID NO: 88762 - DNA, 1431 bp, Enterobacter aerogenes
atgcctgattttctctcgtttatcaatgaaatactctggggctcggtaatgatttacctgttactgggcgccggtatttggttcacctggcgaacggagtttattcagttccgttatattcgccaatttggcaaaagtcttaaaaaaagtcttcgcccgcagcccggcggattaacgtcttttcaggcgctgtgcaccagcctggcggcgcgcgtcggcagcggtaatctggcgggggtggcattagcgattgccgccggcggccccggcgccgtgttctggatgtgggtctccgcgctactcggcatggccagcagcttcgccgaatgttctcttgcccaactgtacaaagagcgcgatggcgaaggccagtttcgcggcggcccggcgtggtatatggcccgcggcctcgagatgcgctggatgggcgtggtcttctcgattctgctcctgctggcctacggggtgatttttaataccgtgcaggccaactcggtggcgcacgccatggcctatgccttcgatttgccgatggtcgccgtcggcgccgcgctggctgccgcaacgctgttgattatcgtccgcggattacgcggcgtggcgcgattgatgcagtggtttgtgccgcttatggctctgatatgggtcggtgccagcctgttgattggcctctggcacttcgccgccctgccggcggtttttgaaaccatcttccgctgcgcttttggctggcaggaagcggcggcgggcgcggtgggttataccatcagccaggcgcttaccggcggtttccagcgcgggatgttttccaacgaagcaggcatgggttcaacgccaaatgctgccgctgccgctgcatcatggcctccgcatcccgcggcgcagggcatcgtacagatgattggcgtctttattgataccattgttatctgtaccgccagcgcggtcattatcatgctggcgccgcgcgaaaaccgcgacagtgcggtcagcggtattcaaaccatgcagcacgcgatgggcgatcttattggcagttggggaccgggattggtggctgctgtgctactgttcttcgcttttagttcgattgtcgccaattatatttatgccgaaaacaatctgatcttcctgcgtctcaataagccgctacatatctggacgctccgggttatcaccgtgttgatggtactgacaggcaccctggtgagtcttccggtggtctggcaactggcggatattattatggcgctaatggcgatcaccaacttaacggcgattttgctgctgtcgccaacggttcggatcctcgccagcgattatctgcgccagcgcaaactcggcgtgcaaccggtcttcgaccccgctcgctatccggaaattcagcaacatctggcgcccggcgcctgggatgagataccgcgtgaatag

SEQ ID NO: 88763 - DNA, 774 bp, Enterobacter aerogenes
atgctgattctgatttcacctgctaaaacgctcgattatcaaagcccgctggcaacgacgcgctatacccagcccgaactcctggagcattctcaacagcttatcggtatcgcccgtaagctgacagcgccgcaaatcggtaagctgatgagcatcagcgataagctggccgatctcaacgccacccgttttcacgactggcatccggactttaccccgcagaatgcccgtcaggcgatactggcgttcaaaggcgacgtttataccggtctgcaggccgaaacctttagcgaagcggatttcgattttgcccagcagcatctgcgcatgctttccggcctttacggcgtattacgcccgttggatctgatgcagccctaccgtctggagatgggtattaagcttgaaaatccgcagggcaaagatttgtatcatttctggggcgatatcatcaccgataagctcaatcaggcgctgcaggcccagggcgacgatatcgtcatcaacctggcgtccgatgagtattttaaatcggtcaaaccgaaaaaattgcagggacagttgattaagccggtgttcctcgatgagaaaaacggtaaattcaaggtgatcagcttctatgccaaaaaagcgcgcggtctgatgagccgctacatcattgaaaaccgtttaacccgtccggaacagctgcaggcgtttaatagcgaaggctatttctttgatggggaagcttcggagaaaggcgaactggtgtttaagcgccacgagcagtaa

SEQ ID NO: 88764 - DNA, 1281 bp, Enterobacter aerogenes
atgaaactgtataacttaaaagatcataacgaacaggtcagctttgcgcaggccgtgacgcaagggcttggcaaacaacaggggctgttctttccgcacgatttgccagaattcaatctgaccgaaatcgacgaaatgctggagcaggatttcgtgacccgcagcgcgaaaatcctgtcggcctttattggcgatgagatcccgcagaatgaactgcaggcccgcgtagcttcggcgttcgccttcccggcgccggtcactcaagtacaggatgatgtcggctgcctggagctgttccacggcccgaccctggcgtttaaagattttggcggccgttttatggcccagatgctgacgcatatcgcaggcgataagccggtgacgatcctgaccgcgacctccggcgacaccggcgcggccgtggcgcatgccttctacggcctgccgaacgtcaaagtagttatcctctatccgcgcggtaagattagcccgctgcaggagaagctgttctgcaccctgggcggcaacatcgaaaccgtggcgattgacggtgatttcgacgcctgtcaggcgctggttaagcaggcgtttgacgatgaagagctgaaggtcgcgcttggcctcaactccgccaactctattaatatcagtcgtctgctggcgcagatctgctactacttcgaggcggtcgcgcagctgccgcaggaggcccgtaaccagctggtggtgtcggtgccaagcggcaacttcggcgatctcaccgccggcctgctggcgaaatcgctggggctgccgattaagcgttttattgccgctaccaacgccaacgataccgtgccgcgcttcctgcaggatggcaactgggcgccgaaggcgacgcaggcgaccctgtctaacgccatggacgtcagccaaccgaacaactggccgcgcgtggaagagctgttccgccgcaaaatctggcgtcttaatgagctgggatacgccgcggttgatgatgaaaccaccaaagcaaccatgcgtgaactgaagtccatcggctacacctctgaaccgcatgcggcgattgcttatcgcgcgctgcgcgaccaattgcaaccgggcgagtacgggttattcctcggtaccgcgcatccggcgaaattcaaagagagcgtagaagagattctgcaggagacgctgccgctgccgaaagaactggctgaccgcgccgacctgccgctgctgtcgcataatctgccggctgatttcgccgcgctgcgtaagctgatgatgggctaa

SEQ ID NO: 88765 - DNA, 930 bp, Enterobacter aerogenes
atggtcaaagtatacgccccggcttccagtgccaatatgagcgtcgggtttgatgtgctgggggccgcggtgacgccggtcgacggcacgttgctgggtgataacgtctcggtagaggcggcggcggagtttagcctgcgtaacgtaggccgctttgccggcaaattaccgtcggcgccgcaggaaaatatcgtttatcaatgctgggaagccttttgccgcgagatcggtaagacggttccggtggcgatgaccctggaaaagaatatgccgattggctcgggccttggctccagcgcctgttcggtggtcgccgcgctggtggcgatgaacgaacactgcggcaagccgctgaatgaaaaccggatgctggcgctgatgggcgagatggaagggcgcatctccggcagcgttcactatgataacgtggcgccatgctatcttggcggtatgcagctgatgattgaagagcacggcatcatcagccagcagatcccgggttttgatgaatggttgtgggtgctggcctatccgggcattaaggtctctaccgccgaagcgcgcgcgattcttccggcgcagtatcgtcgtcaggattgcatcgcccatggtcgccatctggcagggtttattcacgcctgctatagccgtcagccgcagttggcggcaaagttaatgaaagatgttattgccgaaccgtaccgcaccaaactgctgccgggcttcagcgaagcgcgtcaggcggcgatggaaatcggcgcgcaggcttgcggtatttccggctccggcccgacgctgttcgcgttgtgcgataaaccggacaccgcgcagcgcgtcgccgactggctggccgcgcattatctgcaaaatcaggaaggcttcgttcatatttgccggctggacacggcgggcgctcgagtagtgggataa

SEQ ID NO: 88766 - DNA, 2463 bp, Enterobacter aerogenes
atgcgagtgttgaagttcggcggtacatcagtggcaaatgcagaacgctttctgcgagttgccgatattctggagagcaatgccaggcaggggcaggttgcgaccgtgctgtctgccccggcgaaaattactaaccatctggtcgcgatgattgaaaaaactatcagcggccaggacgctctgaccaatatcgccgatgccgaacgtatctttgccgacctgctgcaggggctggccgacatgcagccgggcttcccgctcgcacagctgaaaaccttcgttgatcaagagtttgcgcagattaaacacgtcctgcacggtatcagcctgctggggcagtgcccggacggtgttaacgcctcgttgatctgtcgcggtgaaaagctctctatcgctattatggcggcgctactggaagcgcgcggtcataaagtcagcgtgattaacccggtcgaaaaactgctggctgtcggccactaccttgaatccactgtcgatattactgaatccactcgccgtatcgccgccagccaaatcccggcagaccacatggtgctgatggccggttttaccgccggcaatgaaaagggtgaactggttgtgctggggcgtaatggctctgactattccgcagccgtgctggccgcctgtatgcgtgccgactgctgcgaaatctggaccgatgtcgatggcgtttatacctgcgatccgcgtcaggtaccggatgcgcgcctgttgaaatccatgtcttatcaggaagcaatggagctttcctattttggcgctaaggtgctgcacccgcgcaccatcgcgcccatcgcccagttccagatcccatgcctgattaaaaataccggtaatccgcaggcgccgggaacgcttatcggcgccagccttgatgaagacggcctgccggtaaaagggatctcgaatctcaacaatatggcgatgttcaacgtttccgggccaggaatgaagggcatggttggcatggcggcgcgcgtctttgccaccatgtcccgcgccggtatctctgtggtgctgattacgcaatcctcttcggaatacagcatcagcttctgcgtgccgcaaagcgactgcgctcgcgcgaagcgggtgatggaagatgaattttatctcgaattgaaagaaggtctgctggagccgttgtcaatcatggagcgcctggcaatcatttccgtcgtaggtgatgggatgcgtacgctgcgcggtatctcggcgaaattcttcgccgcgctggcgcgcgccaatattaatatcgtggcgattgcccagggctcttccgagcgttcaatttcggtagtcgtcagcaatgatgatgcgactaccggcgtgcgcgtcacgcatcagatgctgtttaacactgaccaggtcatcgaagtctttgtgattggcgtcggcggcgtcggcggcgcgttaatcgaacagattaaacgccagcagagctggttgaagggcaagcatatcgatctgcgcgtatgcggcgtcgccaattcgcaggcgctgctgaccaacgtccatggtttgaatctggaaaactggcgtggcgaactcgcggaagcgaaagaaccctttaatctgggccgtttaatccgcctggtgaaggagtatcacctgctgaacccggttatcgttgactgtacctccagccaggcggtagccgaccagtacgctgacttcctgcgtgaaggtttccacgtggtgacgccgaataaaaaggccaacacctcttcactggattactatcaccagttacgccacgccgccagcagctcgcggcgcaaattcctctacgacaccaacgtcggcgcgggtcttccggtcattgaaaacctgcagaacctgctgaatgccggcgatgaactgctgcacttctccgggatcctgtctggttcgctttcattcatttttggtaagctggatgagggtatgagcctctcggaagccactaaactggcgcgtgagatgggctataccgaaccggatccgcgcgacgatctttccggcgtggatgtggcgcgcaagctgctgatccttgcccgcgaaaccgggcgcgagctggagctctcggatattatcgttgagcctgcgctgcctgccgattttgatgccagcggcgatgtcgaaagctttatggcgcgcctgccgacgcttgacgatcaattcgccgcgcgggttgctaaagcgcgcgacgagggtaaagttttacgttacgttggcaatattgaagaagatggcgtctgccgggtgaaaatcgccgaagtggacggtaacgatccgctgtataaggtgaagaacggcgagaacgcgctggcgttttacagccactattatcagccgctgccgctggtgctgcgcggctatggcgcgggtaacgacgtaaccgcggctggtgtgttcgccgacctgctgcgtaccctgtcatggaagttaggagtttaa

SEQ ID NO: 88767 - DNA, 687 bp, Enterobacter aerogenes
atgcgtttatcaattattttggtggcgcccgccagggcggagaacgtgggcgcggcggcgcgagcgatgaaaaccatgggattcagcgaattgcggattgtcgatagcgaagcgcatcagcagcccgccgcgcgctgggtggcgcatggttcgggagatattttagataatataaaaacctacccgacgcttgagcaggccctgcacgatgtcgactttaccgtcgccactaccgcccgcagtcgcgcgcgttttcactactacgccacgccgcagcagttgctaccgctgctggaagaaaaagcacaatggatgaaacatacggcgctggtctttggccgtgaagattccggattaactaatgatgaactggcgctggccgatgtgcttaccggcgtgccgatggtcgccgattatccctccttgaatcttgggcaatcggtgatggtgtattgctatcagctgagctcgctgcagcagcagactgcggttcagcagcctgaaaccgacgaaaaacaactgcaggcgcttcgtcagcgggcgctttcactacttggacggttgggggtcgatgacgacatgaaactggccgactggctacaacagcgaatcggcctgttacagcagcgcgacaccgccatgctgcatcgtttgttgcatgatattgaaaaaagtctcccggaataa

SEQ ID NO: 88768 - DNA, 717 bp, Enterobacter aerogenes
atgcagaccccgcacattcttatcgttgaagacgagttggtaacacgcaacacgttaaaaagtattttcgaagcagaaggttatgatgtattcgaagcgaccgatggcgcggaaatgcatcagatcctgtctgaaaatgatatcaacctggtgatcatggatatcaacctgccaggtaaaaatggtcttctgctggcgcgtgaactgcgtgagcaggctgacgtcgcgctgatgttccttaccggccgcgacaacgaagttgataaaattcttggcctcgaaatcggcgccgatgactatatcactaaaccgtttaacccgcgtgaactgactatccgcgcgcgcaacctgctctcccgtaccatgaacctcggtaccgtgagcgaagagcgtcgcagcgttgagagctacaagttcaacggttgggaattggatatcaacagccgttcgttggtgagcccaaacggcgagcagtataagctgccgcgcagtgaattccgcgcgatgctgcacttctgcgaaaacccgggcaaaatccagtcacgcgcagagctgctaaagaaaatgaccggtcgcgagcttaagccgcatgaccgtaccgtggacgtgaccattcgtcgcatccgtaagcatttcgaatccacgccggataccccggaaatcatcgccactattcacggtgaaggttaccgcttctgtggcgatctgcaggaataa

SEQ ID NO: 88769 - DNA, 1356 bp, Enterobacter aerogenes
atgatgaaatcaccgttgttctggaaaattagtacgttgttgggctgtattttgctgttgtccgtgccgctgatgatggtcagagcgcttattgtcgagcgggcggactatcgtagcgatgttgtggatgcgatagagcacagcaccagcggttcacaaaagctggccgggccgctgatcgccatcccggtaaccgagacgctgacccgaatggagaaccaaaaagaggtcgaatatcagcgtcgctggatctactactggctaccggaatcgctggcggtcagcggcgcgcaaaatgtggagtcgagaaaagtcggcatttacagtgggcaggtctggcataacaccctgcaaattaaggcgcagtatgatcctacgcggctgacggagctgaaaaaagcgaataccacgttaggaaagccgtttttagttctcagcgtgagcgatgcccgcggcatcggcgccatcaacgcgccggtcattaacggtacggcactggtcgttgaaccggggctgggattgaacggcggcggtatgggcattcatatgccgatgccggtattaaccgcagacaacaaaccgctggagattgcttttaccctcgatcttaatggtaccggcgacttctctgtcgtaccgttgggccgcaacagcgagctgcggctaaccagtaactggccgcatccgggattcctgggcaacttcctgcctacaaagcgcgaagtgagcgcctcgggttatagcgcgcactggcaaagcagctggttcgccaacaatatgggcagctatttcaacgatgataccgatattgaatggccgcgtttacccgccttcagcgtggacgtgatgtcgcaggccgatcaatatcagctcaccgaccgggcgactaaatacgccatcctgttaatcgcgctaacttttatggccttcttcgttttcgagagcctgacgcatcgccgtctgcatccaatgcagtatctgctggtggggttatcgctggtgatgttctacctggtgttgctggcgctctcggaacatgttgggtttacgcctgcctgggtcgttgccagcctgattggcgcggtgataaacggcgtttatttacaggcggtactgaaagggtggcgtaatagtctgttatttgttgcagcgctactgctgctggatggcgtgatgtggttactgttgcgttctgaggatagcgcgttgctgctcggcaccggggttctactgttggcgctgtgcgcgttgatgttcctgacccgccgcgtggactggtacgccttgtcactaccgcaaagcaatccgcaaaaaccgcaaagtaaggatgaagacacgttacgtatctggaagtaa

SEQ ID NO: 88770 - DNA, 1425 bp, Enterobacter aerogenes
atgcgtatcgggatgcgcctgctgctgggttattttttgattgtcgccattgccgcgtggtttgtgctctcaatatttgtgcaggaagtcaaaccgggcgtgcgtcgggcaacggaaggcacgcttaacgataccgcaacgctactggcggcgctggctcgtgatgacctgctttcggcaaacccgcagcaagggcggttggcgcaggcgtttcagtcgcttaatcagcagcccatcaacgccaatatcagcggtatcaggaaaatgcgcaatgagtatcgcgtctatctgacggatgctcagggaaaggtggtgtttgactccagcgggcaggcggtgggccaggattattcgcgctggaacgacgtctggctgaccctacgcggccagtacggcgcgcgcagcacgcgcagcgatcctgatgatgataatagctcagtcatgtacattgccgcactggtaatggataacggccgtatcatcggcgtggtgagcgtcggcaaacctaatctggccatgacgccggtgattaaacgcagcgagcggcggatcctgtgggctggcggcgcgttgttggggatcgctttactgatcggcggcgggatcgtctggtggattaacttctcaattggcaaactggttcgttacgccgattcggtgaccgccgagcgtccgttacctctaccgaacgtcggtagtcgcgagctaagcaagctggcgcaggcgctggagagcatgcgcgtgaagcttgaaggcaaaaacgcgattgaaaactatgtctacgatctcacgcatgaactcaaaagccctctggcggccattcgcggcgcggcggagatcctgagcgaggcgccgccgcccgagatcgccgcgcgtttcaccgccaatattcttgcgcagaatacgcgcatgcaactgctggtggaaaaactgctgcagcaggcgcggctggaaaatcgtctggagataacgccgcagttggtttcggttgatgcgcttttccaacgtctggcggaagaccgcgacattgcgctgacggcgaaggccatcaccttacgctggcaggagagcggggtaacggtgaatggcgatagcgaactactggggcaggcgctgggcaatcttatcgacaatgcgattgactttaccccgtacggcggtgaaatttccctggcggtagagatgcgtaatgaagaggcgtggttgagcgtcacggataacggtagcggaattcctgattttgcgctggagcgcatctttgaacgcttttactcgctgccgcgggatgacggccataaaagcagtggtcttggcctggcgtttgttcgtgaagtcgcgcgtctacatcagggcgatattagtttgcacaatcgccctgaaggcggcgtggtcgcgacgctacatcttcaccgtcccttcacataa

SEQ ID NO: 88771 - DNA, 690 bp, Enterobacter aerogenes
atgcaacagccacggatttggttagttgaggatgaacagagtatcgccgatacccttgtttacatgctgcagcaggaaggattcgacgtgaccgttttcgggcgcgggttgcccgcgcttgatgcggcgctgcatcagatcccggatttagcgatcctcgacgttggtttgccggatattagcggctttgaactatgccgacgactgctggcgcgccatccggcattgccgctattgtttctgaccgcacgcagcgaagaggttgataagctgctgggactggaaattggcgctgatgactacatcgccaaaccattttcgccgcgcgaagtttgcgcgcgggtgcgtaccgttttgcgtcggctacagaaattttcagctccttcgccggtggtgcgcgttggcgagttcgtgctggatgagcaggcgatggcgataagctggtttggccaaccattgaatctgacgcgttacgaattcctgctgctgaaaaccctaatcaacgctcccggtcgcgtattctcccgccagcagctgatggaactggtgtggagcgatgcctacgagagtatcgatcgcaccgtcgatacccatatcaagaccctgcgcgccaagctgcgggcggtgaatccgaatgttaaccctattaatacgcatcgcggtttgggctatagcctgggaggctgttga

SEQ ID NO: 88772 - DNA, 471 bp, Enterobacter aerogenes
atgaaatacaagaagttagtagcagggttgttcttactggcggcgggccaactggcgcacgccgagcaaatcggctccgtcgatacggtatttaaatggctggggccggatcacaaaatcgtggtcgaagccttcgacgatcccgatgtacagaacgtcacctgctatatcagccgggcgaaaaccggcggtattaaaggcgggttggggctggcggaagatacctcagacgccgccatctcctgtcagcaggtcgggccgattgagctgacggacaagatcaaaaacggtaaaagtcagggcgatgtcgtgttccagaaacgtacctcgctggtgttcaaaaaactgcaggtcgttcgcttctttgacgctaaacgcaacgcgctggtctatctgacctattcggataaagtggtcgacggctcgccgaagaatgccatcagcgccgtgccaatcatgccctggaattaa

SEQ ID NO: 88773 - DNA, 870 bp, Enterobacter aerogenes
atggatcaagctgggattattcgcgatctcctgagctggctggaaggtcacctggatcagcccctctcgttggataatgtggcggcgaaggcaggttattccaagtggcatttgcaacgtatgtttaaagacgtcacgggtcaagctatcggtgcctatattcgcgcacgtcgtctatcaaaatccgccgttgcgctacgcctgaccgcacgtccgatcctcgacatcgcgctacagtaccgcttcgattctcagcagacgtttacccgcgcctttaaaaaacagtttaacctgacccccgcgctctatcgccgttctgcggactggagctcgtttgggatgcgtccgccgctacgcctcggtgaatttaccatgccgaagcatgaattcgtgaccctgagcaccacgcaactggtcggcgtgacccaaagctatacctgtaagctggaagagatttctgaattccgtaaccagatgcgcgttcagttctggcgcgaattcctcggcaacgcgcccagcattccgccgacgctgtacggcctgcatgaaccgcgtccaagcctggaaaaagatgacgagcaggaggtcttctacaccaccgcactgacgccagagctggcgaacggccacctgcataattcccatccggtgattctggaaggcggcgagtacgtgatgttcacctacgaagggttaggtaccgggctgcaggagtttattctgacggtgtacggcacctgtatgccgatgctcaacctcacccgccgcaagggtctggatattgaacgtttctatccggaagatgataaccggaaccaggccacgccaattcagctgcgctgcgagtacctgattcctattcgtcgttaa

SEQ ID NO: 88774 - DNA, 648 bp, Enterobacter aerogenes
atgttacaggtataccttgttcgccacggtgaaacgcagtggaacgccgagcgacgtattcaaggccagtccgatagtccgctgaccactcacggtgagcgccaggcatggcaggttggcgagcgcgccagaacgctggggattacccatattatcgccagcgacctcggccgtacccgccgcacggcagaaattatcgccgaagcctgcggttgcggcgtcgttaccgatccgcgcctgcgcgagctggatatgggggtgctggagaagcgccatatcgactcgcttagcgaagaagaggagggctggcgccgtcagctggtcaacggtacgccggatggccgcattccgcagggcgaatccatgcaggagctgagcgagcgtatgcgcgcggcgctatcatcctgtctggagttaccgccagggagccggccgctgctggtgagtcatgggatggcgctgggctgtctggtgagtacgatcctcgggctgcctgcttatgcggagcgtcgtttgcgcctgcgcaactgttcgatttcacgcgttgattaccagcagagcccgtggctggcgtcaggatgggtggtggagaccgcgggggacgtctcgcatctcgatgcccccgcgatggacgaactgcagcgttaa

SEQ ID NO: 88775 - DNA, 516 bp, Enterobacter aerogenes
atgcaccatgttgtctcagctaccactaatcccgccaaaattcaggcaattctgcaggcttttaacgagatcttcggcgaaggatcctgccatattgagtccgtcgccgtcgagagcggcgtgccggaacaacccttcggcagcgaggaaacgcgggctggcgcacgaaatcgcgtcgctaatgcccggatcgcacagccggaagccgatttttgggtggcgatcgaagccgggatcgacgaaggcagcaccttcagttgggtagtgattgagagccggcagcagcgtggcgaagcgcgctcggcaaccctaccgctgccggaggcgatccttgcgcaggttcgcgccggagaagcgctggggccggtcatgtcgcaacataccgggatcgaccagattggccgcaaagagggcgctatcggcgtctttaccgcgggtaagctgacgcgcagcagcgtctaccatcaggcggtagtgctggcgctcagcccattccataacgctatttatcgttaa

SEQ ID NO: 88776 - DNA, 327 bp, Enterobacter aerogenes
atgacccaacaatctccctattcagcggcagtggccgaacaacgtcatcaggagtggctgcgctttgtggcgctactgcagcaggcctacgccgaagatcttcacctgccgttactacagctgatgctgacgcccgacgagcgcgaagcgctgggcacccgggtgcgtattattgaagagctgctgcgcggcgagatgagccagcgcgagctgaaaaacgaactcggcgccggtattgccacgattactcgcggctcaaatagcctgaaatcggcaccggtagagctacgccagtggctggaacagacgctgcttaacgataaatag

SEQ ID NO: 88777 - DNA, 1938 bp, Enterobacter aerogenes
gtggaaaaagccaaaactacggcatggcgtcttctggctgccggcgtgagtctgctgacgctaagccagctggcgcatgcggattcactggatgaacagcgcagccgctatgctcaaattaaacaggcgtgggacaaccgccagatggatgtcgtcaaccagttgatgcccacgctcagcagctatccgctgtatccctacctgcaatatcgacaaattaccgatgacctgatgaaccagccgccgctggtggtcactaatttcattgcggcgaacccgaccctaccggcggcgcgttcgctgaaatcacgctttgttaatgagctggcgcggcgcaccgactggcgcggcttactggcgttcagcccggataaaccggcgacaaccgaagcgcagtgtaactactactacgccaaactcagcgtcggccaatcgcaggaagcgtggagcggggcgaaagagctgtggctaaccggcaagagccagccaaatgcctgcgatccgctgttcagcgcgtggcgcgattccgggcagcaggatccgctggcctatctcgaacgaattcgtctggcgatgaaggcaggcaataccagtctggtccgcgtgcttgcgcaacagatgccgtcaaactatcagagcatcgcttcggcagtggtggcgttagctaacgatcccaatagcgtgatgacctttgcccgcaccaccggggccactgactttacccgccagatggcggcggtcgcttttgccagcgtcgcgcgtcaggatgtagaaaacgctcgtctgatgatcccgtcgctggtgcaggcgcagcagttgaatgaggatcaaacccaggagctgcgcgatattgtcgcctggcgcctgatgggcaccgatgtgaccgaagcgcaggcggagtggcgcgatgacgccatcatgcgttcgcaatcaacctcgctggtggaacgccgggtacgtatggcgctcggcaacggcgatcgtcatgggctgaacacctggctggcgcgtctgccgatggaggcgaaagaaaaagacgagtggcgctactggcaggcggatctgctgctggagcgcgggcgcgatgacgaagcgaagacgatcctgcattcgctgatgcagcagcgcggcttctatccgatggttgctgctcaacgtctgggcgaagagtacaccttccgcattgataaagcctccggcactatcgacccggcgctggcctctggccctgagatggcgcgcgttcgcgagctgatgtactggaacatggacaacaccgcgcgcagcgaatgggcgaacctggtgagcagccggaccaaatcgcaacaggcgcagctggcgcgttacgcgtttgatcaacactggtgggatctcagcgtgcaggcgacgatcgcgggtaaattgtgggatcaactggaagagcgcttcccgctggcgtacaacgatctgttcgcgcgttacattagcggcaaagatattccgcagagctacgcgatggcgattgcgcgtcaggagagcgcctggaacccgaaagtgcgttcaccagtcggcgccagtggcttgatgcagattatgccgggcaccgcgacgcataccgtcagcatgttcagcatccctggttatagcggcccgtctcagctgctggatccggaaaccaatatcaacattggtaccagctacctgcagtacgtctaccagcagttcggcaataaccgcatttacgcttccgccgcctataacgccgggccaggacgcgtacgcacctggcagggcaatagcgccgggcgcatcgatgcggtggcatttatcgagagtattccgttctcggaaacccgcgggtacgtaaaaaacgtcctctcttacgatgcctattaccgctactttatgggcaagcaggataacttgctgagcgacgccgaatggcgacagcgttactga

SEQ ID NO: 88778 - DNA, 1650 bp, Enterobacter aerogenes
gtggctcaattcgtttataccatgcatcgtgtcggcaaagtggttccgccgaaacgtcatattttgaaaaatatctccctcagtttcttccctggcgcgaaaatcggtgttctcggtctgaacggcgccggtaaatctaccctgctgcgcatcatggccggtatcgacaccgaaatcgaaggtgaagcgcgcccgcagcccggtatcaaaatcggctacctgccgcaggagccgcagctgaatccggagcacaccgtgcgcgaatccgttgaagaagcggtcgccgaagtggttaacgcgctgaaaggcctggacgaagtttatgccaaatacgccgagccggatgccgacttcgataagcttgccgcgcaacagggcaagttcgaagagatcatccaggcgcacgacggccataacctgaacgtacagctggagcgtgcggctgatgccctgcgcctgccggactgggatgcgaagatcgccactctttccggtggtgaacgccgtcgcgtcgcgctgtgccgtctgctgctggaaaaaccagacatgctgctgctcgacgaaccgaccaaccaccttgacgccgaatccgtcgcctggctggaacgcttcctgcacgatttcgaaggcaccgtggtggcgattacccacgaccgttacttcctcgataacgtcgccggttggatcctcgaacttgaccgcggcgaaggtattccgtgggaaggcaactactcctcctggctggagcagaaagatcagcgtctggcgcaagaagcttctcaggaagccgcacgccgcaaatctatcgagaaagaactcgagtgggttcgccagggcgcgaaaggccgtcagtctaagggtaaagcccgtctggcgcgctttgaagagcttaacaacgtcgaataccagaaacgtaacgagaccaacgaactgttcattccgccaggagcgcgtctgggcgataaagttctggaagtcagcaatctgcgcaaatcttacggcgaccgcgtactgattgacgatctgagcttctccgtaccgaaaggcgctatcgttggtatcatcggtccgaacggcgcgggtaaatccaccctgttccgcatgatgtccggccaggaacaacctgattccggcaccatcacgctgggtgaaaccgttaaactggcttccgtcgatcagttccgcgacgcgatggacaacagcaaaaccgtttgggaagaagtgtccggcggcctggatatcatgaagatcggcaacaccgagatgccgagccgcgcctacgttggccgctttaacttcaaaggcgtcgaccagggcaaacgcgttggcgaactgtccggtggtgagcgtggtcgtctgcacctggcgaagctgttgcaggtcggcggtaacgtcctgctgctcgatgaaccaaccaacgacctggatatcgaaaccctgcgcgcgctggaaaacgccctgctggagttcccgggttgcgccatggttatctcgcacgaccgctggttccttgaccgtatcgcgacccacattctggattaccaggatgaaggtaaagttgagttcttcgaaggtaactttaccgagtacgaagagtacaagaaacgcaccctcggcgccgatgcgctggaaccgaagcgtatcaagtaa

SEQ ID NO: 88779 - DNA, 1233 bp, Enterobacter aerogenes
atgtcgtcattcgactatctgaaaaacgccattaagcaaaagggttgtacgctgcagcaggtggcggaagccagcgggatgaccaaaggttatctcagtcagctattaaacgcgaaaatcaaaagcccgagcgcccagaagctcgaagcgttacaccgctttctcggccttgaattcccgcgcaaacaaaaaagcgtcggggtggtttttggtaaattttatccgctgcataccgggcatatttacctgattcagcgcgcctgtagccaggtcgatgagcttcatatcatcatgggctatgacgacactcgtgaccgcgagttgttcgaagagagcgccatgtcgcaacagccgacggttcccgatcgtctgcgctggctgctgcaaacctttaaatatcaaaaaaacattcgcatccatgccttcaatgaagaggggatggagccgtacccgcacggctgggatgtctggagccgtgggatccgcgccttcatgagtgaaaagggaatcgagccaaactggatttatacctcggaagaggccgatgcgccgcagtatctggagcatctggggatcgaaaccgtgcttatcgatccgaagcgaaccttcatgagtatcagcggcggccagatccgcgaaaacccgttccgctattgggaatatattccgactgaggtaaaaccgttctttgtgcgtacggtggcgatcctcggcggcgagtcgagcggtaaatcgacgctggtgaataagctcgccaatatcttcaatactaccagcgcctgggaatatggccgcgattacgtcttctcacacctcggcggcgatgaaatggcgttgcagtattccgattacgataaaatcgcgctggggcacgcacagtacattgatttcgcggtgaaatacgccaataaggtggcgtttatcgataccgacttcgtcagcactcaggccttctgcctgaagtacgaaggccgcgaacatccgttcgtgcaggcgttaatcgatgaatatcgctttgatctggtgatcctgctggaaaacaacacgccgtgggtagccgatgggctgcgtagcctcggtagttcggtagatcgcaaagagtttcagacgctgctggtgtcgctgctgaaagaaaacgagatcgaatttgtccacgtggaagagtcggactacgacgcccggttcctgcgctgcgttgagctggtgaagcagctgatgggcgagcaggggtag

SEQ ID NO: 88780 - DNA, 1383 bp, Enterobacter aerogenes
gtggcgaaagctccaaaacgcgcatttgtctgtaatgaatgtggtgcggattatccgcgctggcaggggcagtgcagcgcctgtcatgcctggaacaccatcaccgagatgcgcatcgccgcctcgccgcaggtggcgagaaacgagcgtctgtcaggttacgctggtaatgccggcgtgtcgaaggtacagaagctgtcggagataagcctggaggcgctgccgcgtttctccaccggatttaaagagttcgaccgcgtgctcggcggcggcgtcgtgccgggcagcgccattctgatcggcggtaaccccggcgccgggaaatcgacgctgctgctgcaaaccctttgtaagctggccgaagggatgaaaacgctgtacgtcaccggggaagaatccctgcagcaggtcgcgatgcgcgcgcatcgtctcggcctgccgacggcgaatctgaatatgctctcggagaccagcatcgagcaaatttgccagattgccgatgaagaaaagccgcagctgatggtcatcgactccatccaggtgatgcatatggctgatgtccagtcgtcgccggggagcgtggcccaggtacgtgaaaccgcggcctatttgacgcgctttgccaaaactcgcggcgtggcgattgtgatggtcggccacgtcaccaaagatggctcgctggccggtccgaaagtactggaacactgtattgactgttcggtgctgctggacggcgatgccgattcccgtttccgcacgttgcgcagccataaaaaccgctttggcgcggtcaacgaactcggcgtcttcgcgatgaccgagcagggcctgcgcgaagtcagcaacccctccgccatcttcctcagccgcggcgatgaagttacctctggcagctcggtcatggtggtatgggaaggcacccgcccgctgctggttgagattcaggcgctggtcgatcactcgatgatgtctaatccgcgtcgcgtagcggtaggcctggaacagaaccgtctggcgatcctgctggcggtgctgcaccgtcatggcggcctgcagatggccgatcaggacgtcttcgtcaacgtggttggcggggttaaagtcactgaaaccagcgccgacctggcgctgctgctggcgatggtctcgagcctgcgcgatcgtccgttgccgcaggatctggtggtttttggcgaagtcggattagccggtgaaattcgcccggtgccaagcggccaggagcgcatttccgaggcggcgaaacatgggttccgtcgtgccatcgtaccagcggccaatgtgcccaaaaaagcgccggaagggatgcaaatctttggcgtgaaaaaactggccgatgcgctgagcgtttttgacgacttataa

SEQ ID NO: 88781 - DNA, 972 bp, Enterobacter aerogenes
atgcctaacagtttgacctggtgcgacctgcccgaagatgtttccttgtggcctgggttgccgctttccctgagcggcgacgaggtcatgccgctggattatcacgccgggcgcagcggctggctgctgtatggtcgcggtctcgataaacgtcggctgacggcgtggcagcgcgagctcggcgcggcgctggtcattgtctcttcctgggtcgtggaagactatcaggtgattcgcctggcggggtcgctgacgcagcgcgccacgcgcctggcccatgaggccgggctggacgtcgcgccgctggggaaaatcccgcatctgcgcacgccgggcctgttggtgatggatatggactccacggcgattcagatcgaatgtatcgatgaaattgctaagcttgccggcaccggcgagctggtctcggaagtgaccgaacgcgcgatgcgcggcgagctcgacttcaccgccagcctgcgccagcgcgtcgccaccctgaaagacgccgacgcgaacattctgctgcaggtgcgggaagcgctgccgctgatgccgggactgacccaactggtgctgaagctggaaacgttgggctggaaggtggccatcgcctccggcggctttaccttctttgccgaatatctgcgcgataagctgcatctcgacgcggtattcgccaacgagctggaaattatggacggcaagctcaccggcaacgtgatcggcgacatcgtcgacgccaaatataaagccaatactctgcgtaaactggcggaaaaatatgaaattccgtcggcgcaaaccgtggcgatcggcgatggcgccaacgatctgccgatgatcaaggcggcaggcctcggcattgcctatcatgcgaaaccaaaagtcaatgaacaggcggaagtcaccatccgccacgctgacctgatgggggtattctgtattctctccggcagcatgaatcaaaagtaa

SEQ ID NO: 88782 - DNA, 633 bp, Enterobacter aerogenes
atggtacgagcaaaactgaaattccgactgcatcgcgccgtcattgttctgatctgtctcgcgcttctcgtcgcgctgatgcagggcgcctcgtggttcagtcagaatagccaaaagcagcgtaatccgcagttggaagagctggcgcgaacgctggcgcagcaggttacgctgaacctggcgccgctgatgcgcagcgaaacgcccgacgaaaagcgcattacccgcctgctggaacagctgacggacaaaagccgggtgctcgatgccggggtatatgatgaacaaggcgatttggtggcccgctccggcgaaagcgtcgatgtgcgcgaccgcctggcactggatggcaaaaaagctggcggctactttaaccagcaaatcgtcgagccgatcctcggcaaaaacggtccggtcggctatctgcgcctgacgctggatacccacacgttggccaccgaggcgaaacaggtggataataccaccaatatcttacgcctgatgctgctgttgtcgctggccatcggcgtggtgctgacccgtacgttgctgcagggtaaacgtacccgctggcagcaatcgcccttcctgctcaccgccaataagcccgtccaggacgaagataaagattaa

SEQ ID NO: 88783 - DNA, 1017 bp, Enterobacter aerogenes
atgccgacgctccgcctgttgctctccgattcctacgacccctggtttaacctcgcggtcgaggagtgtattttccgccagatgccggccacccaacgggtgctgtttctgtggcgcaacgccgacaccgtggtgattggccgcgcgcagaacccgtggaaggagtgcaatacccggcgcatggaagaggaccacgtccggctggcccggcgcagcagcggcggcggcgcggtattccacgacctcggcaatacctgctttacctttatggcgggcaaaccggaatacgacaaaaccgtttctaccgctatcgtgctggcggcattgaattcgcttggcgtgaccgccgaggcttccgggcgcaacgatctggtcgtgaaaaccgacaatggcgaccgcaaggtgtctggctccgcctatcgcgaaacgatggaccgcggttttcatcacggcaccctgctgctaaacgccgacttaagccgtctcgccaactatcttaatccggacaaaaaaaagctgcaggccaagggcattacctcggtacgcgggcgcgtagcgaacctggttgaactcctgccgggcattacccatcagcagatttgcgaagccattcaggaggcattcttcagccattacggcgagcgggtagaggcggaagtcatttcgccggacaacacgccggatctgccgaattttgccgagaccttcgcccgccagagcagctgggagtggaacttcggccaggcgcccgctttctcccacctgctggatgagcgctttcgctggggcggcgtcgagctgcattttgacgtcgagaagggccatatcacccgcgcccaggcttttaccgatagcctgaacccggcgccgctcgaggcgttggcggcacgattagtcggttgtcagtatcgggcggaaatattacagcagcagtgtgaggcgctgctcgccgatttccctgagcaggaagcggaactgaaagaactgtcggcgtggctggtcggcgcggtgcgctaa

SEQ ID NO: 88784 - DNA, 720 bp, Enterobacter aerogenes
atggccaccccacacattaacgcagaaatgggcgattttgctgacgtagttttgatgccgggcgacccgctgcgcgcgaagcacattgcagaaaccttcctcgaagacgtgcgtgaagtgaacaacgtgcgcggcatgctgggcttcaccggtacctacaaaggccgcaaaatctccgtgatgggccacggtatggggatcccatcctgctctatctacactaaagagctgatcaccgatttcggcgtgaagaaaatcatccgcgtcggctcctgcggcgcggtacgtgaagatgtcaaactgcgtgatgtggttatcggcatgggcgcgtgcaccgactctaaagtcaaccgtctgcgtttcaaagaccacgacttcgcggcgattgccgatttcggcatggtgcgtaacgcggtagacgcggcgaaggcgctgggcgttgacgcgcgcgttggcaacatcttctccgctgatctgttctatacgccggatccgtctatgttcgacgtgatggaaaaatacggcattctgggcgtggaaatggaagcggccggcatttatggcgtagcggctgagttcggtgcgaaagcgctgaccatctgcaccgtttccgatcatatccgcactcacgagcagaccactgccgctgagcgtcagaccaccttcaacgatatgatcaaaatcgcgctggaatccgtactgctgggtgataaagagtaa

SEQ ID NO: 88785 - DNA, 1224 bp, Enterobacter aerogenes
atgaaacgtgcatttattatggtgctggactcctttgggattggcgcaacggaagacgctgaccgctttggcgatgttggcgccgataccttgggccacattgcagaagcctgcgccaaaggtgaagctgacaatggtcgtaaaggcccgttgaatttacctaacctgacccgtctgggtctggtgaaagcgcatgaaggttctaccggtaaaattgccgccggtatggacggtaatgccgaagtcgttggcgcctatgcctgggcgcatgaactctcttctggtaaagatacgccgtctggccactgggaaatcgccggcgtgccggtgctgtttgactggggctacttcagcgaccacgagaacagcttcccgcaggaactgctggataaactggttaagcgcgcgaacctgccgggctacctcggcaattgccactcttccggtaccgtgattctggaccaactgggtgaagagcatatgaaaaccgggaaaccgattttctatacctctgctgactcggtgttccagatcgcctgtcacgaagagactttcggcctcgacaagctgtatgagctgtgcgaaatcgcccgtgaagagctgaccgaaggcggctataacattggccgcgtgattgctcgtccgtttgttggcgacaaagccggtaacttccagcgtaccggtaaccgtcacgatctggcggtcgagccgccggcgccgaccgtgctgcagaagctggtcgacgagaaaaacggccacgtggtttccgtgggtaaaatcgccgacatctacgccaactgcggcatcactaagaaagtgaaagccaccgggctggacgcgttgttcgacgcgaccatcaaagagatgaaggaagcgggcgacgagactatcgtcttcactaacttcgtcgattttgactcctcctggggccaccgtcgcgacgtcgctggctacgcggcgggtctggagctgttcgaccgtcgtctgccggagctgatggagctggttggggaagacgacattctgatcctcaccgccgaccacggctgcgacccgacctggaccggtaccgaccacacccgcgaacacattccggtgctggtgtacggcccgaaagtgaagccgggttcgttaggccaccgcgaaactttcgccgatatcggccagacgctggcgacatactttggtacgtcgccaatggaatacggtaaaaacatgctgtga

SEQ ID NO: 88786 - DNA, 1323 bp, Enterobacter aerogenes
gtgtttctcgcacaagaaattattcgtaaaaaacgtgatggtcatgtattaagcgatgaagaaattcgctttttcatcaacggtatccgcgataatactatctctgaaggacagatcgccgcgctggcgatgaccatcttcttccatgatatgtctatgccggaacgtgtctcgctgaccatggcgatgcgggattcaggaaccgttctcgactggaaaagccttaacctcaatggcccgatcgtcgataaacactcgaccggcggcgtgggtgacgtcacctcgctgatgctggggccaatggttgccgcctgcggcggttacgtaccgatgatctccgggcgtggtctcggccataccggcggtacgcttgataaactggaagcgatcccgggttttgatattttcccggacgatgcgcgtttccgcgaaattattaaagatgtcggcgtggcgattatcgggcagaccagctcgctcgcgccggctgacaaacgtttctatgccacccgcgatattaccgcgacggtggattccatcccgctgattaccgcgtctattctggccaagaaactggcggaaggtctggacgcgctggtgatggacgttaaagtcggcagcggcgcctttatgccgacttatgagctttcagaagcgcttgccgaagctatcgttggcgtctctaacggcgccggcgtgcgcacgaccgcactgttaacggatatgaaccaggtgctggcctccagcgcgggtaacgccgttgaagttcgcgaagcggtacagttcctgaccggcgaataccgcaacccgcgcctgtacgacgtcaccatggcgctgtgcgtggaaatgctgatttccggcaagctggcggcggatgacgccgaggcgcgcgcgaaattgcaggcggtgctggataacggtaaagcggcggaagtctttggccgcatggtggcggcgcagaaggggccgagcgactttgtcgaaaactatgcgaaatacctgccgacggcaatgctgagcaaagcggtctatgctgaaggcgccggatttgtctctgaaatggatacccgtgcgctggggatggcggtggtgtcgatgggcggcggtcgtcgccaggcttccgatactattgactacagcgttggctttaccgatatggcgcgccttggcgataaagttgatggcgaacgtccgctggcggtgattcatgcgaaagatgaatcgagctggcaggaagcggccaaagccgtgaaagcggcaataaaactggacgcccacgccccagaaattacaccgacggtctatcgccgtatcaccaagtag

SEQ ID NO: 88787 - DNA, 780 bp, Enterobacter aerogenes
atgactgatttgaaagcaagcagcctgcgcgcgttgaaactgatggatctgaccaccctgaacgatgacgacaccaatgagaaggtgatcgctctgtgtcatcaggcgaaaacgccggtgggcaataccgctgcggtctgcatctacccgcgttttatcccgattgcccgtaagacgctgaacgaacaaggaacgccggatatccgcatcgcgacggtgactaacttcccgcatggtaatgacgatatcgatatcgcgctggcggaaacccgcgcggcaatcgcttatggcgcggatgaagtggatgtggttttcccgtaccgcgcgctaatcgcgggtaacgagcaggtgggttttgatctggtgaaagcttgtaaagaagcctgtgtggcggcgaatgtgctgctgaaagtgatcatcgaaaccggcgaactgaaagaagaagcgctgattcgtaaggcgtctgaaatctctattaaagcgggcgcggatttcatcaaaacttctaccggtaaagtgccggtgaatgcgacgccggaaagcgcgcgcatcatgatggaagtgatccgcgatatgggcgttgagaaaaccgttggctttaaacctgccggcggcgtgcgcagcgcggaagacgcgcaacagttcctggcgattgctgatgaactgttcggcgccgattgggccgattcccgccactaccgtttcggcgcatccagcctgttggctagcctgctgaaagccctgggtcacggcgacggtaaaagcgccagcagctactaa

SEQ ID NO: 88788 - DNA, 786 bp, Enterobacter aerogenes
gtgacgttacgctttattgatacccactgtcatttcgattttcccccatttacagaggatgaaccggcgagtatcgcacgggcgtcgcaggccggcgttgggcgaataatcgtgccgtcgatatccgccgcgcgctttgctcgcgtgctggcgctggcggagcaacacgagccgctgtatgccgcgttagggatgcatcccattgttatcgaacagcatgatgaccgcgggttagcgcaactggaaagctatcttgcacagcgtcatccgaaactcgtggcagtcggggagattggcctcgatctctaccgcgacgatccgcaatacgatcgccaacaggcgctgctggaagcgcaattacggctggcaaagcgttacgatttgccggtgatcctgcattcgcgccgcacccacgataagctggcgatgttgctaaaaaaacataacctgccgcgcgccggggtggtgcatggttttgccggcagcctgcagcaggcggaacgttttgtacagctgggctataagattggcgttggcggtaccattacctatccccgcgccagcaaaactcgcgatgttatggcgcgtctgccgctttcttcgctgctgctggaaaccgatgctccggatatgccgctgaatggttttcagggacagccgaaccgcccggaacaggcggcccgcgtctttgactcgctctgcgaactgcgcgcggaaccggcgcaggaaattgaagcggcactactggcgaataccaaaaacctctttaccgcgctaaccctctaa

SEQ ID NO: 88789 - DNA, 1074 bp, Enterobacter aerogenes
gtggggcaacgcattcccgtgacgttgggcaatatcgccccgttagcggtaaaacccttccgtccaggcaaattggctctggtgtgcgaaggcggtggtcagagaggtattttcacagccggggttctggacgaattcatgcgcgctggatttaaccctttcgacttgatgctcggcacttccgctggcgcgcaaaatatctccgcttatatctgtaatcagcagggctacgcccgtaaagtcattacgcgttacaccacctcgcggcaattttttgacccgatgcgcttcgtacgcggcggcaatcttatcgatctcgattggctggtcgattccactgcacaacaaatgccgctggcgatgaactatgccgaggagcagttcgcgctgggtaaagagctgtggatgtgcgcctgccgcggtgacgactacacggcaaactatttttcccctacccgccagacctggcttgatctgatccgcgcctccagcgccattccaggtttttaccgtagcggtgtcctgctggatggcgtgaactacctcgatggcggcgtcagcgacgcgatccctgtgcaggaggcggcgcgccgcggcgcgcagactattgtggttatccgtaccgtcccttcgcagatgttctacactccgcagtggtttaaacggatggagcgctggctgggggaaagcagtttgcagccttttgtgaacctggtacagcaccacgaaaccacctatcgcgcgacgcagcagtttattgaaaagccgccgggtaaactgcggatattcgaaatctatccgcagcggccactgcgcagtatggcgcttggcagccgtctgccggcgctgctggaagattataaaaccggacgccagtgcggccgctacttcctcgctacggtagggaaactgctgaccgagcaaccgccgctgttacgtcatgcgccgcgtgtggcaatgccgacgccggtggtggtgccgccgctgccggtagctaacgaaacgccgcaacaggcgattatcaccgcgccgcaggctaatgaccccagctttaataacgaggatctggcgtga

SEQ ID NO: 88790 - DNA, 162 bp, Enterobacter aerogenes
atgtttagatggggcattatttttctgatcatcgcgttaattgccgccgcattgggttttggtggtctggcgggtaccgcggcgtgggcggctaaaatcgtctttgttgtcggtattatcattttcctggtcagcctgtttaccgggcgaaaacgaccctag

SEQ ID NO: 88791 - DNA, 612 bp, Enterobacter aerogenes
atgaccagactaaagagcgccaggctattgctgcctctcttcttaggctcagcgttgataagcgcctcgacctatgcggaaaccaccgtcacagatagcgccaaggctgccgcgaccagcgccggagacagcgtcgataaatcgatcaacaaggttggcgattttatggatgacagcacgatcaccgcccgtgtcaaagcggcgctgatcgatgacaaaaggatccgtagtaccgatatctcggtgaaaacggaaaacaaagtggtgaccttaagcggaacggtggagagcgctgagcaaaaatcacaggccgttagcgcggcgaaaggcgtcgaaggggtgagttcggtaagcgataagctgaccgtggcgggtgaaaaatcggcaagcctgaagggctatgctggcgacaccgctatcaccagcgaagtcaaagccaaactgctcgcggacgatatcgttccgtcgcgtaaggtgacggttgaaaccagcaacggggtggtacacctctccggaaccctggaatcgagcaagcaggtcgatcgcgcggcagacattgccaaagcggttaccggtgttaagagcgtgaagaacgatcttaaagtgcagtaa

SEQ ID NO: 88792 - DNA, 1590 bp, Enterobacter aerogenes
atgacgttgtctccttatctgcaagaggtggctaaacgccgcacttttgccattatttctcacccggatgccggtaagaccaccatcactgaaaaagtgctgctgttcggacaggcgattcagaccgcaggtaccgtgaagggccgtggttccagccagcatgctaaatccgactggatggaaatggaaaagcagcgtgggatctcgattaccacctcggtgatgcagttcccgtaccatgacagcctggttaacctgctggataccccggggcacgaagacttctccgaagatacttaccgtaccctgacggcggttgactgctgtctgatggttatcgatgcggcgaaaggcgtcgaagatcgtacccgcaagctgatggaagttacccgtctgcgcgatacgccgatcctcacctttatgaacaaactcgaccgtgatatccgcgatccgatggaattgctggatgaagtcgaaaatgagctgaaaatcggctgcgcgccgattacctggcctatcggctgcggcaagctgtttaaaggggtttatcatctttataaagatgaaacttacctctatcagaccggtaaagggcacaccattcaggaagtgcgcgtggttaaggggttgaataaccctgaactcgatgccgcggtgggcgacgatctggcgcagcagctgcgcgatgaactggaactggtgcagggcgcttcgaacgagttcgataaagaactgttcctggcgggcgaaattactccggtgttcttcgggaccgcattaggcaacttcggcgtggatcatatgctggatggtctggtggagtgggcgccggcgccgatgccgcgtaacactgatacccgtgaagtgacggctacagaagagaaattcaccggcttcgtgtttaagattcaggccaacatggacccgaaacaccgcgaccgcgtggcctttatgcgcgtggtttccggcaaatacgagaaaggcatgaagctgcgtcaggtgcgtatcggcaaagacgtggtgatttccgacgcgctgacctttatggcgggcgatcgctcgcacgttgaagaagcctaccctggcgatattatcggtctgcataaccacggcaccattcagattggcgacacctttacccagggcgaaatgatgaagttcaccggtattccgaacttcgcgccggaactgttccgtcgtattcgcctgaaagatccgctgaagcagaaacagctgctgaaagggctggtacagctgtctgaagagggtgcggtacaggtcttccgtccgatcgctaataacgatctgatcgttggcgccgtcggcgtgctgcagtttgacgtggtggtagcgcgtctgaaaagcgaatacaacgttgaagcgatttacgaatccgtcaacgtggccaccgcgcgttgggttgaatcgacagacgtgaagaaattcgaagagtttaagcgtaagaacgaagttcagctggcgctggatggcggcgataatctgacctatatcgccccgacgatggtgaacctgaacctgacgcaagagcgttaccctgacgtggtgttccgcaaaacccgcgaacactaa

SEQ ID NO: 88793 - DNA, 678 bp, Enterobacter aerogenes
atgaaatgggactggattttctttgatgccgatgaaacgttgtttacgtttgactctttcagcggtttacagcggatgtttctcgactatagcgtgacatttaccgccaaagattttcaggactatcaggccgttaataagccgctgtgggtggattatcaaaacggcgccatcacctcgctacaattacagcatcagcgttttgatagctgggcggaacgtttgaacgtccctccgggcgaactgaacgacgctttcatgaatgcgatggcggaaatctgcgcgccgctgccgggcgctgtatcgctgctgaatgcgctgcagggcaaggtaaaaatgggcatcatcaccaacggttttacctcgttgcagcagactcgactggaacgaacaggcctgcgcgatcactttgatttgctgattatttctgaggaagtcggcgtcgcgaagccggatgcgcgtatcttcgattacgcgctggcgcaagcgggtaatccgtcgcgcgacagggtattgatggttggcgataccgccgagtcggatatccgcggcggcgtcaatgccgggcttgccacctgttggttgaatgcacaccagcaaacgctgccggcagacctgcagccagactggacggtgacctctttaagcgaactggagcaactcctgtgtaaacactaa

SEQ ID NO: 88794 - DNA, 447 bp, Enterobacter aerogenes
atgaacacgatttctaccctcagcacggctgatttatccaaagcctggcaaatcgaaaaacgcgcccacgcttttccgtggagcgaacaaacctttgccagcaatcagggtgaacgttatctgaattaccaactggcagtggatggagaaatggcggcatttgccattactcagattgtccttgatgaagcgacgctttttaacatcgccgtcgaccccgcctaccagcgccgcggcctgggacgggaactgctggaacatgttattgatgaagtagaaaaactcggcgtcgtcacgctgtggctggaggtgcgggcatcgaatgtcgccgccatcgcgctctacgaaagcttaggctttaacgaggcgactatccgccgcaattactaccctacggccgacgggcgtgaagacgcaattatcatggctctgccaatcagtatgtaa

SEQ ID NO: 88795 - DNA, 414 bp, Enterobacter aerogenes
atgacttcccgacgagactggcaattacagcaactgggaattacccagtggtcgctgcgtcgcccgggggcgttgcagggcgaaatcgctatctcgcttcctgaacatattcgtctggtgatggtggcggaaaccccgccgtcgctgactgaaccgctcattagcgatattctgcgcgcgctctcgattcgcgccgatcaggtactgcagcttacgccggaccgggtagcgatgctgccgcaaaatagccgctgcaacagctggcgactgggctgcgagacgccgctgtcgctggcgggcgcccaggtctcgacgcccgtttttgatgaacttcagagcagcgcgccggctcgcatcgcgctctggcaacaaatctgcgcacatgaacacgatttctaccctcagcacggctga

SEQ ID NO: 88796 - DNA, 1029 bp, Enterobacter aerogenes
atgtcagcttttaccccggcaagtgaagtcttgctgcgccacagtgatgatttcgagtccgcccgcgttctgtttgccggtgacctgcaggatgacctgcctgcacgtctggataccgcgggcagccgcgctcatacccaacaattccaccactggcaggtcctgaatcgccagatgggcgacaacgttcgttttagcttagtggccgaggccgccgacgtcgccgattgcgataccctgatctactactggccgaagaacaagccagaagcgctgttccaactgatgaacctgctctctctgctgccggtggggagcgatatttttgtgatcggcgaaaaccgcagcggcgtacgtagcgccgagcaaatgctcgccgaatacgcgccgctgaataaagtggatagcgcccgccgctgcggtctctaccacggccgtctggaaaaacagccctccttcaacgccgaacagtactggaacgagtacacgctcgataatctgaccattaaaacgctgccgggcgtgttcagccgcgacggccttgatgtcggcagccagctgctgctgtcgaccctgcaaccgcacaccaaaggtaaagtgctcgatgtcggctgcggcgccggggtgcttgccacggtactggccagtcattcaccgaaggtacgcctgacgctatgcgacgtcagcgctccggcggtcgaagccagccgcgcgacgcttgccgcgaatggttttgaaggcgaggtttttgccagtaacgtcttctctgaagtcaacggccgttttgacatgatcatctcaaatccgccattccatgacggcctgcagaccagtcttgaagcggcgcaggcgctgatccgcggcgcggtccgccatctgaacagcggcggcgaactgcgcatcgttgccaatgccttcctgccgtatccgcaggtgctggatgagacgtttggcttccacgaagtgatcgcccaaaccggccgtttcaaagtttaccgcacggtgatgactcgccaggccaggaaataa

SEQ ID NO: 88797 - DNA, 240 bp, Enterobacter aerogenes
atgttgcagcgagctttagggagtggttggggaattctgctgccgggcgtactggtgatggcgttaggcatgattggcctgccggtggaagcctggcgcgtgatgattgtgctggggttactactatcggcggcaatgatctggcaccgtcagttacgtcatttcgtactgttgccgtcaagcgtagcgctggtcagtggaataatgctgatcatgttgaatttgaagctgatgggataa

SEQ ID NO: 88798 - DNA, 1047 bp, Enterobacter aerogenes
atgactgcacaaacctggcgggctcattacgagcaaaaatatcagtattccttacgactttttttattacttaattgtgtttctgccgctctgtcgctgctcagtccgctgtttaccattgtcaccgtcacgctgccgagttcgctgatctgtgccgccagcctggggttcttgttatggaattggaaatttccaaaacagaaaataaatattcctgttatttctctgttatttggcatgctatgggcctggcacatcgtaataaaagcttcattgttaccacctccacattttaactttctggttattgccttattaagcatcctgtttattggaactatcgctttttctaacaatatcattgcctttactctacattcgctaccgacttttatggtgtgtctggtactggccggcggcgaacagtggatgcggatgttttactgctttgtcctgccagttgctggaattacgttgcaaaacattatgcaaaagcgcagcgataattttacccaagggctaatggataaactgttgcaagagcgtaacaccctgaacgatctcagtatgcttgatccattaaccggcctgtataaccgccgtggcctgcaaaaccggatggataacatcctggcagtggatacctgcgaacatttcatcctgcttttggatattgaccatttcaaagcctacaacgataactatggccatatgatgggcgaccaggcgctaatccaggtatccgcggcgattcgtaattccgtgcgttcacgcgatatcgtcgctcgatttggcggtgaagagtttatggtggtgctgaccagcagctcggcggaatccgccttccagacagcagagcgtattcgccaacgggtttacgatttaaaaatcgcgcatcgttttaacgaaagcgtcgccactcatgtcactatcagtatcgggatgacccctctggtgagtggcgacatcgacagtgcgataaaacgcgccgatagcgcgctatatgaagccaaaaaccagggacgtaatatcattctcgtcaactaa

SEQ ID NO: 88799 - DNA, 789 bp, Enterobacter aerogenes
atggcttaccgtaccttctccttcagcgatgacatcatctggcgtgcgccgcttgcgcccgtcgagcatgcattggcgaatgcggtacgggaaaagatcgctgcggtacgcccgcatctactggatttcctgcgtctggatgaagaagctcccccgtttgctctacccctcgcggaatggtcacgaccaacgtcccttagttcattactgtccacctattccgaccatatttatcgccatcagcccagccaaccgcgcgaacaaaaacccctgctttcactgtgggcgcagtggtatatcggcctgctggtgccgccgctaatgcttgcgttgcttacggaagaacaggcaattagccttgaaccggagcattttcgcgttgaattccatgaaagcgggcgcgcggcttgcttctggattgacgtgcatgccgaccatgatgcgttgatgcttcccgcgcaagcgcgtatggatatgttggtcaataaagccctgaaaccggtggtggaagcgctggaagctaccggcgacattaacggtaagcttatctggagcaataccggctatctgattaactggtatctcggtgaaatgaaaaatctgcttggcgacgagcaggtgaacgcgctacgtcaacactgtttttttgcaaaacagcaggccagtggcgaggataacccgctgtggcgaacggtagtcctgcgcgaaggtctgctggtacgtcgaacttgctgtcagcgttatcgcctgccggacgttcaacaatgcggcgactgcacgttaaagtaa

SEQ ID NO: 88800 - DNA, 1344 bp, Enterobacter aerogenes
atgtctgctaaccatgctgcgtttaatctgatatttcgctttgtagagaactatataagtcccgttgccgggcgcatttcttcgcagcgccacgtcatggctattcgtgacggatttatctcggccatgccgtttatgatcgtgggttcctttctcttagtcttcgcttatccgcctttttcgccggatactacctggggcttcgcccgcgcctggctggatttggctaaagagttcgaaggacgcattctgacgccttttgatatgaccatgggcatcatgtccatttatatctgcgcggcgatttcctacaacctgggcaagcattatgaaaaggcgcaccagctcgatcctttcatgtgcgccatgctgtcgatcatggcgttcctgctgatcgctgcgccaaaaaccaatggcagtttgccggttgatagtcttggcggcaccgggatctttaccgcgatcctggtggcgatttattgcgtggagatgatgcgattcctgaaggcgcacaatatcgggatccgtctgccggatcaggtgccgccgatgatcaaaaactcgttcgatttgctgatcccggtcctggtggtggtgctgacgctctatccgttgagtctgtttatccagcatcatttcgacatgctgatcccgcaggccatcatggctatctttaagccattggtctctgccgcagattcattaccggccattctgctggcagtgttgattggccacctgctgtggttcgcagggattcacggggcggcgattgtctccggcatgctgcagatgttctggctcactaatctggggatgaaccagcaggccctggcgcagggcgcgccgctgccgcatatttttatggaagcgttctggacgttcttcatcgttgtcggcggttccggcgcaactatggggctggtgttctgctatctgcgcagccgttccgcgcatttgcgctctatcggccgtttaagcgtggtgccaagcctgtttaacattaacgagccggttatctttggcacgcctatcgtgatgaacccggtattctttattccgttcctgctggcgccgatggttaacgcggtgattgcctgggcggccatgaagttggatctgatcggtcgtgttatctccgttgtgccgtggacggcgccggcgccgattggcggcgcatgggcgttgggatgggatttccgcgcggcgattctggtcgttgtcctcgcttgcgtatcggctatcatctacttcccgttctttaaagtgtacgaaaagcaactgctggcgcaggaagctgaagaggcgcagcgcgcggcgcaggagagcgagcagaccgcataa

SEQ ID NO: 88801 - DNA, 459 bp, Enterobacter aerogenes
atgagtctgcagtccgtgaggcagttttttgctgaacatgcccccgatattgaaatcatcgaattgaatcaaagtacggcgaccgttgcgcttgccgccgccgcgcatcgggtcgaaccggggcaaatcgctaagactttatctttaaaagtaaaagaccaggttatattgatcgtcgccaaaggtgatgcccggcttgataataaaaaactgaaagacgctttcggggcgaaagcgcgcatgcttagtagtgatgaagttgttacgctgactggccatcccgtcggcggcgtctgcccgtttggcctggaaaatccactgccggtttattgtgatgtctcgctcaagcagtattccgaagttctgccggcagcgggggcaattcatagcgcggtacgaatttcgcctgaacgtatggcgcaactgacagaagccgactgggtcgacgtctgcctgtag

SEQ ID NO: 88802 - DNA, 681 bp, Enterobacter aerogenes
atggaaaaaaatctcacaacacgatgtgtcgctatcgtagaaaaatgcgcaatgactgagacggcgcttcgttacattttaagtaacgatgcgggtaaaagatatagcattcatttttataaagatactcaggctctaaagcgcgaattcgcttccaaaaactttattgccgttattttttctctttccggtagcaggcgtattcgtctggaaagcctgctcttcttacacgagattgcgcaaactcgtcccgaaatacagcgaatcgtactggcggataatacggcggaaatgcgtctgatcagccatctgacgccatcaagcccgcaaactatcctcaataaatcatcttgtcttactcgcctgcaagaacgtttactgcagctaattgaacaggcgccgctggacaaagaaagtattctcaatcgcagctatagctcctgcgggcaaattcttagcccaaccgagcatacgatcctgcgttacatgacttacggctattcactgcccgaaatagccacccggcttgatagaaatatcaaaaccattcgcgcgcataaatttaatgcaatgaccaaactgggtgtgaactctgacattggcttgctcagcgcggcagacattctgctgtgtctgccggctaataatgacgacggccggggaatgcgcctggcgcaataa

SEQ ID NO: 88803 - DNA, 723 bp, Enterobacter aerogenes
atgttgccaggacaaggtaaatttggcgtcattattagtagaataccggttatgcaatccggcctgaaggctattttaagggaacatcttcctgattacgaactaagtttctgtggttcgcaggatgaactcacgttactgcagcttcgccgcgccgtactggtcgtcgttgacctctccggacacattgaacgcccgcgagatatttgtgagcattattattcgttaatgaatcaataccgggatattcactggatttttatggttggccactcctgcttccctttggcagtcgagtttctcatgcggccggagagttcgctgatttctgatagcgagccggtaagacgtttcattgaagtcatccgcgccggcaaactttctgctgagagaattagccagacacttttttcacccgagatggataacttaggtgatgacgctggcgagacggtcatcttaactttttcagaacgcaaagttttgcggcttctggcaaaagggtggggaattaaccagattgccgctttgttgaaaaagagcaataaaacgataagcgcgcagaaaaatagcgccatgcgccgactttcgttacgcagtaatgcagaaatgtatgcctggatcaatagcgctcaaggaatgaaggaactgaatctgtattcagcctatggagataacacggaatggaaaaaaatctcacaacacgatgtgtcgctatcgtag

SEQ ID NO: 88804 - DNA, 870 bp, Enterobacter aerogenes
atgtcgaccgcaagtacgatccctgtttttaaattatatggcgaagagcgcggttggccgacgccggatctgctgcattgtgaatccattttgcagcgcagcagcctttatgagtggcatatccgcgtgcatcaacatgccgaaatggtgcagctattgtatctgcacaaggggcgcgctgaaatcgaagttgagggcgcgacgagggtcatgaccgaagcctgtattcaggttgtgccggcattatgcattcatggcttccgtttttcccccggtactcagggatttgtcctgtcgctttcactgccgctgctgagccgctttgaaagccagtttggtcgaacgcttgatgtgctatcacagccgcagtgcgtggcggtaaaacgctcacgcggccatattcactcgctgtttaccgctttgcgtgaagagtactgcgaggagcatgatgcgcgagaaatgatgctgcattcgctgctgggggcgctcctggtctggttaaaccgccagtgtcagccgacatcggtgacagaagacaaagccgaacgtaagcgcagcgtcatgcgccatttttcccgcctgattgaaagccattaccgggagcatctgccgctggctgaatatgcaaagctagtggggctttccacaacgcatttaaattatttgtgtcgtgaatttcatggctgcagcgcattaggcgtcttacatcgacgcttaatgttagaagcgcggcgtaacctgcaatataccagcatgaccatcacacaactttctgattatttagggtttactgacgctgcttatttttcgagattctttcggcgatatagcggaatctcgccaaaagcatttaggaaagaaattaaataa

SEQ ID NO: 88805 - DNA, 1185 bp, Enterobacter aerogenes
atgagaacacaggttgccattattggcgcgggcccttcggggctactgttaggccaactgctgcataacgctggtattcataccgtcatccttgagcgtcagagcgcggaatatgtgctgggacgtatacgggcggggatcctcgaaaacggtaccgtcgagctattgcgcgaagcgggggtagcaaagcgaatggatgcggaagggctggttcatcatggcgtggagtttttatttgaaggccagcgggtaccggtaccgctcagcgagttgaccggcggtaaaagcgtgatggtctacggccagaccgaagtcacccgtgacctgatggcggcaagacgcgacagcggcgcgccgattatttatggcgttagcgaggtggcaatcgaggatgttaagagcgaccgaccggtggtctcttacgtgagcggcggcgaaaagtgtcgcctggagtgcgattttattgccggttgcgatggtttccacggcgtttcgcggcaaagcattccacgtgacattctcaaagagtatgaaagcgtgtggccgtttggctggttaggtttgctggcggacacgccgccggtaaatccggagctgatttacgcccatcacgaacggggatttgtattatgtagtcagcgctcactcactcgcagccgctattatctgcaggtgccgttaagcgataacgtctcggcatggtcagatgaacgcttctggaatgagttaaagcggcgtctgccggaggatctggcaagtaaggtagtgactggtcactcacttgagaaaagcattgcgccgctgcgcagctatgtcgtcgagccgatgcagtatggccggctatttctggtcggcgatgctgcgcatatcgtaccgccaaccggcgcgaaggggcttaatctggcggcgtcggatgtcaattatttatggcggatcctgcgcgagtattatcgccatggccgtgcggacctgcttgcgagctattcgcgcttcgctctcgaccgcgtatggaaaggggagagattcagctggtttatgactcgcctgctgcatgacttccctgaacaaagtgatttcgataaaaaaatgcagtccgccgaccgccgctactatctggggtctcgcgcagggctgacgacgattgccgaaaattatgtgggtttgccgatggagcaggtaacgtaa

SEQ ID NO: 88806 - DNA, 777 bp, Enterobacter aerogenes
atgcaggcagataaatcagagcagcgcgccgtcacccggttgtgcatccagtgtgccctttacttactccagcacggtgcggaaagcgcgctggttgaggagctttctacccgcctcgggcgggcgttaggtatggatagcgttgaaagcgctatctcctctaatgcgatcgtgctcaccacgattaaagacggcgaatgtctcacctccacgcgtaaaaacagcgatcgcggaattaacatgcatgtggtgacggaggtacagcatattgtgatcatggccgaacataagctgttggattacaaagacgtcgagaagcgcttctcgcagatcaaacccttacgctacccgcgctggctactggtattaatggtcggcctctcctgcgcctgcttttgtaaattgaacaatggcggttgggatggcgcggtggttaccttcttcgccagtaccgtcgccatgtatattcgccaactgctaacccaccgttccatgcatccgcagattaatttctgcattactgcctttgtcgccaccaccatttccgggctgatgctgcgtctgccggcatttagcgagacgccgactgtcgccatggccgccagcgtgctgttgctggttcccggctttccgttaattaacgccgtgaccgatatgttcaagggccatatcaataccgggctggctcgctgggcgatcgccagcctgctgacgctggcgacctgtatcggggtggtaatggcaatgaccatgtgggggctacgcggatgggcataa

SEQ ID NO: 88807 - DNA, 474 bp, Enterobacter aerogenes
atgggcataatctcttatcttttcgacctggtgcaggatatggcgctggcggccatccctgccgtcggctttgcgatggtgttcaacgtcccacagcgcgcgctgcgctggtgcgcgttactgggcgctatcggccacggctcgcggatggtgatgatgagcgcaggcttcaatatagaatgggctacctttctcgccgcgttactggtcggcagtattggcattcagtggtcgcgctggtatctggcgcatccgaagatatttaccgtcgccgcggtgatcccaatgttccctgggatttcggcctatacggcgatgatctcagccgtcaaaatcagccattttggttactccgaagagatgatgattatgctgttgagcaactttttaaaagcctcctccatcgtcggggcgctctctatcgggctgtctattcccggtctgtggctctatcgcaaacgcccgcgcgtgtaa

SEQ ID NO: 88808 - DNA, 540 bp, Enterobacter aerogenes
atgtcttcacgaattttaaccaccgacttttgcggtcttgacgatttcgtcgagaaccacgcggccaggctgcaaaaatcagccagcggcgccgtcgccgtatttgccaataacgccccggcgttttacgcgctgacgccggagcgcctggcgcagttgctggagctggaagctaaactggcgcgccccaccagcgatatcgcgctggatgcgcagttctttgatgagccgagcgccgcgcccgtcgccgtgccgatgggaaaattcgccatgtatgccggctggcagccggatgccgattttcagcgtctggcggcgctgtggggtatcgccctgacgcagccggtcaccccggaagaactggccgcctttgtcgcctactggcaggcggaaggcaaagttttccaccacgtgcagtggcagcagaagctggcgcgtagcgtgcaaatcggccgcgccagcaacggcgggcagccgaagcgcgatgtgaacgctattagcgaacccgataaccagatcccgcgaggtttccgaggatga

SEQ ID NO: 88809 - DNA, 744 bp, Enterobacter aerogenes
atgagcatgaaaaacgttggcgatctcatgaagcgcctgcaaaaaatgatgccagcccacgtgcaaccggcgtttaaaaccggcgaagagctgttagcctggcaaaaagagcaaggtaggctgcgttcagaggcgctggagcgggaaaatcgggcgatgaaaatgcagcgcacctttaatcgctccgggatccgtccattacatcagaactgttcattcgataattaccgggtcgaaaacgacgggcagatgatcgccctgtcccgcgcccgccagtacgttgaagagtttgacggcaatattgcgagcttcatcttctccggcaagccgggcaccggtaaaaatcatcttgccgccgctatctgcaacgagctgctgctgcgcggtaaatcggtattaatcatcaccgtcgccgatattatgtcggcgatgaaagatacctttggtaatcgggaaaccagcgaagagcaactgctcagcgacctgagccgggtcgatctgctggttatcgacgaaatcggtatgcaaaccgaatcacgctacgagaaagtgattatcaaccagattgtcgatcgtcgctcctcctcgaaacgcccaaccggcatgctgactaacagtaccatggatgaaatgaacaaactgctcggcgaacgcgttatggatcgcatgcgccttggcaatagcctgtgggtgaacttcacctgggatagctaccgcgatcgcgttaccggtaaagagtattga

SEQ ID NO: 88810 - DNA, 492 bp, Enterobacter aerogenes
atgaaatctttgcagacagctttttgcgccgctatcgcagccggcgcgttgatggcggcccctacctacgccgcctcctggcaggactcgctcaatagcgccgccagccagctcagcagcagctcccagcaaagcggcggcggtatgtcgatgtcgtccttaaccagcctgctcaacggcggcaaccaggcgctcacctccagcagcatgaacaatgccgccggcgttctctcttattgcgcgcaaaaaaaactgacctcggtcaccaacgccgacaacgttaaaaaccaggtactggataagcttggcctgagcacgccggagaaacagaaacaggataccggttatctggaagggctacagggattgctgagcagtaataacggccagcagttgaatctgaacaccctgggcagcagcccgctggctgaaaaagtgaagaccaaagcctgtgacctggtactgaaacagggcgttaacttcctgtcttaa

SEQ ID NO: 88811 - DNA, 2292 bp, Enterobacter aerogenes
gtgtcagagttgttatccatcgccttgtttctcgcctcggtggtgatctatgcctggaaagccggtcgcaacacctggtggttctctgccaccctggcggtgttggggctgtttgttgtgcttaatatcaccctgtacgccagcgactacttcaccggcgacggtattaacgatgcggtactctataccctgaccaacagcctgaccggcgcgggcgtcagtaaatatattctgccgggtatcggtctggtgctggcgctggtcgccgtatttggcgctctcggctggatattacgccgtcgccggcatcatccgcatcactttggctacagcctgattgcgctggtactggcgctggcctccgtcgacgccagcccggcgttccgtcaaatcaccgaactcgtgaaatcgcaatcccgcgacggcgatccggacttcacggcttactacaaagagccgtcgaaaagcatcaacaatccgcagcttaatctggtctatatctacggcgagagcctggaacgcacctatttcaataacgaggctttccccaaactaacgccggaactgggtaaaatcaaaagcgaagggctggatttcagcaacaccgcgcagcttcccggcaccgattacaccatcgccggcatggtcgcttcccagtgcggtattccgctgttcgcgccgttcgaaggcaacgcttccgcggcggtatccagcttctttccgcaaaatatctgtctcggcgatatcctgaaaaactccggttacgaaaactactttgtgcagggcgccaacctgcgttttgccggtaaagacgttttcctcaaatctcacggcttcgatcacctgtacggcgcggaagagctgaaaacaacggtggctgacccgtcctaccgcaacgactggggcttctacgacgacaccgtgctcgacgaaacgtggaaaaagttcgaagcgctctcccaatccggcaaacgcttttcgctgttcgctctcaccgtcgatacccaccaccctgacggctttatctcacgcacttgcgagcgtaaacgctatgacatggatggcaaaaagaacctctccttcagcgccgtggcctgtagccaggagcacatcgccgcgctgattgaaaagattaaggcctcgccgtacttcaaaaatacggtcatcgtggtttcgtccgatcatctggcgatgaagaacaccgcctgggattatctgaacaaacaggatcgcagcaacctgttctttatcctgcgcggcgaccagcctcaacaggatgtgctggccgtgaagcgtaataccatggataacggcgcaacggtattggatattctcggcggcgataactatatcggccttggccgcagcagcctttctgcagagtcgctctccactatcttcatgaacatgaaagagaaagtgctggcatggaaaccggacgtcattcgtctgtggaatttcccgaaagagattaagaatttcagcatcgactcgcagaagaacatgatcgcattctccggtagccacttccgtctgccgctgctgctgcgggtctctgatcagcgcgtcgagccgattccggaaagcgaatattccgcgccgctacgcttccaactggcggatttcgccccgcgcgacaacttcgtatgggtcgaccgctgctacaagatgggccaactgtggcggccggaactggcgctgtccaccgactggtgcgtctctcagggtcaactgggcggcgaacaaaaagtacagcatgtcgataagccgcagtggcagggcaaaaccgcctttaaagataccgtcatcgatatggagcgctataaaggcaacgtcgatacgttgaaaattgtcgataacgaaattcgctacaaagccgatagctttgtgtttaatgtcgccggcgcgccggaagaggtcaaacagttcagcggcatctcgcggcctgagctgtggggacgctggtctaatgcccagctcggtgacgaggtgaagattgaatataaaaaaccgctaccggaaaaattcgatctggtgatcaccgccaaagccttcggcccgaacgccaaccagccaataccggtgcgcgtcgggaaaagcgagcaagtacttactttagccaatgaagtgaccacgacgacgctgcatttcgacaatccggcgcgcagcaacatcttaacaatcactccgccggagccgcagtccaccaacgaaggcaatattgtcggccacgcgccgcgccagttgggcattggtatggtcgacattaaaatcgtcagtcgcgaaggttaa

SEQ ID NO: 88812 - DNA, 816 bp, Enterobacter aerogenes
atggagttcaccgccgttcctgccgtccagtttagcggcgcgcagttgactacgattttgaatgactgctttgccgattatctggtgccggtgtcgatgtcggtagatctgtttgtacagcgctttagcgccgaagggttaaacctgttgcagtctaaggtgtggctggcaggagatgaaccggcggctatcgggctcatcgctcgccgcgggcgcgatgcgcggctggcggcttttgctattcatcccggctttcgcggcaaaggacgagggcgacaattgatgacctcgcttatcgccgatttacgcgctcagggcgtacagcgaatgtggctggaggtgatccgcgataatcaccgggcggtggcgctgtatcagtcattgggctttaccgtgcgtcacgggctgtgcggctatctcagcgcggggcaagcggagccgcgtgaatccagcctggatgagtatgatttgctgagcctgctgcgtcatgcaagcctggagctggaagggcaactgccgtggctgctggatccgctgacctttattaccttgccctgtcgggcgttgacgctgcagcagcaggccttcgccgtactggcgaccaccgccagtaagccgcagctacagtttttatggctgacgccggcggcgcgtggacgcgggctggggcgggaaatgctgctcgcgctggctcaacagtttccgggattaagcacttcggtgaccatcccggaaaccttcacgccgctgtttaaatcggcgggctatgcgccgctggcgctgcagcagtacgagatgtgcctgcgcttgaactag

SEQ ID NO: 88813 - DNA, 534 bp, Enterobacter aerogenes
atgaaaactaacactataaaccccaccatcacttttcgcctgactgaagaaggcgatctgccgcagctgcccgcgctggaacgttcggcggcccaatcctttgcgcgcattcccgctttcgcctggctggcggaaagcccggtgatgagcgttgaacagcaccggcaatacctggaaaccggccatagtctattggcgctcgcgcacgataggcccgtcggtttcctgctgagcgagccgctggacgatgccctgtttattgtagaaatctccgtccatcagcagtggcagggccagggtattggccgcgccctgcttagccaaactatcgacaacgcccgccgcgacggcttcccggcggtgacgctcaccacctttcgcgaggtgccgtggaacgcgccattttatacccggttgggcttcaccatcctcaatgaactgcacctacccgaagggctggcggcgaaacgcgcgctggaaacggagcacggcctgacggcggaaacccgctgcgcgatgcgccttgatttttag

SEQ ID NO: 88814 - DNA, 864 bp, Enterobacter aerogenes
atggcctactcgatcgatatcatctcctgcatcaccgaccgctttatggcgctgaccgcgaccgaaaagcgcattgcgcagtttattctcgacgacgtcgccgccgcggcggcaatgccgattgccgaactggcgcgcctgaccgacaccagccaggcatcggtgacgcgctttgcgcgtgcgctgggctgcaaagacgtgcgcgaactgaaaatgaagctcgcccagtcgctggccattggtcagcgctttattctcgatgtgccggatctggaaggcgtacagggaatttatgaatcgatcatcagcgtactggaaaccaaccgccgggcgctggatcttgcggcgctgaaacgcgcggtggaatggattagcgacgcccgccaggtgcttgcgctgggtatgggcggcggctcgaccatctgcgcgcaggagatccagtatcgcctgttccgcctcgggttgccggtagtcagccagagcgacggcctgctggtacgcatgatgagttcggcggtgacggcgaaagatgtggtaattgtgctgtcgctcggcggctataccaaagagatgatcgaaagcgccgctatcgcccggcaatacggggcgaaaattgtcgctattaccccgccggaaacgccgctggcggcgcaggccgatatcgtgctgccgcttctggtgagcgaaaacgactatatctttaagcccagcgcctcacgctatgcgatgctggcgatggtggatgtgctggccaccgagctggcgatggccaataaaccgcaggcgaaagaccgcctgcgccgcattaagctggcgctcgacgaccaccgcgacggcgtcgaccgactgccgctcggtgattaa

SEQ ID NO: 88815 - DNA, 600 bp, Enterobacter aerogenes
atggacaaggttaaactggtggcgattttacgcggtattcagcctggtgaggcggcggagcatatcgccgcgcttatcgaggcgggttttcgctatattgaaattccgcttaactcgccggactggcagcaaagtattccggcgatggtgcgccagtttggcgagcgggcggtgattggtgcggggacggtgctgaaggttgaacaggttgattttctggctgaagccggggcaaaacttatcgtgacgcccaatacggccccggcggtgatccgccgcgcggtagataaggggatgttggtgtgcgccggctgcgcgacggcctccgaggcgtttagcgcgctggatgccggggcgcaatggctgaaaatctttccgtcatcggcatttggcccggactatatccgcgcgctgaaagcggtgttaccgccggaggtgccggtgctggcggtcggtggcgtgacgccggaaaacctgcacagctggcgtcaggctggctgcgcgggggcgggattaggcagcgatctctaccgcgccgggcagccgttggcgcgtacctgccagcaggcgcaacgctttatcgccgcctgcggcgattaa

SEQ ID NO: 88816 - DNA, 873 bp, Enterobacter aerogenes
atgaacgagtatattgccgtcgattggggctctacgcagctgcgggcatggcggatgcgtgatggcgaatgcatcgacaagctgaagctgccctgcggcgtcacgcgtctgaacgggcagcgcgccgaagcggtatttcagcagcagctggcgccgtggcgcggcgaccccgcgctgccggtggtgatggcgggcatgatcggcagcgatgccggttggcaaccggtgccttatctggcctgcccgctggcgctggaggcgctcaacggtcagttacatgaggtggcggaaaacgtgtggatcgtgccggggctgaaagtggcgcaggccgcagattacgacgtgatgcgcggtgaagaaacgcagctgctgggcgcctggcaactgatgcccgcagagtgttacgtgatgcccggcacccactgcaaatgggtgcaggtgcaaaacggcgtggtgcgccagttcgccacggcgatgacaggcgaactgcatcacctgctgcttaaccattcgctgctcggccagcaactgccggtacaacaacccgatgacgccgctttcgctctcggtatggaaaaagggctaactcagccggcgctgctggacgggttattcagcgctcgcgccgcgcgggtgttaggcgcgctggcggcggcttcggtgagcgattatctctccgggctgttgattggcgcggaggtggcgacctttagcgaacgctaccgcgccagccgcgtggtgctggttggtgagcactcgctcagcgcccgttatcagcaggcgatggcggcgcgtgggttagccgtttcctgttgttccggcgaggcggcgtttctttcgagtatagcgaggatgattgatggacaaggttaa

SEQ ID NO: 88817 - DNA, 1488 bp, Enterobacter aerogenes
atgaataatatgtcatttatgatttggttttccgtttatgcctgcgcgatgattaccttaggttggtacgtttcgcgcaaacagaaaaccggcgaagactttttacttggcggtcgttcgctgccgatgatcctcactctcggttcgacggtcggcaccatggtggggaccggctccagcgtcggcgccgtcggctttggctacagcaacggctgggccgggatgctttacggccttggcggcgcggtggggatcctgctggtggcatggttattcgcaccggtacgtaaacttcgcttcatgaccatgagtgaagaaatgtcgtattacaccggcggcagtaaaattatcaaaaacctcgtcgcgatacttatttttattgcctctatcggctggctgggagcgcatatattaggcggcggattatatctggcgtgggccagcggcattgatattaatgtcgcgaaaattattatcgctctggcttttgtggtttatgtcggtatcggcggctattccgcggtggtgtggatcgataccattcaatcaatcgtgctgttcgtcggctttattttaatggcggtgctggcggttcatcacgttggcggctggagccatattcagcaggccgtcgatccggcggcgcaaagcctgttcgcggtcgataaattaggcgtgttgccggcgctatcattggcgatggtgatcggcgtcggcgtgctggcgacgccttcttatcgccagcgtatttactcggcgaagaccgtctcctcggtgcgccagtcctttaccattaccggcctgctgtatctgggcttctctttcctgccggcgatcatcggtatggcggtatggaccatgaacccgcagctggaaaacagcggcttcgctttcttgtttgccactcaggtgctgccgccggtgctggcgatggcgatcctgattgccgggatgtcggccaatatgtcttccggcagctctgatgccatcgccgcggtgtccatcatgctgcgcgacctctacaccctggtgaccggccatatgcccgcgccggagaaagcgattcgcctgtcgcggatcttcctggttctggtgattgcgctggcgctgctgtttgccctgacctccaacgacatcatcagctacatcaccaaaatgatctcgatgattatgtccggcatgtttatctgcaccatgcttggccgtttctggacacgctttaactggcagggcgcggtcgctgcgctggccggcggcgccggggcatcggttgcggtgctggtggatagcgactggctggcgttctggggcaacccgtgtattccggcggtactgacgagcctggtggcttcggtggtggtgacgttactgaccccggccagcagcctgagccgcgagcaggcgctggaaatgattacccgcgagcgtgaaagccgcccaacgccgccgccgctgccgattggcaaacgtcatacctcacgcgggtaa

SEQ ID NO: 88818 - DNA, 393 bp, Enterobacter aerogenes
atgagtatcaaacgttatggcgtagaaggcggtaccggcaccggcggtcagcatctgccgtttgcccgcgcggtggaagccggcggatggctatatgtctccgggcagacgccgatgaaaaatggcgaagtcgtagaaggcggcatcgtcgaacaatcgcggctggcgatccagaactgcgtcgacatcatgagcgaagccggttacggcctggcggacgtggtacacgtgaaagtgatcctcaccgacgcgcgctatttccagtcgttcaataaggtatttcgcgagttctttggcgataatccgccagcgcgcatttgctgcgtggcggacctggtggtggattgcaaagttgaagtggatgtgacctgttttaacgctgcgcgacaataa

SEQ ID NO: 88819 - DNA, 1440 bp, Enterobacter aerogenes
atgaaagttgactggcttttcaaaaacgtcacggtgatcgacgggagcggcgggccgcaataccgtgctgatgtggcggtgaagggcgaccgaataatggctatcgccccggcgctggatgtcgcggcggagcaggtgattgatggtcaggggcgggtactggcgccgggctttattgatgtgcatacccatgatgatatcaacgtgatccgtatgcctgagtacttgccgaagctcagccagggggtgacgacggtgatcgtcggcaactgcgggatcagcgcggcgaccgctaccttacgcggggaagtgccggacccgatgaatctcctcggcgagcagcagcactttatctatcccaccgtggaggcttatgcccatgcggtggaagcggcgcggccgtcgctgaatgtcggcacgttaatcggtcacaccgcgctgcgtaataaccatatggacgatctgtttcgtccggcgaacgagacggaaatcgccggcatgcgcgtacagctacgcgatgcgctgcgccagggagcattagggctcagtaccgggctggcctatgccagcgccttccagtcgactaccgaagaggtgatggcgctggcggaagagctggcagccgggaagggcgtctataccacccatttacgttcagagtttgagccgattctcgaggcgctggacgaagccttccgcatcggccgccacggcaacgtgccggtggtggtttcgcaccacaagtgcgccggggcgaaaaactgggggcgtaccaaagagacgctggcgtttttcgatgagatgcgccagcagcaggatatcgcctgcgactgttatccctactccgccagctcgtcgacgctggatatgaaacaggtgaccgatgagtttgatatcgtgatcacctggtccgaagcgcagccggagcaggcggggaaaacgctgcagcagatcgccaatgagtggcaggtgagcctgcacgacgccgcggcgcggctgatgccggcgggcgctatctactacaacatggatgagcaggacgtacggcgagtgatgcgctatccggtcaccatgattggctctgacgggctgccgaacgatccgatgccgcatccgcgcctgtggggcgccttcccgcgggtactcggccactatagccgcgacgagcagctattcccgctgactaccgcggtacacaagatgaccgggctgtcggcggcgcgcttccagctggcggaccgcgggctggtgaaaattggctactttgccgacctggtgctgtttgacccgcagacggtgcgcgatgtcgccagtttctccgatccgaaacgaccggcggacggcattgaggcggtgatggtcaacggcgtgatgagctacggcagtgataagaaaattaccgggcgggcagggcgtttcctgcgccgtcggatggactaa

SEQ ID NO: 88820 - DNA, 1221 bp, Enterobacter aerogenes
atgaaataccattcagcaccgctcatcccgcacaaatccgccctcatgtccgcgccagctaatctactggcggaagaggtctgtctgcccgccgcgctgttaaaaaagtcggcgctggaaaataatatttcatggatgcagcgttacgccgacgcccgcggggtgtcgctggcgccgcatggtaaaacgacaatgacgccatggatttttcaggcgcagcagcgagcgggagcgtgggggattggcgtgggtagcgcctggcaggcgagcgcggcgatggccagcggcatccaacgcgtcctgatggtcaatcagctggtcggcaaggccaatatgcaggtggtcgcgcagctaaaagcccactatcgggcagtggattttatctgctgcgtcgatagcgaggccaacgtgcgcgccctctccgcattcttcgccgcccagggacaaacgctggatgtgctgattgaacttggcgtgccgggcgggcgctgcggctgtcgtagcgttgatgacgcgctggcgctggcgcagcgggttagcgatctgccggggttacggctacgcggactggaattgtatgaaggggtgctgcacggcgacgatccgcaaccgcaggtggaagcgctgttacaacaggccgcggcgcttgcctgccgcatggagccgctggttgacggcgaatttattctcaccggcgcgggcaccgtctggtatgacgtggtgtgcaacatctggctggcggcggcaaaaccgcgccgctgccgtatcgtcatccgccctggctgttatatcacccacgatcgcgggatctacgatctcgcacaacaagagctgatcgcccgcgatccgattgcctgcgatctcgccggcgatcttacatcagcgctggagctgatggcgatggtgcaatcggtgccggaggcggatcgcgcggtggtaaacttcggcaagcgcgactgcgccttcgacgccgggctgccgcagccgatcgcccattatcgtaacggccagcagttagcgctgcgcgcggagtcgatcgtcagtatcggcatcatggatcagcactgcatgctgcgcctggcgccaggcagcgatgtgcaggtcggcgatattctgctgttcggcacctcgcacccctgtctgacctttgataagtggaagacgttgctgctggtcgatgacgactacaacgtgctggacgagctcgacacgctgttttga

SEQ ID NO: 88821 - DNA, 1017 bp, Enterobacter aerogenes
atggagtcggtaactctatcgttacctgaagcttatgacctggcgctggaggtactcagcgccaatggatttagcgccgaccacgcggcggccattgcacgtaatgtagccgccggggagcgcgacggctgcgcttcccacggcctgtggcggctgttgggcattgtcgataccttgcgtaaaggtaaggtatcgcctgatgccgagccgcaaatccacgatcaggcgccggcgattgcgcgggcggacgccggcggcgctttttcgctgctggcctacgagcgcgcgctgccgttactgctggagaaggcgcggcacagcggcattgcggccttggcgattaaccgctgcgtccatttttccgcgctgtttgccgatattgagccgttgaccgaggcagggctggtggggctggcctgcacgccaagccacgcctgggtcgccccggcgggcggcactcgtccgctgttcggcaccaatcctatagcttttggctggccgcggcgggacaaaccgccgtttattgttgatatggcgaccagcgccgcagcgcgtggcgagatacagctgcatcagcgcgccggcaaagcgctacctgaagggtggggaatcgacagtcagggacggcaaacgaccgatgccgcagaggtgctgaacggcgcgatgttaacctttggcggccataagggctcggcgctggcggcaatggttgagctgctggccgggccgcttattggcgatatgaccagcgccgaatcgctggcgtgggataacggcgcgggaggtctcccctacggcggcgagcttatcctggcgctggatccgcagcgctttctcggcgcgcaggcacaagagcagctggagcgcgccgaaacgctgttcaatgcgatgcaggatcagggcgcgcggctgccgggcgagcggcgtttcgcctgccgccagcagagtgagcggcagggggtcgccatcagccgttcattgcatgatgagatttgcgccttgcgccagggtgggtaa

SEQ ID NO: 88822 - DNA, 1602 bp, Enterobacter aerogenes
atgaccattcactctacgcataacagtcaaacccgcgttgcagagtcgggtaagtttaaaaaacagctgaccctaaccgatctcacctttatcggcctgggggcaattttcggctccggatggttattcgctgccagccacgtcgcatccatcgctggtccggccgggatcgcatcgtgggtgatcggcggctttgcggtgctgctgctggggattgtctactgcgagctgggggcggcgctgccgcgcgccggcggcattattcgctacccggtcttttcccacggcgagctgatgggctatctactggggttcatcaccctgatcgctttctccagcctgatctcgattgaaattgtcgccgcccggcaatatgccgccgcctggtttccggcgctgacccaaccgggctccagttcgccgacgctgctggggtgggtggtgcagttcttgctactctgtttcttctttgcgcttaactactacagcgttaagaccttcgcccgatcgaacaacttcatcagcgtgctcaagtttctggtgccgctgctggtggtggtgacgctgttcgccttctttaaaccggagaacctgcacgctcaggggattgcgccattcggcatgtccggggtggaagcggcgatcagcgcgggcggaattatcttcgcttatctgggactgacgccgattatctcggtagccagcgaagtacaaaagccgcagcggactatccctattgcgttgattttatcagtggtgctgtcgacgattatctacgtgctgctgcagctggcattccttggcagtatccccaccgagatgctgaacggcggctgggccgaggtgagcaaacagttctcgctgccgtatcgcgatatcgccattaccctcggcatgggttggctggcctttatggtgataagcgatgcgattatctccccgagcggcaccggcaatatttatatgaacgcgacgccgcgggtgatctacggctgggcgaaggccggtactttctttaaggcctttacccatattgataaagcgtccgggattccgcgcccggcgctatggctgacctttgggctgtcgattttctggacgctgccgttcccctcctgggaacagctcattagcgtggtatcggcagccctggtgctgagctacgccatcgccccggtaaccgccgccgggctgcgccgcaacgcgccggatctgccgcggcctttccgcgtgcgcgccttcggcatcatcggcccggtatcgtttatgatctcggcgctgattgtctactggtccggctggaatacgctctcgtggctgttggggctgcaaatcgtgatgtttgtcgtctacgtgatgtgcaagggtaaggtgccggaacataccgtgagcctggcgcagcaggttaagtcttcgctgtggctgatcgttttttatgcgttgattatcctcttttcctggctgggcagcttcggcgggcttaatgttatcggtcacccctgggatacggtgctggtggcggcgatgtcgttggggatttactactggggcgcgcgcagctgcctgccgcaggctaactttagcggagacgaagaagagtaa

SEQ ID NO: 88823 - DNA, 1605 bp, Enterobacter aerogenes
atgaatgcatctcagaccatggcgggacggcagtttatcgccggacgccgtattgccagcggtgaggcgacgctattgagcctgcgggcggtggacggcgaagccaccggccaccgcttttatccggcttcctgtgaggaagccgctcaggccgcagaagccgcgcagcaggcctttgccgtctattcacaaaccacgccgcagcagcgggcgcgctttctcaacgccattgctgatgaactggatgcgctgggcgaggcgttttttgctatcgccgggcaggagaccgcgctgccgctggcgcggctacagggagaacgggcgcgcaccagcggccagttgcggatgtttgctggcgtgatcctgcgcggcgataccttcgccgcccgtattgataccgccttagccgaccgtcagccgctgccgcgcccggacctgcggcagtatcagcaggcgttagggccggtggcggtgtttggcgccagcaactttccgttggccttttccaccgccggcggcgataccgcctcggcgctggcggctggctgtccggtggtggtgaaggcccatccgggacatatggccaccgccgagctgaccgctgaggcgatcgtccgggcggtggtgcggtgcggtttacccggcggcgtattcaatatgattttcgggaccgatattggcgccgaattggtccgtcatccggcgattcaggccgttggctttaccggttcgctggccggcggtaaggcgctgtatcagctggcgcagcagcgaccgcagccaatcccgctgtttgctgaaatgtcggcgattaacccattgattattctgccgcaggcgctgcagacgcgggccgaggcgctggcaaacgagctggtggcgtcattcaccctcggcggcggccagttctgtacccgtccggggctgattctggcgctgtgcggcgccgggctggaacgctttaagtcggcgctgtgcgcggcggtagcgggctccccgccgcaggtgttgctcaatgcgccgacccttcagcactaccatcagggcgtggcggcgcttgcggcgcacccgcgtatcgagaagctggcgaacggcatcgccgccggcgccgggcaggcgcagaccctgctgtggcaggctcaggccgaggatctactggcgcaggatacgctgctgcagactgaggttttcggcccgttatcgctactggtggaagtggacgacgtggcccaactgcaggcggtggtgaaagcgctgcaggggcagctcaccgcgacgctgcatgccgaggcggatgatagcccgctggcggcgagccttctaccgctgctttgtgagaaggccggacgggtgctgtttaacggttatcccaccggcgtggaagtgtgcgatgcgatggtccacggcggcccgtggccggcgaccaccgacgcacgcgggacctcggtcggcagccgggcgattgaacgctttctgcgcccggtctgtctgcagaacgcgcccgccgccctgttaccgccggcgctgcaggatgcgaaccctttgaacctgctgcgcctggtcaacggccagtggacccgggaagcgatttcctcccctcattga

SEQ ID NO: 88824 - DNA, 921 bp, Enterobacter aerogenes
atgagcaaaaaagtgattcactggagtggcgtattcccggcggtcagcacgcagtttcgtagcgattactccctcgatttagatgccactcacgcggtgatgaaaaacctggtgaaagatggcgtttccgggctggtggtgtgcggcagcgtaggtgaaaacacctcgctgagcaccgacgaaaaactgcagattatcgaggtggcgaaggatgccgccggcggcaaaattccggttatcgccggggtggccgagttcaccaccgcctttgcccagaaaatggcgaaagaggcggagcgcgtcggcgtcgacgggatcatggtgatgccggcgctggtctactcctcaaaaccgcatgaaaccgcggcccacttccgcagcgtggcgagcgctaccgacctgccgattatggtctacaacaacccgccgatttacaaaaacgacgtgacgccggacattctcgccaccctgaccgactgcgacaacatcgtctgctttaaagactcctccggcgatacccgccgctttatcgacctgcgtaacaccgttggcgaccgcttcgtgctgtttgccgggctggatgacgtggtggtggaaagtattgccgtcggcgcggaaggctggatctccggaatgtccaacgccttcccgcgcgaaggggaaacgttattccgtctcgcccgccagcagcgttacgaagaggcgatggcgttgtaccgctggttcatgccgctgctgcatctcgatgcgcgtccggatctggtgcagtgcatcaagctgtgtgaagagttgctgggccgcggtagcgccattacccgtccgccgcgtctggcgctggaaggcgaaacgcgccagcaggtggtggcgatcgttgaacaggcgctggccactcgtccgacgctgccggatgtcggcctctga

SEQ ID NO: 88825 - DNA, 825 bp, Enterobacter aerogenes
atgatcggtgtttctgatgcgccgccgccgcgggcggttaaccaacctgagctggccgtcgatgagctgagccagatctgcgaagggctggcgcgccagcggccggaaaatatgcccgcgctgctgaatgcgctggcgctgattgcgcccctgctcaatgccatccctaatgtggtcttttttatcaaagatcgtcaggcgcgctatctgctggcgaacctgacgctggcccgccgctgtggtttcaaaagcgtttcctcgctgctgggcaaaacctccgctgatgtctttccttccgcgctgggtcagggttataccgagcaggatcttcgggtgttgcgcgaaggcgtgaccctgcgcgatcagctggaaatgcatctctacaatggccgcgagcgcggctggtgtctgacgcagaaattggcgctacgcgatatcagcgggcaggtgatcggcatggccgggatctcgcacgatctgcaggaggcccacgcccgccatccggcgtggcagcggctggcgatcgtcgacgatcatatccgccgccattatcaccggccgatcgccatggaagagttgaccgccttaagcggaatgtcgattgcgcagatcgaacgctactgcaaacggatctttcatctcactccgcggcaaatgatccacaaagtgcggctggaaaaagctaccgaactgctggctggcgatacgccgattaccgatatcgccctgcagtgcgggtataccgatcacagcgcctttagccgccagttcaaggcgatgaccggctcgacgccgcgcgattttcgcctcacgctgctcggataa

SEQ ID NO: 88826 - DNA, 948 bp, Enterobacter aerogenes
atgaccgcgccacgcccccctattacgttgagagctattgattcacacaccggcggcgaaccaacccgcctgatcgttgacggattccccgatctcggcggcggcagcatggcgaagcgccgcgaccgcttcgcccgcgacttcgaccattggcgtcaggcggccattctcgaaccgcgcggtaatgacgtactggtcggcgcgctgctgtgcaaaccggtctcggcggcggctaccgctggcgtgattttcttcaacaatgccggttttctgaatatgtgcggccacggcacaatcgggcttatcgcctcgctggcctggcttgggcgtatccagcccggcgtacatctgattgaaacaccggtcggcgacgtaagcgccacgttgcacgacgatggcagcgtatcggtgcaaaacgtcccggcccgccgctggaaaaaacagatccgcgttgaaaccgcgctgggtcccgtcatcggcgatattgcctggggcggtaactggtttttcctgattaacgaccacccgtttgccattacccccgaacatattccacagctcaccgactacgcctgggcagtgcgcgaggggctggaagccgcggggatccgcggcgacgacggaggagttatcgaccatatcgaactcttcgccgatgacgataccgccgacagccgcagcttcgtactctgtccgggaaaggcctgggatcgctcgccgtgcggtaccggcaccagcgccaagctggcctgcctggcgcaggatggcaagttgcagccgggggaaatctggcggcaggccagcatcatcggtagccagtttaccgccagctaccagcgcaccgctgaaggcatcatcccaacgatccgcggcgaagcctgggtctgcggcgataaccaattgatcctcaaccctgacgatcccttctgctgggggatcgcgccgtga

SEQ ID NO: 88827 - DNA, 1110 bp, Enterobacter aerogenes
gtgaagcagtgcgacgtcatcgtgatcggcgccgggatcatcggcgccgcctgcgcgtggcagctggcgaagcgggggcagagcgtgacgcttatcgatgacggtcagcctggcgcgacggcggccggtatgggccatctggtgtgcatggatgacgaccccgccgagcttgcattatcggcatggtcgctggaacgctggcgcgctatcacgccacggatgcccgacaattgcgcctggcgcggctgcggtacgctgtggctggcggaaagcgaagaagagatggccggggctggcgacaaacagcggcggatggccggccatcaggtgcacagcgaactccagaccccgcagcagatcgccgggcgcgagccgctgctgcgcgacgggctggccggcggcctgtgggtgccaggcgatggcatcgtctacgcgccgaacgtcgcccgctggttgattactgatgccggaaaccatcttacctgcctgcgcgatagcgtacagacgatcgaagagccgcaggtgctgctcgccagcggccaacggctacaggcgcgggcgatcgtggtggcctgcggacttgaagccaacgcgctgttagcggaaaactggctgcgaccgaaaaaaggccaactggcgattaccgatcgctaccagccgcgggtgcatcaccagctggttgagctgggttacggcaccagtgcccacggcggcggcacctcggtggcgtttaaccttcagccgcggccaaccggccagctgctaattggctcttcgcgtcagtttgataaccgcgagcgcgagttggatctgccgttgctggcgcagatgctcgatcgcgcccgccacttcgtgccggcgctggcgacgttgaatatcatccgctgctggagcggcctgcgcgccgcctcgcaggatggcaacccgctgatcggcccgcaccccacccgccgtggtttatggctagcgctgggccatgaagggctgggcgtcaccactgccccggcctcggctgaactgctggcggcgcagatcctcgatgaacgctgcccattggctcccgacgcctggctcccggctcgtttatctcaacaggaggcgatcgcatga

SEQ ID NO: 88828 - DNA, 264 bp, Enterobacter aerogenes
atgaatgccacgctcactatcatcgttgatggcgaagcgctgacggtgccggaagggatcagcgtggcggcggccctggcgttgaccggcgaccccaccacccgccaggcggttaacggcggcctccgcgcgccgttttgcggcatgggcgtctgccaggagtgccgggtcaccgtcgatggcctacgggtactggcctgccagaccctgtgccggtccgatatgcaaatagaaaggagccgcgatgaacacgctgcgctgtga

SEQ ID NO: 88829 - DNA, 1263 bp, Enterobacter aerogenes
atgaacacgctgcgctgtgacattttaatcctcggcgccggccccgcagggatggcggccgcgctctccgccgccgcctgcgataaacaggtgattattctcgacgataatcccgcccctggcgggcaaatctggcgtgccggtccgcaggcgacgcagcccgccctggcccggcgctaccgcgacgccatcgccgcgtctgccgccatccggttagtgaacggcgcgcggctgattgcccgcccctccgcgtacagtgtgctgtttgaaaccgccgacggcggtggtgtggtttactggcagaaactgatcctctgctgcggcgcgcgcgagctgtcgctgccctttcccggctggaccttacccggcgtgaccggcgcgggcggcctgcaggcgcaaatcaaacagggcctggcgctgaaaggagaaaaggtggtgattgccggcagcggtccgctactgctggcggtggcggatacggtgaacaaggccggaggcgaagtgacgaatataattgagcaagcgccgctaccggcactgctgcgcttcgccggtgggctgtggcgctggccgcagaagctgcgccagttagcgacgctggctccgaaaggctatcttagcggcacgcaggtgatccgcgctcacggcacaacgcggctggaagccgttacgttgcgccagcgcggcgtcgagcgaactatcgcctgcgatcggctggctatcggctacgggctgatacccaatatcgagacggcgctgctgtttggctgcgccacggcgcaggaggcgatacaggttaaccgctggcagcagaccagcatcgcggatatctacgccgccggcgagtgcaccggtttcggcggtagcgaactggcgctggcggagggcgaaatcgccggttttgccgctgccgggaccagccatcaagcgcaggcgttatttgcccgccgcgcccgctggcagcgcttcgccgacgccataaaccgcgccttccggctggcggaatctttgaaaaacgcggcgacgccggagagcctgctgtgccgctgcgaggatgtgcgctgcggcgatgtggcggcagccggaggctggccgcaggccaaacttacccagcgctgcggaatgggcgcctgtcaggggcgcacctgcgccgccagcgcccgctggttatatggctggccgctgccgcagccgagagaaccgctggcccctgcccgcgcggaaacgcttattgccctcgccaggttgagcgccgagccgtaa

SEQ ID NO: 88830 - DNA, 441 bp, Enterobacter aerogenes
atgcatgattcattaaccattgcgctgctgcaggcgcgggaagcggcgatggcccatttccggccgatcgtcaaacgccacaacctgaccgaacagcagtggcgtattgtgcgtatccttgcggaaaacccatcgatggatttccacgacctggcctggcgcgcctgcattttgcgccccagcctgaccgggattctgacccgcatggagcgcgacggtttagtgctgcgcttaaaaccggtcaacgatcagcgcaagctctacctgtcgctgacgcccgccgggctggcgctgtatgagagcgcccaggcgcaggtggaagaggcctaccggcagatagaagcgcagtttacggcggagaagatgcgtcagttgaccacgctgctggaggagtttattgcgcttggcgtccctgccgggcgcggtgatgaagaagagtag

SEQ ID NO: 88831 - DNA, 633 bp, Enterobacter aerogenes
atgaaaggtaccatcttcgccgttgcgctcaatcatcgcagccagctcgacgcctggcgcgaagcgtttcaacaggccccctacaagacgccgccgaaaaccgcggtctggttcatcaaaccccgtaataccgtaattggcgatggcgaagccattccccatccgcagggcgagaccgtacaaagcggcgcgacggtggcgctgatagtcggcaaaaccgcgcgtaaagtggcggcggaagaggctgcagactatatcgccggctacgcgctggctaacgacgttagcctgccggaagagagtttttatcgcccggcgatcaaagccaaatgccgggatggcttctgccccatcggcgcgctgtcggcggtacgcaacgtcgataacctgaccatcatcaccgaaatcaacggccgcgaggcggatagctggcataccggcgatctgcagcgaaatgccgcgcagctgcttagcgccttaagcgagttcgccaccctcaatcccggcgacgcgatccttatcggcacgccccactctcgcgtcacgctgcgccccggcgaccgcgtacgtattctcgccgacggtttcccggcgctcgaaaacccggttgtcgcagaaggagagctggcatga

SEQ ID NO: 88832 - DNA, 765 bp, Enterobacter aerogenes
atgaaacaggcacgtattgaatggcaggaacaggtacgcgacgtgctggtcgatgaacgcgaccaggtgcgcctgcccgatggcacggtattgaaagaaggcgaattccgctggctgccgcccgccgacggcacgctgttcgcgctggggctgaattacgccgaccacgccagcgagctggagtttaaaccgccaaccgagcctttggtgttcatcaaagcgccaaacacctttattggccaccagcagcagtcggtacgcccggataacgtcgaatacatgcactacgaagccgaactggtggtggtgatcgggaaaaccgcgcgccacgtcagcgaagccgaggccatggattatgtcgctggctataccgtgtgcaacgactacgcgatccgcgactatctggaaaactactaccgcccgaacctgcgggtgaaaagccgcgataccctgacgccgattggcccgtggatcgtcgccaaagaggcgatcccggatccgcataatctggccctgcgcacctgggtcaacggcgaactgcgccagcagggcaccaccgccgatctgatcttcagcatcccgttcctcatcgcttatttaagcgaatttatgaccctgcaaccgggcgacatgatcgccaccggcacgccgaaagggctatccgatgtggtgccgggcgacgaggtgatcgttgaagtcgagggcgtgggccgcctggtcaaccatatcatcagccagcaagcgtatgaggagacactgtcatga

SEQ ID NO: 88833 - DNA, 858 bp, Enterobacter aerogenes
atgggtaagttagcgttagcagcaaaaatcactcacgtgccgtcgatgtatctatctgagctgccggggaaaaaccacggctgccgtcagggcgctatcgacgggcataaagaaatcggcaagcgctgccgtgaaatgggcgtcgataccattatcgtgtttgatacccactggctggtcaacagcgcctaccacatcaactgtgccgaccattttcagggcgtctacaccagtaacgaattgccgcattttattcgcgacatgacctacgactacgacggcaacccggagctgggccacctgattgccgacgaggccgtcaagcttggcgtacgcgccaaagcgcacaatattccgagcctgaagctggagtacggcaccctggtgccgatgcgctacatgaatagcgataagcatttcaaagtggtgtccatttccgccttctgtaccgttcacgattttgccgacagccgcaagctgggcgaggccatcctcaaggccatcgacaaatatgacggcaccgtagcggtgctggccagcggttcgctgtcgcatcgctttatcgacgaccagcgcgccgaagaggggatgaacagctatacccgcgagtttgatcatcagatggatgagcgcgtggtgaagctgtggcgcgagggcaaattcaaagagttctgcaccatgctgccggagtacgccgactactgctacggcgaaggcaacatgcacgacacggtgatgctgctcggcctgctgggttgggataaatacgacggcaaggtggagtttatcaccgagctattcgccagttccggtaccggccaggttaacgccgtgttcccgctgccggcgcaggcgtaa

SEQ ID NO: 88834 - DNA, 381 bp, Enterobacter aerogenes
atgccgcattttatcgccgagtgtagcgacaatatccgcgaacaggccgatttaccggggctgttcgctaaagtcaacgaggcgctggccgccaccggtatctttccgattggcggcattcgtagccgcgcccactggctcgatacctggcagatggccgacggcaagcatgattacgccttcgtgcatatgaccctgaagatcggcgccggacgcagccttgagagccgtcaggaggtgggcgaaatgctgttcgcgctgatcaaagcccactttgccgcgctgatggagagccgttatctggcgctgtcgttcgccatggaagagctcgacccgacgctgaactacaaacagaacaacgtgcacgcgttatttaaataa

SEQ ID NO: 88835 - DNA, 804 bp, Enterobacter aerogenes
atgctcgataaacagacccgtaccctgattgcccagcggctgaaccaggccgaaaaacagcgtgaacagatccgcgcgatctcgctggattatccgtcgatcaccattgaggacgcctacgccgtccagcgcgagtgggtcgagatgaagatcgccgaaggccgcgtgctcaaaggccacaagatcggcctgacctctaaagcgatgcaggccagttcgcagatcagcgagccggactacggcgcgctgctcgacgatatgttctttcacgacggcagcgatattcccaccgaccgctttatcgtgccgcgtattgaagtcgagctggccttcgtgctggccaaaccgctgcgcggcccgaactgcacgctgtttgatgtctataacgccaccgactacgttatcccggcgctggagcttatcgacgcgcgttgccacaacatcgacccggaaacccagcgtccgcgcaaagtgttcgacactatctccgacaacgccgccaacgccggggtgatcctcggcggccggccgattaaaccggacgagctcgacctgcgctggatctccgccctgctgtatcgcaacggcgtgattgaagagaccggcgtcgccgcgggcgtgctcaatcatccggccaacggcgtggcctggctggccaacaaactggcgccatacgatgtccagctcgaagccgggcagattatcctcggcggctccttcacccgcccggtcccggcgcgcaagggcgataccttccacgtcgactacggcaacatgggcgccatcagctgccgctttgtttga

SEQ ID NO: 88836 - DNA, 798 bp, Enterobacter aerogenes
atgaacaacgcatttaaagaggcgctcaaggccgggcgtccgcaaatcggcctgtggctggggctgaccagcagctacagcgccgaactgctggccggcgcgggcttcgactggctgctgatcgacggcgaacacgcgcccaacaatgtacaaacggtgctgacccagcttcaggccattgcgccctaccccagccagccggtggtgcgtccgtcgtggaacgatccggtacaaattaaacaactgctggacgtcggcgcacagaccctgctggtgccgatggtgcagaacgccgaagaagcgcggctggcggtcagagccacccgctacccgccagccggcatccgcggcgtcggtagcgcgctggcccgcgcctcgcgctggaatcgcgtcccggattatatccaccgggccaatgacgccatgtgcgtactggtgcagattgagacccgcgaagcgctgaaaaatctgccgcagatcctcgatgtcgaaggggtggatggcgtgtttatcggcccggcggatctcagcgctgatatgggccacggcggcaacccacaacacccggaagtgcaggccgccattgaagatgccatccagcaaatccgccaggccggaaaggcgccggggatcctgatggccaatgaacagctggcgaaacgctatctcgaactgggcgcgctgttcgtcgccgtcggcgtcgataccaccctgctggcccgcggcgcagaagcgctggcggcccgttttacccacaccgcaaccaccacaaccgataacaataaatccgtctattga

SEQ ID NO: 88837 - DNA, 1359 bp, Enterobacter aerogenes
atgactacctctaccctgcaacacaatgataataaagccgttgaagtagaaaaccgggtgatcaaaaagctgttccgccgcctgatcaccttcctgtttgttctctttgttttctcatttttggatcgcattaatatcggcttcgccggcctgacgatgggtaaagatctcggcctgacctccaccatgttcggcctggcggcgacgctgttctacgtcacctacgtgctgtgcgggatccccagcaatatcatgctggcgaaagttggcgcgcgccgctggatcgccgggatcatggtggtctgggggatcgcctcgacctgcaccatgttcgccaccagcccgcatacgctgtacatcctgcggatgctggtcggcatcgccgaagccggttttctgccggggatcctcgtctatctgacctggtggttcccggcctaccatcgcgcccgcgccaacgccctgtttatgatcgccatgccggtgaccatgatgctcggctcgatactttccggctatatcctggcgctcgacggcctgtggaacctgaaaggctggcagtggctgtttctgctggaaggcctgccgtcggtggtgctcggcgtcgtcacctggttcttcctcaacgacacgccggataaagccaactggctggacaacgaagagaaacaggcgctgaaggcgatgatcgatcgcgaacgggaacatgcggcgatcgtcccggcttcgccgcgttccacgctgcgcgaagtactgacgccagcggtgctgatgtataccctcgcctacttctgcctgaccaataccctcagcgccattaatatctggacgccgcagatcctgcagagcttcaacaccggcagtagcaacatcatgattggcctgctggcggcgatcccgcagttctgcaccattttcggcatgatctggtggagccgccgctccgaccggcgcaaagagcgcaagatgcataccatcctgccctacctgttcgccgcggcgggttggctgctggcttcggcaacgcaccacagcctgatccaactgatcggcattattatggcttcggtgggatcctttaccgcgatggccattttctggaccaccccggatcgggtgatcagcctgcaatcgcgcgcggtggcgctggcggtgatcaacgccatcggcaacgtcggctctgccgtcagcccgctgttgatcggcattttgcgcgataccaccggcagctttagctccgggctgtggtttgtcgccgggctgctgatcgtcggcgcgctggtgctcacccgcattccgatgagccagcgcgaggacgccgccgccgcgccgggcttagcggcgcaaaaaggccactaa

SEQ ID NO: 88838 - DNA, 891 bp, Enterobacter aerogenes
atgtgccagcattcaatcgccaacatcgacatcaataaagattacgacgagagtctgggcaccgaagaggtgcactatcagtcgtttgcccgcatggcggccttttttggccgcgacatgcaggcgcatcgccacgaccgctattttcagatgcactttcttgataccggacagattgagctgcagcttgatgaccaccgctattcggtgcaggcgccgctgtttgtgataacgccgccctcggtgccgcacgcctttattaccgagtccgatagcgatggtcacgtgttgacggtgcacgaagagctcatctggccgctgctggaggtgctttatcccggcacgcgggagaccttcggcctgccggggatctgcctgtcgctggcggataaacccgacgagctggcggcgctggcgcactactggcagctgattcgccgtgaatccaccgctcagttgccggggcgcgagcataccctggcgctgctggcgcaggcggtatttaccctgctgctgcgcaacgccaggctcgacgatcatgccgccagcggcatgcgcggcgagctgaaattattccagcgctttaaccagatgatcgacagccacttccatcaacactggacggtaccggattacgccagcgagctgcatctgaccgaatcgcggttgaccgatatctgccgccgcttcgccaaccgcccgccgaagcggctgatattcgaccgccagctacgcgaggcgaagcggctgctgctgttttccgatagcgcggtcaatgagatagcctggcagctggggtttaaagatcccgcttattttgcgcgcttttttagccgccaggtcggctgctcgccaagcagctaccgagcgcaaaaagtaccggtgtcgtaa

SEQ ID NO: 88839 - DNA, 1563 bp, Enterobacter aerogenes
atgaaacctgaagatttccgcgctgacgcgaaacgcccgttaactggcgaagagtatttaaaaagcctgcaggatggccgcgaaatttatatctacggcgagcgcgtgaaggatgtcaccacgcatccggccttccgtaatgccgcggcttccgtcgctcagctgtacgatgcgctgcacaaaccggagatgcaggattccctgtgctggggcaccgataccggtagcggcggctacacccataaattcttccgcgtggcgaaaagcgccgacgatctgcgccagcagcgcgacgccatcgccgaatggtcacgcttaagctacggctggatgggccgcaccccggactacaaagccgctttcggctgcgcgctgggcgccaacccggcgttttacggccagttcgagcagaacgcccgcaactggtacacccgcattcaggaaaccggcctgtactttaaccacgctatcgtcaacccgccgatcgaccgccacaagccggctgatgaagtgaaggatgtctacatcaagctggaaaaagagaccgatgccgggatcatcgtcagcggcgcgaaagtggtcgccaccaactcggcgctgacccactacaacatgatcggcttcggctccgcacaggtgatgggcgagaacccggacttcgcgctgatgttcgtcgcgccgatggatgccgaaggcgtcaagcttatctcccgcgcctcctatgagatggtcgccggcgcgaccggatcgccgtacgactatccgctttccagccgtttcgacgagaacgacgcgattctggtaatggataaggtgctgatcccatgggagaacgtactgatttatcgcgactttgaccgctgccgccgctggaccatggaaggtggtttcgcccgcatgtacccgctgcaggcctgcgtgcgcctggcggtaaaactcgactttatcaccgccctgctgaagcgttctctggaatgtaccggcaccctcgaattccgcggcgtacaggccgaccttggcgaagtggtggcgtggcgcaacatgttctgggcgttaagcgattccatgtgctcggaagcgacgccgtgggtcaacggcgcatggctgccggatcacgccgcgctgcagacctatcgcgtgatggcgccgatggcctacgccaagatcaagaacatcatcgagcgtaacgtcaccagcggcctgatttatctgccgtccagcgcccgcgatctgaacaacccgcagatcgaccagtatctggcgaagtacgtgcgcggctccaacggtatggatcacgttgaacgtatcaagatcctcaaactgatgtgggacgccatcggcagcgaattcggcggccgccatgaactgtatgagatcaactactccggtagccaggatgaaattcgcctgcagtgtctgcgccaggcgcagagctccggcaatatggacaaaatgatggcgatggttgaccgctgcctgtccgagtacgaccagaacggttggacggtgccgcatctgcacaataacgctgatatcaacatgttggataagctgctgaagtaa

SEQ ID NO: 88840 - DNA, 513 bp, Enterobacter aerogenes
atgcaattagatgaacaacgcctgcgttttcgcgatgccatggccagcctgtcggctgcggttaacgttgtcaccaccgcaggtgaagccggccgctgcggcattaccgccacggcggtttgctcggtgacggatacgccgccatcggtgatggtttgtatcaacgccaacagcgcgatgaacccggtatttcagggcaacggcaagttgtgcatcaacgtgctgaaccacgagcaggaaatcatggcccgccacttcgccgggatgaccggggtgacgatggaagagcggtttgccctcagcggctggcagcagggcgcgctcggacagccggtgctgaagggttcgctggccagcctcgaaggcgagattagccaggtgcaaaccattggtacccacctggtgtatctggtggagatccgcaatattaccctgagcccgcaagggcacggcctgatttactttaaacgccgtttccacccggtaatgatggaaatggaagtcgcggtgtaa

SEQ ID NO: 88841 - DNA, 6807 bp, Enterobacter aerogenes
atgctgatggtggtggcggaaacgacccgctctcatcgggcgggcgtgtcgccgcaatccggcgccgacgcgcgaaccgggtcgacgctgacgtccaccctggcgccgctggcttttagctttctgctcgctttttcctgtctcactccggctaaggcagcgattgtcgccgataaccatgcgcccggcggccagcaaccgcagatcgccaatagcgccaatggcacgccgcaggtcaatattcagacaccgagcggcgcaggcgtttcacgcaacgtctacagccagtttgatgtcgatgggcgcggcgtggtgctgaataacagccacgctaacacttcaacccaactggccgggatggtcgccggcaatccgaatctggcgaaaggggaagccagagtgatcctcaacgaggtgaatacccgcgatccgagccggctgaatggctatatcgaggttgccggacaaaaagcgcaggtggttatcgctaaccctgccggaattagctgcgacggctgcgggttcatcaatgccaaccgcgcgacgctgacgacaggccaggtgcagtacggtaacgggcagattagcggttatgatgtcaatcgcggcgaaattatcgtacagggcggcggccttgatgcgagctcggtagacagcacagacctgctcgcccgcgcggtgaaaatcaacgccggggtttgggcgcaggagctaaaggtcaccgcagggcgtaatcagatcgatgcggcgcacagccgaacgacggcaaaatcagccgacggcagtgcgctgcctgcggtggcgatagacgtcagcgccctgggcgggatgtacgcccataaaattcgtcttgtcggtaccgagcgcggcgtaggcgttcacaatgccggcaatatcggcgcggcggcgggggatgtagcaatcagcgctgatggcgcgctcagcaacagcggcgtgattcagtccgcgcagaatctgcaactgtccgttaagggcgatcttcacaaccaggggcagctgtacgccggaaaagatagcgtggtgacggccagcgcgacgctaaccaatgacggcatgatcgccgcgcaaggcgatacgcggattgccgccaacgctttgcgtagcgcgcaaaacagtacgctcgccgccggattaaatagcgatggttctaccgccagcagcggcgcgctgacgctgaatagccagagctcgctggcgctgaatggccgcaatatggcggcaggaacgctgacggcgcagggcaggacggtggatcttgataacagtcgaacctcgggggcgcggatcgtggtcagcgccgcgtccggcgatatcaccacccgagatgcggtggtggcggccagcgaaaaactccagttggccaccagcggcaaactcaacaaccacagtggcctgttgacggccagccagcttgagctgaaagcaatggcgctggataaccaacagggcgtaatccagcagatgggcgaggacgatctacgccttgattttcgtgcgggattggataaccgcggcggtgagattgccagcaacagccatgctttgacgctcagcaccagccagttgctcaatcaaaacggaacgctgctgcataccggcagcggcggcatgtctattaccagcgaaggcgcgctggacaatggcgaaggcactattgccgctaacggcaacatcgttttgcactccgataacattaataatcgcagcggtaaaatcagcacgacgcagggcaatgctcagctcactacgcgtcacgagctggaaaattcgcaagggaatatcgttgctggcggcagcctttctctacaagtggccagccttcggaaccagcaggggcaagtgattgcggcgcagggcgacctggccatgagcgctgaaggagggctggataaccgcgaaggcgttcttgccgcaaatggcaatatcaagcttgacgccgacaatcttaccaaccatggcggaaaaatcagcgcggcgcagggcgacattcagctcactgcgcgccatggggtggataactcgcaggggaatatcatcgccagcggcgatatccaactccaggctgaaaatcttactaatcgtcacgggcaggtaggcacggcgcagcggggcagcgtcaacctgacgacgagcggtttgctggataaccagcagggaacaattaccgcctttgatgccttgggtattcagagcgccaccgttgataaccggcagggagaactgcagtccggcggtaatctcaacatcaccattcataaccgggggctggataaccgacaggggcagatcgtctccgccgccgctctggaaatagcaggcgtcaacctggcgctggctaatacgggcggaacgttacttgccgcgagcaaacttagcctcgatgccgattccctcagcggcgatggcgaggtgctctctcagggtgatatgtcgctcacgttgcgtcaggcatttcataacgccgggagggtcatcgccaacggcaacctgcagtggaatctctccggactggggctgattaaccagggggttatcagcgccggccgggcgctcaatctttatgcggcgaagctggataaccgtcaggaaggtgaaatcagcgctggcgagaaccatttgacggtcagcggcgagttggtcaatcgggggctgattgacggtggtttaacccatattgtcgccacgacgttaaccaatatcggcagcgggcgcctgtacggcgacgccgtcgcgctgcaggcggcaacgctgactaacgccgcggagaacggcgtggcggcgacgattgccgcacgggcatcgctggcaatgggcgtcggcacgctcaataaccaggatcacgcgctaatctacagcgacggtacgctcgccattggcggccagcttgccgaagacggttcgctcagcggccgggcgggagtgtttaataaccacagcgcaacgcttgagtccgccggtgatatggcgctcgatatccaacaaatcaataactacaacgaccatctggtgacgaaagatgtgatggtcgagcagtcatggcgccatgaagcggcgctgaaaggatcggtacagcgcttcgactggtcgctggtcgataccagctataaaaacaaatacggcgttcacgacgccatcatgccggacggaagccgcggcgatgagttctatgaataccagtaccagcgtaccgttgtggaaacgcaggtggtggaaagcgatcctggcaaaatcctctccggcggccagctcatcatcaacagcgataagctgaataactacgatagccagattatcgccggaggagcgctcggtggcgtgattggcgaactaaacaacgtcgccacgaccggtaaacgggtgaccaccgacgtcggcacccagacccgttggtatgagaaaaagaccagccgcccgtttggcggcaccaaaaccagccaggggaaaaaaagcagcgaatatgaaccgacgccgacggttcagaccatcgatttgcaaaccatgaagtggcagggcaatacccaaattgatggccatagcggtgtgattaatccgcgcgatcgcgccgatgaaacaggcgaaatacccgccggacgactggtggaagtgacgccggttaacgctgacggaacggttattcgcgtcgtcacgccggatacccggcttcctgtcagcagtctgtatcagatcgatccgcaggctaaagcaggctatctggtggaaaccgatccgcgttttaccaacggtaaagcgtggctcgccagcgactacatgcaaaatcagctgggcgttgatcaggcgatgaagcggcttggcgacggctattacgaacagcggctggtgcgtgagcagatcgttaagctgagcggtgggcgctacctgcagggctacagtaacgatgaagagcagtaccgggcgctgatggacgcgggcgtcgccttcgccaaacagtacaacctgacggtcggggtggcgctgacgccagcgcagatggcgctgctgaccagcgatatggtctggctggtcgccagagaggtcacgctaacggatggttccgtgcagcaggtgctggtgccgcaggtttatgcgcgggttaaagcgggcgatctcgatggcagcggcgcgttgctcggcggtgaaaacgtggcgttcagcgtgagccgtgatgtgaccaacagcgggcacatccaaagccgcggcgtgacgcagctaaccgcggaaaacattcataacagcggctatatcggcggcaaccagctcacgctaaacgcgcgtactgatatcaacaatattggcggaacgctgcagggcggcgatagcctgatcgcgcaagccgggcgtgatatcaacagcgccagcaccctcagcggaggcccagataacatcagcctcgatcggcctgcggggatttatgtccagaatgaaaacggccagctggggctgcaggcgttacataacattaatctgacggcaagcatggtgagtaacagcgcggcgggcagccagacgcagattatcgccggcaacgatctcaacctacagacgctcgccaccacccatagcgaaagcggaaactgggggaaaggcaacgatcgttccttgacccagcgtagcgatatcggcacgcaaattaacggcggcgcggtggcgctgtccgccggccacgatatgaatgcccgcgccgccagcgtgacggcgaccagcagcctgacggttgccgccggcaatgatattaacctcagcagcggcgagtcctcatggcacctgacggaaaacagtcatcaaagcagcagcggcctgctggctcgccgctcgctcaccactcacgatgaagtgtgggcgcagaacgccatcggcagcaattttagcggtgacagtattgtgatgcaggccgggcgcgacctgctggtgtccggcagcagtgttgccggcacccaggacgtcaaccttgtggcggggcgtaacctgaccatcaccaccgccgaggagagtcgccaggaaaaccatctacgtaaagagaaacatagcggcttttccggcaccggcggcgttggcttcagcgtcggcagttcgtcgctgaaagccaccgacgtaacgacggcgctgagtagcgccgccagtaccgtcggaagctcacagggcaacctgagcctgagcgccggtaatgtgttgacggttcagggatctgacctggtggccggcaacaatatggcgttgaccggtaaaaccgtgaatattctggcagcggaaaaccagagcacccagacccataccgtggagcagaaaaccagcggcctgacgctggcgttatccgggatggtgggcagcgccattaataccgcggtttccagcgccaaccaggccagcaccgagagcaatggccgtctcgccgcgctgagcgggctgcagtcggcattatcgggcgtacaggcgtatcaggcatcgcagatgcagactgcggattccagtccggagagcatgatagggatcaacctttcctggggtagccagtcctcgaaatccactcagcgacaaacgcagaacaccagccgcggcagcagcctgatggccggcaacaatctcagcattatcgccacggagacggatatcaacgttgagggcagccagctgcaggccggcggcagcgcgttgctcaatgccgcgcgcgatgtgaatttattctctgcggagaacgccagcaccctgagcggtaaaaacgagagccatgggagttcgtttggcgtcggtattaacttcgggcagggcgcgaacgggctgacggtcagcgccagcgccaacgccgggaagggccacgagaagggcaacagcctgacgcataacgaaacgaccctcagcgccggggagcgggtgactattgtcagcggtcgcgatacgacgctgaccggggcgcaggtgagcggtcatcaggtgacaatggacgtcgggcgtaacctgacgctgagcagcgagcaggacagcgataactacgattcgaagcagcgtagcggcagcgtgggggagagcggcagcatgggcggtggttcgggttctcttaacctgagccagagcaaaatgcacagcacctgggcgtcggtggaggcgcagacggggatttttgccggcgagggcggttttgatgtgaaggtgggcgggcatacgcagctgaacggcagcgtgctggcgagcacggcggcggcggagctgaaccggctggataccgggacgctgggtttccgggatattaaaaactatgccgagtacagcgtggagcagcagagcgcgggggtgagcacgagcggtagcgtggcggggcagtttctcgggaatgcggccagtggactgctgatgggggcaaacggcagcggcagcgacagttcgctgacgcgggcggcggtgagcgagggcagtatcgttatccgcgacggcgcgaatcagcagcaggacgtgacggggttaagccgggatgcggcgcatgcgaaccaaacgctgagtccgatatttgataaggagaaagagcagaaccgtctggcgacggcgcagaagataggtgaaatcgggcgccaggtgagtgatgtgctggtgacgcagggcaagctgaacgcgcaggcggcgcagagcgacccggcggcgcgggcagcggcgcgggcgaagctggtagcgggagggaatgccagcccgagcgaggagcaaatcagcgcgcaggtgagccggacggcgacggcggactacgatacgggcggaaagtaccagaaggtggcgctgacacagtttgcccggcaggaaggctaa

SEQ ID NO: 88842 - DNA, 1683 bp, Enterobacter aerogenes
atgaataaatggaacttaattcataaagtttttattatctctgcgctacctgtttgggtttatgccgcgcctgtggataccgtacgtgagcagcagttcatcaatcagcagcagcgccagcaggcgctggaaaatcagctcgcgccgccgtcaccggatattcatttatcagcggaagaaataaataccgatgatggtttatttcccgtggaacaaccttgctttgctatttctcaggttattttgcagggcgctgaagccttaccgcattggcttccgctccagcgccagacaaataaagcgattggacgttgtctgggaggaaagggcattaatctactgatggcccagttgcagaatatattaatcgatcgcggttatatcaccagccggatccttgccccgcagcaggatttaaaaagcggtgttttgcgcctggtggtgatgccgggttatatccgtgaagccaggcttacggaggacagcgatgattatctgtggctggcgagcgcgtttccggcgactgacgggaaactactggatctgcgcgatattgaacaggggctggaaaacttgcagcgcctgccgacggtacaggccagcatggaaattgttccgggcgaaacgcctggacaaagcgatattgttattaaccgccgacaggaacgcttctggcgcgttgacgcctcgatcgatgattccggctctaatgccaccggccgctatcagggtaacctgacgctatcactggataacccgctagccttaagcgatcttttttacctttcgggctcacataatctcgatggcaatggcggtaaatcctcaaagaacctgaccggccactattcgattccgctgggttactggcagctcggattaaccgccagccagtacgattacgtgcaaaccgtggcgggggccaacggcgattaccagtacagcggtaaaagcaagaacgttgattttcagatgagccgcgtactgcaccgtagctgtagtcagaagaccacgcttagcgccgatgtgttagcccgcgagcagcgcaacttcattaacgacaccgagattgccgttcagcggcggcaaacggcggcctggaagcttggtctgcagcatcgccattacctgggcaacgccactctcgatgccggagtgagctatcagcgcggtacccgctggtttggcgctcagcccgcgccggaagagcaatggggggaagcaaccgccctcagcaaaatcctgcaattcaatgctcagctcaatttgccttttgccctgggcgggcaaaattttcgctttaccagccgctatcagcggcagatgagcagcacgccgctgacttcgccggatatgttttccatcggcaaccgctggacggtacgcggctttgacggcgagcgcaccctgaccgccagtcacggctggtacgtacgtaacgatatcgcctggtcgactccgttgccggggcaggagttttatctgggggcggattacggcgaagtcggcggcgcaggcagtgaaacgctggtgggcaaacacctcgccgggggcgtggcagggctgcgcggccagtaccagcgcgccagctacgacctgttcgccggtatccctttagccaaacccgatggctttaaaaccgacccggcgacgtttggtttcagcgtcagctggagctactga

SEQ ID NO: 88843 - DNA, 2151 bp, Enterobacter aerogenes
atggataccaaaaaactactcaagcacataccctgggtgattctcggaatcatcggggcattttgcctctcagtcgtcgcgttgcgccgcggtgagcacgtcagtgccctgtggatcgtcgtcgcgtcggtttccgtgtacctcgtcgcctaccgttattacagcctgtatatcgcgcagaaggtgatgaagcttgacccaacgcgcgcgacgccggcggtcattaataacgatggcctgaactacgtgccgaccaaccgctacgtgctgtttggccaccacttcgccgccattgccggggccggcccgctggttggcccggtactggccgcgcagatgggttatctgccgggcaccctctggctgctggccggtgtggtgctggcgggcgcggtacaggacttcatggtgctgtttatctcctcgcggcgtaacggcgcttcgctgggcgagatgattaaacaggaaatggggccggtaccgggttctatcgccctgttcggctgcttcctgattatgatcatcatcctcgcggtactggcgctcatcgtggtgaaagcgctggcggaaagcccgtggggcgtctttaccgtctgttcgacggtgcctatcgcgctgtttatgggtatctacatgcgcttcctgcgtccagggcgcgtgggtgaagtctcggtgatcggtatcgtgctgctggtggcatctatctggttcggcggcatcattgcccacgacccgtactggggcccggcgttgacctttaaagataccactatcacctttaccctgattggctacgcgttcatctccgcgctgctgccggtatggctgattctggcgccgcgcgattatctggccaccttcctgaaaatcggcgtgatcgtcggcctggcgctggggatcgttatcctcaacccggacctgaaaatgccggcagtgacccagtacattgatggtaccggcccgctgtggaaaggcgcgctcttcccgttcctgtttattaccatcgcctgcggcgcggtctccggtttccacgcgctgatcgcctccggcaccacgccgaagctgctggccaacgagaccgacgcccgctttatcggctacggcgcgatgctgatggaatcctttgttgcagtcatggcgctggttgcggcctcgattatcgaaccgggcctctacttcgcgatgaacaccccgccggcaggccttggcatcgtcatgccaaacctgcatgaaatgggcggtgaaaacgcggcgatgatcgcagcgcagttgaaagaagtcaccgtccacgcggcggcgaccgtcagctcctggggcttcgtgatttcacctgagcagatcctgcagacggcgaaagatatcggcgaaccttcagtactgaaccgcgccggcggcgcgccgacgctggccgtcggtatcgcccatgtgttccataaaatcatcccgatggcggatatgggcttctggtaccacttcggtatcctgtttgaagcgctgtttatcctcaccgcgctggatgcgggtacccgcgcaggccgctttatgctgcaggatctgctgggtaacttcgtgccgttcctgaaaaaaaccgactcgctggtcgccggtattatcggtaccgccggctgcgtcgggctgtggggctacctgctgtatcagggcgtggtcgacccgctgggcggcgtgaagagcctgtggccgttgttcggtatctctaaccagatgctggccgcggtggcgctggtgcttggcaccgtcgtgctggtcaagatgcagcgcaccaaatatatctgggtcaccgttatcccggctgcgtggctgctgctgtgtaccacctgggcgctgggcctgaagctgttcagcagcaacccgcagatggaaggcttcttctttatggctcagcagtataaagagaagattgccgccggcggcgagctgaccgcacagcagatcgccaacatgaaccatatcgtggtcaacaactacaccaacgccggcctgagcattctgttcctggtggtggtgtatagcatcatcttctacggcatcaaaacctggctcaatgtccgcaacaataaggtgcgtaccgataaagagactccgtacgtgccggtaccggaaggcggcgtgaagacctcgtcacatcattaa

SEQ ID NO: 88844 - DNA, 204 bp, Enterobacter aerogenes
atgtttggtaacttaggtcaggcaaaaaaatatctcggtcaggcggcgaaaatgctgatcggcattccggattacgacaactacgtcacccatatgcaaaccaaccatccggatcagccgtacatgacttatgaagaattcttccgcgaacgccagcaggcccgctacggcggcgacggcaaaggcggcgtacgctgctgttaa

SEQ ID NO: 88845 - DNA, 957 bp, Enterobacter aerogenes
atggcaccgattgcagtcaccctattaaccggttttctcggcgcaggaaaaaccaccctgttgcgccacatccttaatgagcagcacggtttcaaaatcgccgtgattgaaaatgaatttggcgaagtttccgttgacgatcaattgatcggcgaccgcgccacgcagattaaaaccctgaccaacggctgtatttgctgcacgcgctccaacgaactggaagatgccctgctcgatctgctcgacagccgcgatcgcggcgagattgccttcgaccgactggtgattgaatgcaccggcatggccgacccagggccgattattcagacctttttctcccacgaggtgctttgcgaacgctatctgctggacggcgtgattgccctggtcgacgccgtccatgccgaccagcagatggatcagtttaccattgcccagtcgcaggtcggctacgcggaccggattctgttaaccaaaaccgatgtcgccggcgacaccgaaaagctgcgtgaacggctgacgcgcattaacgcgcgggcgccgatttataccgtcatccacggcgatatcgatttaagccagctctttaataccagcggttttatgctggaagagaaggttgtcagcgccacaccgcgctttcattttgtggcagaaaaacagaacgacgtctcgtcgattgtggtcgagctcgactatccggtggatatcagtgaagtttcacgggtgatggaaaacctgctgctctccttcgccgaacaactgatgcgctataaaggcatgctgtggatcgacggcgagccaaatcgcctgctgttccagggcgtgcagcgcctctacagcgccgactgggatcgcccgtggggcgatgaaacgccgcacagcacactggtgtttatcggcattcaactgccggaagaagaaatccgcgccgcgtttgccgggctccgtaaatag

SEQ ID NO: 88846 - DNA, 1371 bp, Enterobacter aerogenes
atggcttatcagacagtgaatcctgcgaataaccagcttattaaaagctatcccgcacacagcgatgcggacgtggaggcggcgctgcagaaggccgatgcgctttatcattctgcgtgggcgaaaggcgatattgcgcagcgtctgccggtgctgcataagcttgccgaccttatcgacagccggacggaggagctggcgaaaatcgccagccaggagatgggcaagctcattaaacagagccgcggcgaggtcaaactctgcgcgcagatcgcccgctattatgccgacaacgccgaacggttcctggcgccggtgaagtattcctccgaccttggcgaagcctgggttgaacaccatcccatcggcgtcttaatggcggtggagccgtggaacttcccctattaccagttaatgcgcgtgctggcgccaaatctggcggccggtaatccggttattgctaaacatgccagcatcgttccgcaatgcgccgagaccttcgcgcatctggtgcgcgaggctggcgcgccggaaggggcgtggaccaacctgtttatctcccaggagcaggtggcgaaaatcatcgctgacgatcgggtgcagggggtggcgctgaccggctcggaaaaagcgggcggcatcgtggcgtcgcaggcggcgaaacatatcaagaaagcgacgctggagctgggcggcaatgatgtgtttgtggtactcgacgatgccgacctggaacgcgcggtgaaaataggcgtacaggcgcggctgaacaacgccgggcaggtttgcaccgccgctaaacgcttcattctgcatgaaaaaatcgccgagtcgttcctgagcaagtttagcgatgccttccgccaggtgaagatcggcgatccgctcgatgaaagcaccacccttggcccgctctcgtcgaaagaggcgctggaaaccttaagtaaacaggtcgacgaggcggtgaagcatggcgccaaattacacctcggcggcaagccggtttccggcgaaggtaatttctacgaacccactattctgacgggaattacccgtgagaacccggcgtacttcgaagagttctttggcccggtggcgcagatatacgtggtgaaagacgatgatgaggcgattgcgctcgccaacgactctcactacggcctgggcggcgcggtgtttagtcaggacattgagcgggcgaagcgtatggcctcggggattgaaaccggcatggtctatatcaactggttaacggataccgcgccggagctgccttttggcggcgtgaagcgctccggctttggccgtgagctttccgacctcggtatcaaagagtttgtgaatcagaagctggtggtcgttcgccgctaa

SEQ ID NO: 88847 - DNA, 1293 bp, Enterobacter aerogenes
atgcttaaccctatggaaaaactcgctgaattaaaacgcgccaaactgctggcgctgtcgctgctgctgattgcggcggcgctgtttatcactacgctgctgctaccgccgacgccgtgggtcagcgcgctgaaggctatttccgaagcggcgatggtcggggcgctggccgactggtttgcggtggtggccctgtttcgccgaattccgctgccgtttgtcgcccgccatacggcgatcatcccgcgcaataaagaccgtatcgccgataatcttggccatttcgtgcaggagaagtttcttgatactccctcactggtggcgctgatccgccgctacgaaccggccctgatgctcggtaactggtttagccagcccgaaaacgcccgccgtgtgggccaacatctgctacaggtcatgagtggttttctcgaactcaccgacgacacccgcattcagcgcctgctacggcgcgcggtgcacaaggctatcgataaggtcgacctgacgcagaccagcgccatgatgctggaggggctaacccgcgacaaccgtcatcaaaagctgttggattcactaataagccaactgatcgccctgctacagcgcgacagctcacgcgcctttatcgcccgcggtatcgtgcactggctggagaccgaacacccgctgaaggccaaactgttacccaccgagtggcttggcgagcacagcgctgaaatggtcaccgacgcggtaaatacgctgctcgatgaggtcactcaggaccgcagccaccagattcgccaggcctttgaccgcgcggcgcagaagcttatcgacaatctgaaatccgatccgcaaatggcgcaaaaagccgataacatcaaagcgtatctgaaaaacgatgagacctttaatcactatctcggcgaggtgtgggcggatctgcgcggctgggtgaaaaacgatatcagcagtgacgattcgcgcatcaagcagcggatcgccgaggctggtcagtggttcggcgaaacgctggtgcgcgacgacgcgctgcgtgaatcgctgaatgagcatcttgagcaggcagcgcatcgggtggcgccggaattcgccgccttcctgactcgccatatcagcgatacggtcaaaagctgggacgcgcgcgatatgtcgcgacagatcgagctcaacatcggcaaggatctgcagtttattcgcatcaacggcacgctggttggcggcactatcggcctcggcctgtggctgttatcgcaaattccggcgctgctgcatctgcatattggctga

SEQ ID NO: 88848 - DNA, 1245 bp, Enterobacter aerogenes
atgtcatggatttcgcgattgggcgcccgctactgcgcatcgctgttctttccgatggcgctgatcctgtacgatttttccgcctacctgaccaccgatctcatccagccggggatcctgcacgtagtgcgggattttaacgccgatgtggcgttggctccggcctcggtgagcctgtatatggccggtggaatggcgctacagtggctgctggggccgctatccgatcgtattggccgccgaccggtactgctgagcggcgcgctgatttttaccctcgcctgcttcgccaccctgtggacgacctcaatgacccagttcctgattgcccgctttgtgcagggcaccagcatctgttttatcgccaccgttggttacgttaccgtgcaggaggcctatgacgaaaagcggtcaatcaagctgatggcggtgattacctccatcgtgctggtggcaccgatcgtcggcccgctttccggggcggcgctgatgcactttatccactggaaagcgctgtttggcattatcgccgcgatggggctggtggcctggctgggtttactgtttaacatgccggagacggtgcgtcgcggcgacgtgccgttcagcccgctcggcgtggtgcgcgattttcgcgacgtcttccgcaaccgcatctttttactcggcgccgccacgctagcgctgagctatattccgctaatgagctgggtggcggtttcaccggtgattttaatggacgccggcgggctcaccaccagcgagtttgcctggagccaggtgccggttttcagtgcggtgattatcgctaatctgtcggtggcgcgctgggtgaaagacccgactcgcccgcgctttgtgttaagcgccgtgcccatccagatggttggtctggcgatcctgattatcggtaatctgacgtggccgcacgtctggctgtggtcggtgctcggcacctgcttctacgccttcggcatcgggctgattttcccgacgctgttccgctttaccctgttttccaacgacttgccgaaaggtaccgtgtccgcctcgctgaatatcgtgatccttagcgtcagcgcgttatcgattgaaggcgcgcgctggttatggttccatggcggcagattgccgttccacctgctggcggtagccgccgggatcgtcgccgcctgctgtctggcggggttactccgtaatttgcgccagcgttcagagacggtcatcgaagcccggcaatcctga

SEQ ID NO: 88849 - DNA, 240 bp, Enterobacter aerogenes
atgagcgatattgaactcagcccggcgcagcgcgatctgctgcgcgagcggctaagcaagtactgtgaagagacctttaacctggagctggaacagttcgacgccgagttttttgtcgactttatcgccaaagagctggggcctttgttttacaacgccggtattgaagaagccatccgcacccatctggcatggagcgaacgtatccaggaagagatggatttgaagaaggtctattaa

SEQ ID NO: 88850 - DNA, 1152 bp, Enterobacter aerogenes
atgtcgctcatcaccgatctacccgccctcttcgatcaattctcagaagctcgccagaaaggctttctcagcgtaatggaactcaaagagcagaacgtaccgctggtcggtacctactgcacttttatgccccaggagatagccatggcggcgggcgccgtggtcgtctcactgtgttccacttctgatgaaaccatcgaagaggcggagaaagacctgccgcgcaacctctgcccgctgattaaaagcagctacggcttcggcaaaaccgataaatgcccctacttttatttctccgatctggtggtcggcgaaaccacctgcgacggcaaaaagaagatgtacgagtacatggccgaattcaaggcggtacacgtaatgcaactgccgaacagcgccagcgacgccgcctcccgcgcgttatggaaagcggagatcaagcgtctgcagcaggtgattgaaacccgcttcgccacgcccattagcgaagcggcgctgcatgaagccatcgtactgaaaaatcgcgaacgccgcgcgctggccaacttctatcgcctcgggcaactcaatccgccggcgcttagcggcagcgatattctaaaggtggtttatggcgccacctttcgcttcgacaaaaccgcgttgattgacgaactcaatgccatggcggaaaacatccgccgacaatggcaggagggaaaccggttagcctcccgcccgcgcattctgatcaccggctgcccgatcggcggcgcggcggaaaaagtcgtccgcgctatcgaagaaaacggcggctgggtggtgggctacgagaactgtaccggcgcgaaggccaccgagcgctgcgtggcggaagatggcgacgtctacgatgccttaaccgataaatatctcgccatcggctgctcctgtatttcacctaacgaccagcgcctgcaattgctaagccagatggttgaggaataccaggccgacggcgtggtcgatgtcattctgcaggcttgccatacctacgccgtggaatcgctggcgattaagcgtcacgttcgccaacggcacgacattccttatatcgcgatcgagaccgattattcgacggcggatctcggccagctcagtacccgcgtcgccgcgtttatcgaaatgctataa

SEQ ID NO: 88851 - DNA, 768 bp, Enterobacter aerogenes
gtgatctactcggtaggtattgattccggctccaccgccaccaaaggcatcctgctggcagacggcgccatcgtgcgccgtttcctcagtccgacgccctttcgccccgccgatgccattcacgaggcctgggagacgctgcgcgcggacctcgcggcaacgcctttcttaaccctcaccggctatggtcgccagttggtcgatttcgccgataaacaagtcaccgagatttcctgtcacgggctcggcgcgcgcctgctggcgccggaaacccgcacggtgattgatatcggcggccaggacagcaaagtcattcagttggatgcgcagggcaacctcagtgattttctgatgaatgacaaatgcgccgctggtaccgggcgctttctggaagtgatttcacggaccctcggcgccagcgtcgaccagttggacgccattaccgaaggtgtagaaccgcacgccatcaccagcatgtgtacggtgttcgccgagtcggaagtcatcagcctgcgttccgccggagtcgcgccggagtcaattctggccggagttatcaatgccatggcgcggcgcagcgcgaactttattggccgtttatcggcgcagggaccgctgctgtttaccggcggcgtcagccactgcgccgccttcgcccgcatgctggagacacatgttggcatgccggtcgcgacccatcccgacgcccagtttgccggggcaatcggcgcggcgctgatcggccagcgccagcggaggcgcggatga

SEQ ID NO: 88852 - DNA, 270 bp, Enterobacter aerogenes
atgagcaaatatctattcttattccattcaacggcgggcgtcgtgcggatgcgcaaagccctgcaggcggcaggaatgaccttcgaggtgaaggatattccccgccagctgcgcagcggctgcgggctgtgcatttacctgagctgcatgccgggcgatgagcaacgatgggttatacccggcgaaacggcagctctgtttcgcgtcgccggaaatgactatcacctgttggcgaactatgcgcaccgcggtagcccggatgagacgtaa

SEQ ID NO: 88853 - DNA, 1104 bp, Enterobacter aerogenes
gtgtcgcgaacgttagaacatttcaattatctgcatcaaattcctgagctgggctttgaggagtacaaaacttcggcttacatcggcgatatcttagaagcggcgggattcagagttcaccgccatgttggcgggaccaccgggattgtcgccgaaatcgatagcggcgaaccagggcctgtggtggcgctgcgggcagatatggatgcgctgggccatattatcgatgggcgcttagaggcccgtcatacctgcggccatgatggtcactcctcggtggtattaaccgccgctgaagagatcctcgccgaaaggctggtaaaacgtggcaagttaaaagtgttatttcagcctgccgaagagctgggtacgggggcgattgcgttaacggaggccggggtactggatgacgtggaaatgttatttggcttccacctccggccactggaagagtgtccgatgggcaaggccgttccggcgatgtactactccgcctccgcgacggtgatggttgatttccacggcaaagccgcccacgccgctcgcccccatctgggcataaacgcgttggatgccgcttcgcatgcggtacaggcggtgaatggcatccatctggcgccttcactcacctggagcgcgaaagcgacgcgttttctttgcgatgcgggcgtcactaattctgtgccggagaacgcgcacgtctgttgggatctacgctgtgaggaaaatgacggcatggcgacgctcaaagagcgggtggtgagagcgattgagagcagcgccgcagcatatggcgccagtgcggatatccggatcgtcaaagagatgccggcggcgattatcgatgaagacgccacggctatcgtgagccaggcgattcgcgaaacctttggcgaggcgggcttaatggccgcgaaaagtacgccgggtagcgaggacttttttcactacctgcgtttgcgcccggcggtgaaaggcggcttctgggggctgggctgcaacctgcagccgggcctgcatcatccggagatgcatttcgatcgtaccgcgctggcggatggcgtgcgggtattcaaatcctgcgttcgccagttgttgggctga

SEQ ID NO: 88854 - DNA, 468 bp, Enterobacter aerogenes
atgaataattcgtcaaaagtcgccagtaacccgtttgatatttttgttatcggcgcacgtaaaggatttaatatcgccatcaacaacctgatgccgaatgtattaatggcgtatgtgattgccgaaatgcttaatttgctcggggtgatgcagttaatcggccaactgtgcgcgccgctgatggggctgtttggcctgccgggtgaagcgattaccgtgctgctgacttcctggctttccgcctcggcggggaccggggttgctgtcagcctgttgagtaaaggcaccctcaacgtggcggacatcaccatcctgatcccggcgatctttctgatgggatcgcagctacagtatatggggcggctgcttggggtggcggatgtaccgaaaaagtattggccgctgctgatggcggtgagcattatcaacgccgtcatcgccatgttggtcatgcgcgtgattgcataa

SEQ ID NO: 88855 - DNA, 684 bp, Enterobacter aerogenes
atgagtgaaaataaaacgttggaacgttcctccaacgacgcaacaactgagtggcgggttgggccgggagcatggatctcgctggttgtggtgttattagttttctccgggctgctttttaaagtggaaggaatggcatggctgggggcctttgacttcaccaccctgggcggcgcgtttggtacgatgaagaccccggaaaccaatactttcatcggtagcggcggcatcagcgctaaggccggtttcctctttgcgctgtcgctggttccaacggtgatgttggcgctcgggttgctggaaatttttacccactatggcgcaatacgcgcggcgcataaactgttgacgccgctattacgtccgttactggggatccctggttataccggtctggcgctgattaccgatctacaaagcaccgatgccggcgccgcgttgaccaaagaactgtatgacagtaaaaaaatcaatcgtaaagatgtggtgattatgggggcatggcaatattccggcgccggtctgattaataactatttctcaattggttcagcgctttttgcctcattaaccattcctattattattccgctgcttttaatgtttgtcctgaaattcgttggcgcggcaatcacccgtttggttttaaataccgcctacaaaggggactttgataatgaataa

SEQ ID NO: 88856 - DNA, 1065 bp, Enterobacter aerogenes
atgtctattaacaccctggcgcacgtctttaccccgcacggcaatatcgtctatacggccaatgattttcgccagacggtacgcattgccgttgccgggaccatcgcgctgagtatttcgaccttctacgacgtgcagtacggcgtgtttttcgtcgtttatccgctgatgctgatgtcgctggtgccggtattcaaccgccacgtcgcccggcagtttgtgttcagcgcggcggtcaattgcgtcgaaatggtgctcatcgttggctatctgtcgcagtggccggtgatcatgacgttagttgtgttcggtctgtatgtgatgcgctttcgcttcatgagccaggggccgctgttcctgctggggtcgatgggcgtggtgtgccagagcacgatgctcaattttatgagctatcccaccagcaactggcacacgctgatgttctccaatatggaggcctgcgtgatggcggtggcgctgagcgcgctgctgcactatttgatcccggatgttgaaccgcgtaagccgccgccgcgcatagagaaagacgccgcgcggatccgtcatgaatcgctgctttccggcacggttgcgaccattatctttgtgatctttcagatctgcgatctgagcgattcgctatcggcgctgatggccggggtactgatcctgtttccgatgcattatcgcggcgcggtaatcagctcgatctggcgtgtggcgggggtggtactggcttgtctgtacattctggtggtgcagctgattatctatgatttcagcaaccacatgatcctgatgatgccgttgattggtcttggtctggcctttagcgcccgcctgcacgtgatggaaaaagtgggcgcgggcgtgggattcgccagcatcaccactatcggtattatgtttggccagaatctgcatccgaatcaggatctggtgttcagcgacctgtaccgtatcacttcagtcacggtatcgctggtggcgacgctgaccatggtgtttctggtccatcgggtactgaactgcttcgcgccgactcgctttgtagtgagtgaatga

SEQ ID NO: 88857 - DNA, 1068 bp, Enterobacter aerogenes
atgatgacgccagaacaaaaatttgcccgctgggtaagggtaagtattgccgctttcctggtgatattcgcctggtttatcgttgccgatatctggatcccgctaaccccggattccaccgtgatgcgcgtggtgactccggtctcgtcgcgggtctccggctacgtctcgcacgtctacgtgcacaacaatagccaggtgaaaaaaggcgacctgctgtatgagctcgatcccacgccattcattaataaagttgaagcggcgcaaatcgcccttgaacaggccaaactgagtaaccagcagctggatgcgcaaatcgccgccgctcgcgccaacctgcgcaccgcgcagtacaccgcgcgtaatgacaaagtcactctcgaccgctaccagcgcctgagcaccatgcaaaacgtgtcgcaatcggatctcgataaggtgcgcacgacatggcagaccagcgaacaatcggtcagcgccctgaatgcgcagattcagaacctgctgatccagcgcggcgagcgcgacgacaagcgcaacgtgacgctgcagaaatatcgcaacgcgctggaagaggcgcagctcaacctcggctggacccaggtgcgcgctgagaccgacggtatggtcagcaacctgcagcttaatccgggaatttacgccaccgccgctaccgccgtgctggcgttggttaacaacaataccgatatcgtcgccgactttcgtgaaaaaagcctgcgccatacggcggtgaataccgatgcggcggtggttttcgatgccctgccgggtaaagtcttcccggcgcacgtgaccagcagcgacgccggtattcttgccggtcaggaagcggtgaatggccaactgtcgcagcctgagcagtctacccgctgggtgcgcgatgcgcagcgcatgcggattcacgtcgcgctggatcaacctctggataagccgctgccgaccggcgcccgcgccaccgtccagttgtacaatagcgacggccccttcgcccgcacctttgccggcctgcagatccacctggtgagctggttgcactatgtctattaa

SEQ ID NO: 88858 - DNA, 465 bp, Enterobacter aerogenes
atgaccgaagacgaactgtttgcccgccgcccgatggggatgcgcatggcgatggtggtgcgccagtggcgcgcgattatcgacagcgccattaccgataccggcctgacccagtcaagctggacggtgctgatgcagctgcatcagctggggtgcaacgtctcggtaagcgaactggcggaagtgcagggtattgaactgccgccgctaatgcgcaccctcacgcagctggaaaagcaggggtatctactgcgctcaacatcgccatacgacaagcgcatccgcctgcttacgctgacggcagaaggccgtaccatcctggaaaagctgaaccgcgtcattgagacttatcaacggcgcgtgacggaaaccatccccgatgcggatctcgacaccttcagcgccacgttaaatcaaatcgcctgcaacttgcggacaatccgcgaagaagataacaagatctaa

SEQ ID NO: 88859 - DNA, 165 bp, Enterobacter aerogenes
atggaatttcacgagaatcgggcaaaacagccgtttatcggctgggtatttctggtgcgagcgattaaaaaatggtggcttcgtgggcaaacgcgcaaaatattgcagcgaatgagcgacgaacagctgaaagatgtcgggttgcgccgggatcagattaattaa

SEQ ID NO: 88860 - DNA, 1413 bp, Enterobacter aerogenes
atgacccgttatcaacatctggccagcctgctggctgagcgtatcgaacaagggctgtatcgccacggcgaaaagttgccgtcggtgcgcagcctgagccaggagcatggcgtcagcatcagtaccgttcagcaggcctaccagacgctggaacagcaacagttgatcgtgccgcagccgcgctccggctatttcgtcgccccgcgcaaagcccaggcgccggtgccgccgatgtcgcgaccggtgcagcgcccggtggagatcacccagtgggaccaggtgttgaccatgctcgatgcgcgcaacgataaatcgatcatcacctttggcggcggttcgccggacgtcacccaaccaagccttaagcctatctggcgcgaactgagccgggcaattcagcataacctcagcgaagtgcttaactacgacgagctggccgggcgtcgcgaactgcgcgaacagatcgcccgcctgatgctcgacggcggctcagtcgtcaccgccgacgatctgctgatcaccagcggctgccacaacgcattatcgctggcgctgctgtcggtgtgtcatcccggcgatatcgtcgctgtcgaatccccctgctactacggcactatgcagatactgcgcggcctggggctgaaagccattgagatcccaaccgatccggaatccgggatcagcatcgaggccttagagctggcgctggatcagtggccaatcaaaggggtgatcctggtgcctaactgcaacaatccgctaggatacatcatgcctgacgcgcgcaaacgcgcggtgctgtctcttgcccagcgccacgatatcgtgattttcgaggatgatatttacggcgagctggcgaccgaatacccgcgcccgcgcacgattcattcatgggatatcgacggtcgggtgatactttgcagctcgtttaccaaaaccatcgcccccggcctgcgcatcggctggattgcccccggccgctactacgatcgtctgctgcagatgaagtacgccgccagcggcaccaacgtcccttccacccaactggcggcctgtaactttattcgcgaaggccattaccaccgccacgtgcggcggatgcggcagatctatcagcgtaatatggagatctacacctgctggctgcgggagtttttcccctgcggcatctgcgtcacccggccaaaaggcggctttatgctgtgggtcgagctgccggagcaggtagatatggtctgcgtcgccaagcagctgtgtcggctgaagatccaggtcgcgccaggatcgctgttttcggcatccgggaagtatcgcaactgcttaaggatcaactgcgccctgccgccgattgagaagcataaagaggtgatggtcaaactgggggaagcggtgaaagtggcgatggagtga

SEQ ID NO: 88861 - DNA, 918 bp, Enterobacter aerogenes
atgaaaataaccaaagatcgggtggtttacgccatgtcgcgcgataacgttcctgtcgccaccgtcaacagtggaagtgaagtgttattcgaaacctgcgactgcttctccgatcaaatcacctcagccgatgccgtctttaatgaactggactggcagcgcattaacccggcgaccggccccgtctttattgaaggcgcagagccgggcgattgcttaaaagtcagcatcaaacgcatcaccctgacggctcaacaggcggtgatggtgaccgcgccgcagctcggcgtcattggtgatgaactgcatgagcccacggtcaccatcgtcccaatcgtcgaggatcatgcggtcctcccggggaacgtgcgcgtgccattgaagccgatgatcggcgtcattggcgttgctccagcaggagaacccatatcctgcggcacgccggatagtcacggcggcaatatggactgcaaaatgatcgccgccggcagcacgctgtggttgccggtcaacgtgcccggcgcgctattcgggctgggcgatttgcacgccgcgatgggggatggcgaagtgtctgtctgcggtctggaagtgccgggcgaagtcctcgtcgagttaaccgttgttaaaaaccgtcagctacccttaccgatgctggaaaacaacgaaacgattttcaccctcgcctccgccgttaccctcgacgatgcggcagcccttgcggcacgtaatatggcccatttcatcgccgacaataccgcattaacgctggctgaggcgatcaacgtgctgagcatcgccggagacctacaaatttgccaggtcgttgatccgctgaaaacctgccgctacgcgctgccgaaaacggtcgccaaacagctttctctgtcgattgatgggggcaagcatgagcgttga

SEQ ID NO: 88862 - DNA, 1344 bp, Enterobacter aerogenes
atgagcgttgaacagttcggctataaacaggagctccatcgagcgctgaccttccgcgatctgctggtttacggcatgatttttatggtacccatcgctcctttcggcgtcttcggctacgtctgggatggcgcgcagggcatggtggcgctggcttatctgatcggcatggtggcaatgtttttcaccgccatgagttactggtcgatgtcgcgcgcattcccggtttccggttcggtatacgcttacgctcagcgcggaatacaccctatcgtcggtttttttgccggctggctgatattgctggactacattctggtgccatcgctgctgtatatcgtcagcgcggcggcgctggggccgatgctgccgggcgttccgggctgggtctggattatcggctttatcgcgattaacagcctgattaacttacgaggcattacctttaccgcgcgggcgaataataccattttggttgctgaaatcgtggtcctcgcgatttttgtggtgctgggattgattgcgctttattccggagccggggcaggccacctgacgctcgaccccttgtataatgccgataaattcagcctgccgctggtgatgggcgcagtctcgattgccgtactctctttcctcggcttcgatggtatatcgacgctgtcggaagaaaccaaaggcggcgtcgataccgtcggcaaggcctcgttaggcgccctgatgctggtgggtacgctgttcattgcccagacctggattgccgcggatctggcgcagggtatgaaatttggcagcctcgataccgcgttctacgacaccgccaatctggccggcggccaatggctgaaatacgtcaccatgtggtccacggtgatttcctgggggatcgccaacgcgctggttgctcaggcggcggtttcacgcatcctgtttgcgatggctcgcgataagcagctcccgcagctgctggcgaaggtgcatccacgactgaaaaccccgtatgtcagtaccttatttgtcgcgctgatttcactggtttccggtctctggttctacggcgatatcgacaacctcagtcggctggtgaacttcggcgcgctgatgggcttcctggtgctgcacgtggcggcgatcaaccactatctgatccgccaaaagtcgcgcaatctggtgatgcacctgctcttcccggtgattgggctgtgcattatcggctttgtcatttatgagatggatgttgaagccaaagtgctcggcctgagctggctggccgtcggcgtggtgtattacgccattatgcgtctggtgcttaagcgcaacgtggagctgaatcaggaagggtaa

SEQ ID NO: 88863 - DNA, 420 bp, Enterobacter aerogenes
atgttgagcggattaaatcatctgaccctggcggtcagccagctggcgccgagcgtggcgttttatcatcagctactcggcatgacgctgcacgcgcgctgggatagcggcgcgtatctttcctgcggcgatctgtggctgtgcctgtcgctggatccgcagcggcgcgtcactccgccggaggagagcgactacacccattatgcgtttagcatcagcgaggcggatttcgccagctttgccgcccgtcttgaggtcgctggcgtagcggtatggaagctaaaccgtagcgaaggcgaatcgcactatttcctcgaccccgacggccacaagctggagctacatgttggcaacctcccccagcgcctggccgcctgccgcgagcagccgtataaggggatggtgttttttggcgagtga

SEQ ID NO: 88864 - DNA, 2841 bp, Enterobacter aerogenes
atgttctcaactatcgacattgaacaacccggtaacgagatgagacgtattgagatagtactgcgggagctggagaggctgagccaggccgtgacgctggaggatttagccaggggctcgaacgccttcaccgcagagcaaatcggctttaacctcgggctggcgcgcaactcggtgagtaaagatctcaatcagctatggagcgacgggctggtgattaaaacgcgcggccgcccggtgttctttttacatcgccggacgacggaaacgctgctcgaccgtacgctgacggaaagcgaacgcgagccggcaacgctcgccgatctcctgccgcagccacaagataacaatgaggctgtcgacccgttcgccatgctgatcggccacgatcgcagcctgcacgatgccgtggaaaaagggaaagccgcggtattatatccccacggcctgcacgtcctgctgaccggcccttccggcgtgggtaaaaccttttttgccgaactgatgcaccgctacgcctgcgagcatgccggtgaaaaacggccgccgctggtctacttcaactgcgcggaatacgccaacaacccggaactgctgtcatcgcatctctttggccaccgccagggcgcctttaccggggcgacggaaaacaaaagcgggctgatcgaacaggccgacggcggctatctgctgctggatgaagtgcatcgcctgccctatgaagggcaggaaaagctcttctcgctactggataaaggcgaatatcgcccgctcggcgccagcggcccggcgcgcaatatcgccgtacgtctgatttgcgccaccaccgagcccgtcagctcatcgctcttacgtaccttccagcggcgtatccaggtggctatcgatttgccaggtatccgccagcgttcggttgaggagcagattgaactgatcatcggctttttacaacgtgaaagccgcaagatcgaacgcacggtgagtatcgataaaaccttgctgctatggctgctgaacaagccgctggagggcaatatcggccagctcaaaagcgatatccagtttttgtgcgcccaggcatgggcctcggggatggcggcccataacgaagtattgctactggatagcaaactggcggacggcccaatcaatgccacgccggagcagcgacagctggtcgatgcactgtttaacggccgtcccctgctaaacatcgatgcccgtactcttccgcagttgaaaagttcagctgccgatgacagcgtcgaggaaagcgacctgttctacagcttcctgactcgcgagtacgttaacctgcgcaacagcaacgtgccgcccgccgagacgctggcgatccttaaaaataagctcagctcgatttttgaatatggcctctatagccgcgataacgccagccatgccccgcgctatggcgatcggattgaagagcgggtggatctgctgatcggttacgttgagcaggtactcggcttcgccctgccggaaaacctggtcaacccgctgcgtaaacactttctcgctctcatcagctacgtacaacgcggcctgatcccgcagttatactcttcgagcctgatcctcgatcgctgcaaggatgagtacgataacgccactctgttgtgtaagaagatcaacgatctgctgcatatccagtgtccggccaccgaggtagtctggctgtgcctgttcctcaaagagtgccgccattaccgccagcgcatcagcgccagcccggactgcggggcgatcctcattgcccatggcgccactacggccaccagcatggcgcagtacgtcaatcgggtgctggagcgcgaattgttcaacgctatcgacatgccgttcgaacaatcggtgcacgatacgctggaaaagttgatccagttgatccacagcaaaggctggcagcggttaatcctgatggtcgacatcggatcgctggtccatttcggtagcaccatcagcaaactgttccagattgatgtcctgctgatgccgaatatcaccctgaccagcctgctggagatcggtctcgatctcagctacgaaaccggcgatctgccgcggttggtcaatctgatgcaggaaaaaggtatcgccagccagctatgcacgccgcagcaggagaacgccggcaaggtgctggttatctcctgcattaccggcatgggcacggcggaaaaaatcaaaaaggtgctggaggagagctttggcgagctgatgtcgcaggatacccggatggttatcctcgattacaacgaagttcgcagcccggagcgcctgcagcaggcgatcagggcgcatgaacggctggcgggtattgtcgggacattccagccggggctgcccgatatcccgtttatctcgctggaggagctgttttccgagcaggggccggagctggtgctcagcctgctgacccccgatttgtccagcagtgaacgtcgtctggagatggagcgcagcgcttcacggtttatcagcgccctgaccatggaaagcattatcaaccatatttcggtgctcaatccgcagcgcatattaaaagaaatggaagggatcctgaaccatctcaggaacgcgttggccatcgcgcctaaccgccaggtgacactacgctttctgatccactgctgctgtatggtcgagcgtatcgtgattaaccgtaaaccgttacagatggcgctggaaacgcggccggatatggacgctcaggcatttagtgtcatcaaatcggctttccatccggttgaagaggcctatgccatccgtttatccgatgccgagtacatttatatctacgaattattatttagttaa

SEQ ID NO: 88865 - DNA, 429 bp, Enterobacter aerogenes
ttgtcatccactgaacccaccacccagttaccccagattctgctgctgacgcacggcggctggggcacgcaactttgcgacagtctgcgcatggtgaccggcgaaatcgccggcgtcagcgaaatcgcgcttatgccggtcgataccctcggcgagttttatcagcgcgtcgaagcggccgtgcaggcgatgccggcaggatcgctgattttgaccgattttctcggcggcaccacctccaacgtcgccgcgcgcctgagcgcggattaccccatcgccgtcgtctgcgggctcaacgcctcgctgctgctggaggcgttggatctgcgcgaacagggtccgctcaccggctgcgttgatgcgctggtcgaagccggacgcagcagctgccgcgacgttgtcgcccacgtgaaccagttaacctcttaa

SEQ ID NO: 88866 - DNA, 486 bp, Enterobacter aerogenes
atggcaaaaatcgttttatgtcgtatcgatagccgtctgatccacggtcaggtcgtcaccaaatgggtcggccagtcgcaggccaatcgtatcgccgtggtcagcgacgagctggatgccgatccgtttatgaaaaatatctatttaatggccgcgccgccgaacatcaaagtcgactgttacggcaacgccagcttcgccgccgcctggaaagagaatcagctcggcgatggcaatgtgctggtgcttttcccgtcgctgtcggccgttcaggaagccgtccagttgggctttgacgtgcagacgattcaggttggcgggctgggcggcgggccgaaccgcaaggccgtgttccagaacatcacccttgatgaaaaagacgtcggcatcctcggcgctctgaaagatagcggcattcaggtgttctttcagaccatcccggaagataaaccacagtcactggacgacatcctgaaaaaattctaa

SEQ ID NO: 88867 - DNA, 750 bp, Enterobacter aerogenes
atggataccttactctttgcgagcctgatggggttgtattactggttcgcccgattacgtttaggctataccttctccgccatgttgctgcagcccgtggtgatcgccgtattcgtcggcctgctgctgggcgatatgaaaaccgcgatgatcatcggcgcgggtatgcagctggtctatcttggagtgacctccacgccgggcggcaacgtgccgtcggacccggcgctggccgcctgtatcgccattccgatcgccgtgaaggccgggatggagcccaacctggcgatcgcgctggcaatcccgtttggcgtcatcggggtattcctcgatcagttgcgccgcacgctcaacgccgcgtgggtgcatatggccgacaaacacgccgaaagcgccaacatggcgggcatcatgcgctgcgcctttatctatccagctctgctggggctggtgctgcgcttcccggtggtcttcgccgccaactactttggccaaagcgtagtggaaaaattcctcaaactgatgccgcactggctgacccactcctttgaaattatgggcggaatcctgccggcgctgggctttgccatcaccatcatggtgatcggcaaaaagagcctgctgccgtggtttatcggcggatttttcgcggtgctctacctgaaggtggacatcatggcgatggcgattttcggcacctgcgtcgccttcctgattaaaggcctggccaaaaatgaaggagctgcatga

SEQ ID NO: 88868 - DNA, 858 bp, Enterobacter aerogenes
atgagtagcgatgtaatggaacatgaactggttgaacgcgcccgcgaaacccaggcgctgagcaaagccgatatcaccaaggcctggctgatttactggctgggggcggaggtatccagctcctacgaacgtctgcagagcctgattttctgcgcctcaatgacgcccatcatcaaaaagctgtacccgggaaaagaggagcaggccgaggcgctcaaacgccacctgaacttctttaactcggaacagactttcggctcggttatccagggtatctccatcgccatggaagagcagaaaacccgcggcgagccgatcagcgatgcttcaatcaccgggatcaaaaccggcctgatggggccgctggccgggatgggcgactcgattatctgggccgcggtgatgccgttgctgattgccattttcatccccttcgccgccagcggcagcgcgttcggcgggatcgccccgctgatcctctacccggcgatcaccatggcgataagctacggactggtgcataaaggctacaccctcggccgtgactccattattggcctgctgcaaggggggcgaattaaagaattgatttacggcgccaacgtactgggtctcatcatgatgggcgcgctgtcggcaagctacgtcaaaatcaccaccccgctgaaaatcagcgcgcttaaaggctcggaagtggtggtccagcagatcctcgactcaattgctcccggcctgctgccgctggcggcggtgttcgctatctatttctacttactgaaaagagggccgcgctacaccaccattttactgtcaatcgtcgctatcagcatcgtctgctcgctgttgggagtgctgtaa

SEQ ID NO: 88869 - DNA, 1110 bp, Enterobacter aerogenes
atgaacggcaatatctaccagcaactgggcttaaaacgggtgattaacgcctgcggcaaaatgaccatcctcggcgtgtccgccgtcgacccgcaagtgatgcaggccaccgcgcaggcggcgggggccttcgtcgaaatcgataaattaaccgaccgtgcgggcgagctggtttccgcccacaccggcgcggaagacagctatatcacctcctgcgcctccgccggtatcgctatcgccgtcgcggcggcgatcacccgcggtgagccggaaaaggtggcgcagatgccggacagcagccagtggccgaacgagatagtgatactgcgcgggcataatgtcgattacggcgcgccaatcaccagcgccatccgcctcggcggcgggcgcattgtcgaagtcggctccagcaatctggcggtgcgctggcagctgcagcgcgcggtgaacgcacgcacggcggcgcttctgtatgtgaaatcgcaccactgcgtgcaaaaagggatgctcgatattgacgatttcgtgcaggtcgctcgccagcataatctgccgctgatcgtcgatgccgccgccgaagaagacttgcgccagtgggtcgccagcggcgcggagatggttatctacagcggagcgaaagcctttaacgccccaacctcaggctttattagcggcaagcgcaactggatcgccgcctgtaaagcccagcaccacggtatcgcgcgggcgatgaaaatcggcaaagagaatatggtcggtctcgtctacgcgctggaccgttaccggacggcggtgccggcgcctgacgccgccgcgctgcgtccattcgccgaggcgatttccgcgctacccggcctgcgcgccgatatcgaacaggatgaagccggtcgcgccatctggcgcattcgggtcagcgtcgacgccaatgaactgggactcagcgcccgtgaggttgaagctcagctacgcggcggcgatatcgccatttacgcccgccgctactatctgcatgagggccattttagccttgacccccgcaccgtcggcgaaggagaaatgtcgctcatcgtcgcgcgcttacaggagattacgcaacatgcagcggattaa

SEQ ID NO: 88870 - DNA, 747 bp, Enterobacter aerogenes
atgcagcggattaacttttatcgcaagcgggtggcgattaatgtactggcgaaggacatcgccaacgcccgggaaatccatgaagccgccgaaggacacgcggtgattggcgtactctcggcgcaatttaccagcgtcgaacaaggcattgcagaagtgcgccgctggatggcggaagtgccttctatttccgtcggtctcggcgccggcgatccggcgcagttttacaaagcggcaatgatcgccgcaaagctccaccccgctcacgtcaaccagaccttcaccggcagcggctttgccgccggggcgctggcggcgaccggcggccagcaaacctttattaatgcgctggtcagccccagcggcacgcccggtgaagtacgtatctccaccggcgtgcgcagcgccaagggcatcccggcccaggtttcctgcgatgcggcggtgagaatgatgttggatacgggcgcgcaggcggctaaatttttcccgatgggcggcgaaaagtcgctggcggagctgaaagcgctcgcccaaagcgcggtagaaaacgatatgacgctgattgagcccaccgggggcatcgatctcgataactttgcgctgattctgcaaacctgcctgcaggccggcgtcgcgcagatcatgccgcacgtgtacagctccattatcgatccgcaaagcggcaatacccgcccgcaagatgtccatgctctgatgaacatcgtcaaggaactggtcgattaa

SEQ ID NO: 88871 - DNA, 585 bp, Enterobacter aerogenes
atgatccgggccatgaacatggaagcccagcatcgtaaaaaagaccccgtccgtttgcatcgtcaactgcttgaatcggcggcgatgatcgccggtcgggatggtatcgccgccctatcgctaaacgccgtcgcccgcgaagctggcgtcagcaaaggcgggctcatgcaccattttcccaataaacaggcgctaattttcgccctgttcgcccggctgttggcgattatggaaaaggcgattagcgagctgatggccgccgataacatcgcttacgggcgctttacccgcgcctatttgcgctatctgtccaacccggagctgacggatacccacgaaagccggcaactgatggtgctgtcgctggcgatgcccgacgaaccggtgctgcgaaaatgctggcgcgactggatgctggatcatctggcgcagggcgatgcgctcgataacggcccgaccggcacgctggtgcgctatgccgccgacggcatctggttatcggaactgaccgaagggcgcaccatgagcagcgaacaccgccaggcgctggtaaacgatctgacaaaaatgacgcttcccgcgtga

SEQ ID NO: 88872 - DNA, 804 bp, Enterobacter aerogenes
atgcgctacaacatcaatgcccgtctcatttatgacgcaacggacggcaccctaacattaccgggcggcaatgagccggatagtcagctatccattaccgccaacgcgctgctctatttctttcttcgccataccggcgttgtcagtcgcgatgaagtgttgaaaaaggtctgggacgataacggcttaacctcatccaacagcaatctcaatcaatacctgagcatgctgcgcaaaaccttccgccactacgatatcgataacattattgtcaccgtgtcgcgcggcatgctgcagctgaatcaggatctcagcatcgaactgctcgacgccgagccgacgcccgccgatgccgttctcacatgcgctacgcctgatgaagccgcccccgctgcggcgccgacgccgcccgccgcttctctacatgcgcgcggtatgtgctggtatctggccggcggctgtctgctgctcatcgccctgctgctggtggcatttagtctcgccggcacccacgtcgcccggccaatcaatctgacgctgatgagccacagccagtgcgaactgctggccagcgatgaaatgctgcgttcggtttcagccacggcctacggtaagaattttgatgaggtgcgtcagcggctgaagctcagctgcaagccgggggagcgtttcgttttcttctacggcgaccggctggagactaacggcctgggccgggtatttctcgcccactgcgcgatgcacgaagacaacccatttagctattgcgataactacttttactactcctggaagccgcaatga

SEQ ID NO: 88873 - DNA, 519 bp, Enterobacter aerogenes
atgagactcgcgccccgcacctttttcgccctctccgccctcgcgtttatcgccgccgccggttttagcgcctggcgcctgctgccggatgccaacgacggcgtgatgagctgctccaccaaagcgatcatgcgttttgaaaacatggaaaaagagaatgtgaatggcaatatccattttaattttgccgccaacggtaacggttcgatggtggtggaaggctataccgattccgccgccggctggctctatctgcagcgctacgtcaaattcagctacaccagccaacgtatctcagcaaccgaacgccactaccgaattaaaaaatgggaatccagcgcctcgtccatcgacgaatcgcccaatgtcatcttcgactacttcatgcgcgagatgtccgacagccacgatggcctgttcctcaacgcgcagaagcttaacgacaaagctatcctgctgagttctatcaactcgccgctctacatctgcacgctgaagtccggcagcatgcttaactaa

SEQ ID NO: 88874 - DNA, 279 bp, Enterobacter aerogenes
atgggtgatgcattggggcttatcgaaaccaaaggtctggtggcctgtattgaagcagcggacgcgatgtgtaaagccgccaacgtcgaactgatcggctatgaaaacgtcggctctggccttgtcaccgtgatggtgaaaggcgacgtcggcgcggtgaaagcggcggtggattccggtgtggaatcggcgcagcgcatcggcgaagtggtgacctcgctggtcatcgcgcgtccacataacgacatcaacaaaatcgtcattaaacacaaggcctga

SEQ ID NO: 88875 - DNA, 279 bp, Enterobacter aerogenes
atgggtgatgcattaggtctgattgaaaccaaaggtctggtggcctgcattgaagcggcggatgcgatgtgtaaagccgccaacgtcgagcttatcggctatgaaaacgtcggctccggcctggtcaccgcgatggtgaaaggcgacgtcggcgcggtgaaagcagcggtggattccggtgtggaatcggcgcagcgcatcggcgaagtggtgacctcgctggttatcgcccgtccgcataacgacatcaacaaaatcgtcattaaacacaaggcctga

SEQ ID NO: 88876 - DNA, 279 bp, Enterobacter aerogenes
atgggtgatgcattaggtctgattgaaaccaaaggtctggtggcctgcattgaagccgcggacgcgatgtgtaaagccgccaacgtcgagcttatcggctatgaaaacgtcggttccggcctcgtcaccgcaatggtgaaaggcgacgtcggcgcggtcaacgcggcggtcgactccggcgtggaagcggcgaaacgcatcggcgaagtcgtcagctctcgcgtcattgcgcgtccacataacgacatcgaaaaaatcgcggcgcagcacaaagcatga

SEQ ID NO: 88877 - DNA, 1602 bp, Enterobacter aerogenes
atgattgaactggataacgatttgcaatcccggcagaacgcgcgggaactggtgcgcaacgccaaaaaggcgcaggcgattctggccaccttttcgcaacagcaaatcgacgccatcgtgaaaaacgtggcccaggaagcagcgcaccacgccgaagcgctggcgaaaatggccgcggaagaaaccggttttggcaactggcaggacaaagtgctgaaaaaccgtttcgcctcgctgcgcgtctatgacgccatcaaagatatgaagaccgttggcatcattcatgacgacccggtaaacaaagtgatggacgtgggcgtgccgctcggcgtgatttgcgcgctggtcccctcaactaacccaacctctacggttatctacaaagcgctgatcgccctcaaggccggtaacgccattatcttctccccgcatccgggcgcgcgtcagtgcagctggaaggcgattgaaatcgtcaaacgcgcggcagaagcggccggcgcgccggcaggcagcgtcgacggcatcacccagttaacgctcgaagccacctccgaactgatgcacagcaaagacgtgtcgctgatcctcgccaccggcggcgaaggcatggtgcgcgcggcctacgcctccggcaccccgaccatcagcggcggcccgggtaacggcccggcgtttatcgaacgcagcgccgatatccaccacgcggtgaaagatatcgtcaccagtaaaaccttcgataatggcgtgatctgcgcctccgaacagtcgatcatcgtcgaacgctgcatttacgacgaggtccaccgcgagctggaagcgcagggcgtctacttcatgaatgaagatgaggcggcgaaaatggcggcgctactgctgcgcccgaacggcaccatcaacccgaaagtggtcggcaaaaccgcgctgtacctcagccagatggcgggattctgcgtcccggccagcactaaagtactgatcgccgagcagaccaccgtatcgccgaaaaacccctactcgcgggaaaaactgtgcccggtacttggcctgtacgtggaagaggactggaaagccgcctgccaccgcgtggtggagctactgaccaacgaaggactcggccatacgctggtgatccacacccgtaatcaggatgtcatccgccagttcagcctcgaaaaaccggtcaaccgcattctgattaatactccggcggcgctcggcgggatcggcgcgaccaccaacatctctccggcgctgactctcggctgcggcgcggtcggcggcggctccagctccgacaacgtcggcccgatgaacctgctcaatatccgcaaagtcggctatggcgtgcgttcgattgacgagcttcgcgcgccgggcagccgccctgaaccacagccgaccatcgttactccggcgagcgatccgcagcgcagcattcttgatgacgtgcgtttcaacgccccggccagcgccgcgccagcgcgcaccgcaggcaacgatgaccgtttcgccagcgcaggcgccgccagtatggaaggtgaaatcaacgaacaaaacgtggaacgcgttattcgccaggtgctggagcgcctcgctaagtaa

SEQ ID NO: 88878 - DNA, 258 bp, Enterobacter aerogenes
atgattctcgcaaaggtaaccggccatgtcgtcgccacgcagaaatgcgatgagctacgcggcagcaacctgctgttgatcacccgcttagatgacaaacagcagccgatgaaagaccagacctgggttgccgtcgataacgtcggcgccggcatgcacgacatcgtgctggcggaagagtacttcgcgctcaataaagaccgctacaaagcgatgtcggtggtcgccattgtcgagaacgtgtttcgggacgcctaa

SEQ ID NO: 88879 - DNA, 1155 bp, Enterobacter aerogenes
atgagtgaatttttactgaaaccgcggatttgcttcggtcaggacgccctctcggtgctgaacgaactttccgcccgcagcgtgctgctggtgaccgataaagcgatggtcaagtttggtctcgccgagcgcgtcaccgccctgttgcgccagcgcgggatcgcctggcagatgtgggacgacgtggtggcggatccggatatcgccaccgtagtgcgcggcatgaagttaatggataaccactacccggatctggttatcgcgctcggcggcggttcggtaatcgatgccgctaaagcggttattttctccctggcgcaaacccgtccgcagactgatcgcccgcgtccatgctttgtcgctatcccaaccaccagcggtaccggctcggaagtcaccgccttttcggtggtgaaagccaacgcggaaaagctggtactggtggatgcgtcgctgctgccggatatcgccattcttgacccggcgctggtggcttcggtgccgccggcgattaccgccgacaccggcatggacgtgctgtgtcacgcccttgaggcctacgtctcccgcgccgccagcgacttttccgacgcgctggcggagaaagtggtgcagcaggtatttcgctatctgccgacctgctggcgcagcggcgacaacctgcaggcgcgcgaaaagatgcataacgcctcctgcatggcggggatggccttcaccaacgcctcgcttgggataacccacagcctggcccacgccctcggcggcgtcttccgcgtgccccatggccgcgccaacgccctgttgatggcgcaagtcgtcgcctggaacgccgatttcgacggtcagtgcgacacccttgcggcaacgaaatatgcccgtctggcgcatctactggatctgccagccgcctcgccgcgccagggcgtcgccagcctgctggtcgccattcaggctttaaaagaagagatgagcatgccctccggcattagcgacaccggcattgaggcggctgaattcgaacgccgtttgccggagatggtcggccaggcgctgcgcgacagctgtacccctaccaacccacgcgcgccggacgctaacacgttaaccgagctttatcgccgggcctggtccggtcatcccgtacagggccactga

SEQ ID NO: 88880 - DNA, 3387 bp, Enterobacter aerogenes
atggcacactacagcttaacgccgcgcgtcaaagtgctggcagaccgtttacgctcgcaggcaagcaccctgtgcaccgagcacgccgcgatcctcagcgcgctggatagcgatatcgcgggcattcccgccgccgtcaaaccggctcgccgtatctatgaactgatgcgccagctgccgctgaccatcagcgccgacgaactgattgtcggtaaccagacccgtaaaccgcacggggcgattttccatgatgaaagcgccgcgcatcgcccatccgtattccagttcctcaacctcaacagcgatctcgattcaccggattacaaactggtagtcgaaaaaggcgtgctggcgattaaacaccagttggaagagaaaacccgcgccctcggtagcgccgttagccgcagcgggatggatgaagtcaacggctgccgcgccgccatctacgcctgcgacgccctgctcgcgctggcgcaaaatctggccaacagcgccgaacagctggcggccgcggaaaccaatgcttatcgcaaagccgagctgctcgatagcgcggccattctgcaccacgttccggcccatccggcgcgtaattttaaagaagcctgccaggcgttctatctgttccagctggcgctacagctggataacggcagctatgcggttaacccgcaaggggcggatatcgcgctactgccttacttccaacgcgatatcaacagcggcgcgctgaatacccagcaggcctatgaaatcgtggagtgcctgtggttcaagctggcggaactgagcgaagtccgcgccgcctgcgccattgacggctatccgatgctcgacgccatgctgcgcggcgccgcttttgacaacgccgaagtgaacgaactctcggcgatgtttatcagcgcccagcgtaacctcagcgcgctgaatctgccgatacgtctgtttagcggcgtacagcaggtcagccacgcgccgttcgccgcctgcgccgacacgccggcgatggaaggcttaaccccgcgtatgcagcgcctgcgtaaccactacctgacggtgcgcccgagcgtctctatctatcgcgcgctggcctttaccgaagtggtcaaagccaaccctggcatgccgaccattctgctacgggcgaaagccttccgccacgcctgcgaaaccgcgccgattctgattcaggacgatgagctgatcgtcggccatccgtgcggcaagccgcgcgcgggcgccttctcgccagatatcgcctggcgctgggtgcgcgacgagctcgacaccatgagcacccgcccgcaggatccgtttgaaatcagcgaagcagataaaaaaaccattcgcgaagagatcgtcccgttctgggaagggcgttcgctggacgagatttgcgaagcgcaataccgtgaggccggcgtctgggccttcagcggcgagaccttcgtcagcgatctctcctatcaccagattaacggcggcggcgatacctgtccgggctacgacgtgctgctattcaccaaagggatgaacggcattaaagccgatgccgaagcgcatctggccagcctgagcatggaaaacccggaagatatcgaccgtatctactactacaaagcggcgattgaaacctgtgaaggggtggtcaactacgcccgccgcatcgccgcccacgcccgcgaactggcggctaaagagcaaaatgcccagcgccgcgccgagttgctgaccatcgccgacgtcaacgaaaacgtgccggccaatccgccgaagaccttgcaggaagcgctgcagagtatctggaccgtcgaatcactgtttgaaatcgaagaaaaccagaccgggctgtcgctggggcgcgtcgaccagtactgctacccgatgttcgaagccgatatccgcgaaggccgcctgacccacgacaccgcgctggagctgctgcaggcgttcatcatcaaatgcgccgaactgatgtggatgtcgagcgagctgggagcgaaatatttcgcgggttatcagccgtttatcaacctcaccgttggcggccagaaacgtagcggcggcgatgcctgtaacgacctgacctatctgattatggacgccgtgcgcttcgtgaaggtttaccagccgtcgctggcctgccgtatccacaaccagtcgccgcagaaatacatggaaaaaatcgtcgacgtggtgaaagcgggaatgggcttcccggcctgccacttcgatgactcccacatcaagatgatgctgcgcaaaggcttcgattttgaagacgcccgcgattactgcctgatgggttgcgttgagccgcagaaatccgggcgcatctaccagtggacctccaccggctacacccagtggcctatcgctatcgagttcgtgctcaaccgcgggcggatggtgctgttcgatagctatcaggggctggacaccggcgacctgcgcgacctgcgcaccttcgaagatttcgacgcggcggtgaaacagcagatcgcccatatcgtgcgcctgtcggccatcggcaccgtcatcagccagcgcgtccaccgcgatgtggcgccgaagccgctgatgtcgctgctggtcgagggctgcatggagagcggcaaagatgtcgccgccggtggcgcgatggtcaaccacggtccggggctgattttctccggcctggcgacctacgtcgattcgatggcggcgatccgcaagctggtgtttgaagagaagaaatacacccttgagcagatccgcgatgcgctgctggccaactttgaaggttacgaagcgctgcgccgcgactgcctgaacgcgccgaaatacggtaacgacgataactacgtcgaccagtacgcgctggatattaccgaatggaccgagaaagagtgccgtaagtacaagatgctctactcaaccctcagccacggcaccctgtctatctccaacaacacgccaatcggcgagctgaccaacgccacgccgaacggccgcctggcgtggatgccgctctccgacggcatcagcccaacccagggcgcggataaacaaggcccgacggcgattatcaagtcggtcagcaagatgaacgtggaaaccatgaacatcggcatggtgcacaacttcaagttcctcaaagggctgctggataccccggaaggtcgccacggcttgattaccctgctgcgtaccgcctcgattctcggcaacggccagatgcagttcagctacgtcgataacgaagtactgaagaaggcgcagcaggagccggagaaataccgcgacctgatcgttcgcgtcgccggctacagcgcctacttcgttgagctgtgcaaagaggtccaggacgagatcatcagccgtacggtgattgagaagttctag

SEQ ID NO: 88881 - DNA, 948 bp, Enterobacter aerogenes
gtgatcgcaaaacaagaattaacgggccgaattttcaatatccagaaatattcgatctatgacggcgatggcattcgcacgctggtgttttttaagggctgcaacattcgctgcccgtggtgcgccaacccggaagggctgaacagccagttccaggtgatgttctcgcacgacaaatgcattaactgcggcgactgcgtcagcgtctgtccggcgggtattcattatcgggcggaagagaacggcgaaatgaagcacttcgtcaaccgcaataaagactgcattggctgtcgcaaatgcgaagagatttgcacccagaacgcgctggacattatgggcaaggacgtcaccgtcagcgagctgatggagatcatcatgcaggactacgacttctacatctcctccggcggcggcgtgaccatcggcggcggcgagatgagcctgcagaccgattttgccgtcgccttattcagcgaatgcaaaaaaatgatgattaacaccgccgtcgaaacccagggcaccaccccgcttgccaactaccagaagctggcgccggtcaccgacaccttcttgttcgaccttaagcagattaacagcgaacaccacaaagcgatgctcggtatcggcaacgaagggatccgccgcaatctcgaatggctggtggattccggcgccaacgtcattgtgcgtatgccgctcattcgcggctacaacgactcattcgacgccattaccggcgccattgattacgtacagaagctggcgaagcgtggaaatatccgccgcatcgacatgctgccgtaccaccagttgggacgcaaaaagtacgaacgcctggatatgccctacccgattacccaggacccgtcttatacaccggacgaactggaccggctggaaaccttcttccagcaatttgattttgatattcgcttagtccgccattaa

SEQ ID NO: 88882 - DNA, 399 bp, Enterobacter aerogenes
atgaaaagtttaggcgtaattgaaacgcgaggatgggtcgccgccattcaggccgtcgacgccgcctgtaaagctgcgggagtgacctgcattggctatcgcaaaccaggctccgggctggtgagcgtctgctttgaaggggagatcagcgccatccacaccgctattgaacgcggcgtggcggtggcaggcgccgagcacaccgtgaagtcgctggtgattgcccgcccggagcgctgcgtggttgaagcgttaagcaacctcaaaggcaacccgccgcgcgagcaaaaaacggccgaaccggtggttatccccgccccggaacctatcgtcccccctgccgccccgaacgaaacggaagataaacatccggcgctgaagaaagggaagaagtcatga

SEQ ID NO: 88883 - DNA, 621 bp, Enterobacter aerogenes
atgatcgacaccctggttcgcgaaaaaatcgccgcccacctgagcgcaacggcgccggcgatcccggtggggatctccaaccgccacgtccatctcgcgcagcaggacgtcgaggcgctattcggcaaaggctacagcctgacgccgttcaaaccgctgcgccagccggggcagtttgccgcccaggagtgcgtgaccattgtcgggccgaagggctcgctgaccaacgtccgtgtcctcgggccgacccgcccggtttcgcaactggaagtgtcgcgcgccgactgcttcacgctcgggattaaggcgccagttcgtgagtccggccagctggagaatgccggtagcgcgctgctgattgggcccgctggccacgttgaactccattcgcaggtgatctgcgcctggcggcatattcatatgtcgccgcaggacgcacgccgactcaacgttagcaatggccagaaggtcagcgtgcgcagcaacggcgagcgccagctgactttcgatgaagtggtggtgcgggtgcgcgatgacttcgcgctggagtttcacattgacaccgaagaagccaatgccgccgggttgaaaaacggcgcgcaggtgacgctcatcggctaa

SEQ ID NO: 88884 - DNA, 669 bp, Enterobacter aerogenes
atgaccgacgaacagattgaaggtttagtcgcgcggattttgcagcgcctgcgcccgccggtactggtgatggtgaccgccgctgacggctatcgcgcggctatccgccaacgcctggcggaaagtggctatccgctacgcctcgcgctggaggatggcctcgctgacgccgccgcgtggcgggaggtcggggagataattccctcttctgcctggcaggatgccctgccgtcagcgccatggcgggcggtactgctgccgtttctcgattatccgctggcttcagacctgctgaacggcacgctcagcagcccgctcgcccgctgcgcacacgaggcgctgctggcgggtattcccgtgctggcgctgcgctaccactgcgatccgctcagcgaactcaaccagctacgtggcgcgcaggccgacagcgcctatgccgggcatctgcaggccacgctggctcgtctggaagcctgcggcgtcttcctcggcaccatgaatgagctgctggcgacgctggacgcgcccaccgcgccagtcgccgccagcagcgaaccgcgccgttatctcaccgtcacagacgtggtgaataatccggcgctggcggcggccccgcacgcgcagctgaccgatgcggccattgattatttaaaaaacagaaagatatga

SEQ ID NO: 88885 - DNA, 414 bp, Enterobacter aerogenes
atgtcttcgaaaacaaaatgctggttatggatgctgctggttatcctctccgaaacctcggcaacctcgacgttaaaaatgttcggtagcagcgaaggcagcacaaaaatgctgctgctcgtattactgattgcactctattgcacctgctattactcgctctcaagggcggtgaaagatatcccggtcggcctggcgtacgccacctggtccggcaccggtatcctggtggtctcgacgctgggaatggcattctacggccagcatccggataccgccgccatcatcggcatggcggtgatcgccagcggcatcgttatcatgaacttgttctcgaaaatgggttccgaagagagcgaagaggctacgcccgtcacgccagtcgcctccatggataaaaaaatcgccaactaa

SEQ ID NO: 88886 - DNA, 330 bp, Enterobacter aerogenes
atgtttaatctcggatttttatggctggcgctgtctatcggctccgaaatcaccggcacctcgatgatcaaaaagaccaacggcttcagcaagctggcgccttcagtgctggtggtctgcgcctacggcctgtgctacttcgctctcacccgcgcgatgagcaccattccagtgggcgtagcctactcgctgtggtgcggcttcggtatcgtcggcgtcaccatctgctccatgatcctctataagcagaaaccggacctggcggccattatcgccatggcgctgattatctccggcggcgtgatcatgaacgtcttctcgaccatgtaa

SEQ ID NO: 88887 - DNA, 1008 bp, Enterobacter aerogenes
atgaaccatccacaaaccatcctcaccggcgaccgcccgaccggccaactacatcttggccactacgtcggttcgctgcgccagcgcgtcgcgctgcagcacgaccaccagcagtttatcctgatcgccgacctgcaagggctcaccgataacggcagcaacccgcaaaaaatcagccaccatatcctcgaagtcatggccgattatctggccgtcggcatcgaccccaggctcaccactatttgcctgcagtccgctctgcccgcgctggcggagctcagcgcgctgtatatgaatatcgtcaccgtcgctcgcgtggaacgtaatccgacggtaaaaaatgagattgcccagaagggattcgcccgctcgctgccggttggcttcctcgcctatccgattagccaggccgccgatatcaccgccttcaaagccgagctggtgccggtgggcgacgatcagctaccgatgattgagcagaccaatgaaatcgtccacaaaatgaatagcctcaccggcgaaccggtactgcgccactgcaaagcgctactcagcgaagtgagccgcctgccgggcgtcgacggtaatgccaaaatgtcgaaatcgctgggcaatacgctgacgttatcagccagtgaagaggagattcaccgcgcggtcagcgcgatgtataccgacccgacacacctgagagtcagcgatccggggaatgtcgacggcaacgtggtattcacctatctcgacgctttccatagcaatgaggcgctggttgccgagatgaaagcccactatcagcgcggcgggctgggcgatcgccagtgtaagaatgaactggaaacctgcttgcaggaactactggcgccgatccgcgaacgccgggctacctacagtcaggataaaggaatgctgctggaattgttgcgccagggtagcgaacgcgcccaccagctcacgcagcagacgctgcatgaagtgaagcgcgggctggggctgccggtactgttctga

SEQ ID NO: 88888 - DNA, 1395 bp, Enterobacter aerogenes
atgaacgatgaaagcaaaaaatatatctctgttatttttaaggagtggctaccgctgtatgacagcttgacgccagccgttaaggaggtacttaaaaatatcgcagtggagcaatcggaagcgttagcggcccggttttatgattttatttttcaggatccggatattgcccgccacctgacttatgatttagttcaggagcgtctgagccgctcgctggcgctatgggtgaaggagatcctgaccagcgacaaagcgcagttgccggcgttggcggaacggcaatatcagattggcagcatccacgcgcggatcggcatcccggcggaggcggtgctgcgcggcgcccggcagattaaggccgggcttatcgagtatatccgcagccacgtaaacgaccgccggattgccgtcgatgccatttattacgctattatggcgattaatatggccgttgagatgatgtgccatgcctataccttatcgcactatcgggcgaccaaaaacgaagaggcgtatcgcctgtatagtttgatggacaatgttccgatggaatatggcaaacagcaggcggcgctttccggttgggaaaatacggcgatttttaatattgttagcgaaaataaagcaaatactaacgctacgttattatctgaatcggaatttggtctatggttccgccataaatgcgtacgctattttaacaaaaatagccagatggacgaaatcgccgcattaatttcgcaggtcgacgacttattaataggttggcgagcatccgcctctgtcatggattataaaaatacacaaaacctgattcaggggatccatattcattgccagcaaataggcagccaactgggggtgatttttagcagcttgtcgcagatgcaaaatggcaaagatgcgttaaccagcctacttaaccgccgctatttgccggtagtgctgaagcatgaagtgacgctggcaatggagcatgagctgccgatgacggtggcgatcatcgacatcgatcatttcaaaggcattaacgataactggggccatatggtcggcgaccgggcgattaaacatgtcgcggaactgctcagcgataatatccgttccagcgactatatcttccgctacggcggggaagagtttctgctggtgctggtggagaccggcgtgtcagaagcgtttaccatcctcgaccgcctgcgcaagaaaattagccaactggcgtttaacgttggcggcgacacgcagatcccgatcaccgccagcattggctatgccgtgcactccggccatcccgattacaacctgctgttgcgcgatgccgataatgcgctgtacgccgccaaacgcgaggggcgcaactgcgtgaaaatgcacaaaggcagggtataa

SEQ ID NO: 88889 - DNA, 1320 bp, Enterobacter aerogenes
atgaggggctcgcaattccatagtttatatatggactttgccgctaccgatgttagtatccagattataaatatgcgtgtttcatttaaggccaggattgctgatgatgaccactctaaaagcacatcttccccaccggttggcaacgtaacaggattttgcgccggacggccttatctccccttttttatcgtcccgccgggcgaaatagcgaaacgcgcaccactcagcaatatggaacagagcgagtcgcgtatggataagaacaaacgacgttgggccgggtatatcgtagttgcagcggtggttatcgccgcagcatggtggatgttgcgcccggccgggctaccgccgggcttcgccgccagtaatggccgcatcgaggcgacggaagtcgatatcgccaccaaaattgccgggcgtatcgagacgattctggtcaaagaggggcagttcgtccataaaggcgatgtgctggcgcggatggatacgcgggtactcaatgagcagcgcctggaagccgccgcgcaaatcaaagaagcgcaaagcgcggttgccgccgccaatgctttactcgaccagcggcagagcgaaatgcgcgccaccgaagcggtggtgaagcagcgccaggcggagctcgattccaccgccaaacgccacgtccgttccagcaccctttcgcaacgtggcgccgtctccgctcagcagctggatgacgatcgcgcggccgctgaaagcgcccgcgcggcgctggaatcggcgaaagcgcaggtctctgccgcccgcgccgccattgaagccgctcgtaccagcattattcaggctaaaacccgcgttgaagccgccgaagcgacccatcggcggatcctcgccgatatcgacgatagccagctgaaagcgccgcgcgacggccgcatccagtatcgcgttgctgagccaggcgaagtgctggccgccggaggacgggtattaaacatggtcgacctggctgacgtctatatgaccttcttcctgccaacggagcaggcgggcctgttggcgctcggcagtgaagcgcgcttgatccttgatgccgcgccagagctggtgatcccggcaaatatcagctttgtcgccagcgtcgcgcaattcacgccaaaaacggtagaaaccagcgacgagcggctcaagctgatgttccgcgtcaaggcgcgcattccgccagagctactggagcagcatctggaatatgtcaaaaccggcctgcctgggatggcctgggtacgactggataagcagaaaagctggcctgaagcgctgacggtgaggttgccgcaatga

SEQ ID NO: 88890 - DNA, 2760 bp, Enterobacter aerogenes
atgaaactgacgccgcaggatacttcgcctcccgtcgccctgctggaaaacgttggtcagcagtttggcgccaccatcgcgttgcgcgatatcaacctggcgatcccggcgcggcgtatggttggcctgattggcccggacggggtcggcaaatcaagcctgctctcgcttatcgccggggcgcgggtcatcgagcagggtaacgtgatggtgctcggcggcgatatgcgcgatgttcgtcaccgccagcaggtgtgtccaaaaatcgcctggatgccgcagggtttggggaaaaacctctaccatacgctatcggtctatgaaaacgtcgacttcttcgcccgcctgtttggtcacgataaagccgagcgtgaacttcgtatcaacgaactgctccagagcaccgggctggcgccgtttcgcgatcgccctgccggtaaactctccggtggaatgaaacaaaagcttgggctgtgctgtgcgctgatccacgacccgcagctactcatccttgatgaaccgactaccggcgtcgacccgctctcccgcgcgcagttctgggatctgatagacagcattcgccagcgccagccggaaatgagcgtgctggtcgccaccgcctacatggaagaggccgagcgcttcgactggctggtggcgatgaacgccggcgagattctggcgaccggtagcgcggcggcgctcaaaaaacagaccggcagccagacactggaacaggcatttatcgccctgctgccggaagcgcagcgcctggcacataaagacgtggtcatcccgccgcgcgacagcagtgaggaagagatcgctattgaagcgcgcggcctgaccatgcgcttcggcaactttgtcgccgtcgaccacgttaactttcgtatcgcccgtggcgaaatttttggcttcctcggctctaacggctgcggcaaatccaccaccatgaagatgctcaccggcctgttgcccgccagcgaaggcgaggcctggctgttcggccagccggtcgacccgaaagatatcgccacccgccaacgagtgggttatatgtcgcaggctttctcgctctatagcgaactgagcgtacggcaaaacctggagctgcacgcccgcttgtttcacattccggaccatgaaatagctggccgggtcgcagaaatgagcaaacgctttatgctgaccgaggttgaagacgcgcttcccgctgacttgccgctggggatccgccagcgcctgtcattagcggtcgcggtaatccatcgcccggagatgctgatcctcgatgaacccacctccggcgttgacccggtggcgcgcgatatgttctggcagctgatggtcgacctggcgcggcaggatcgtgtcaccatcttcatctccacccactttatgaatgaggccgaacgctgcgatcgcatctcgctgatgcacgccggcaaggtgctggccagcgatacgccgcaggcgctggttgagcaacgtggctccgccagcctcgaagaggcgtttatcgcctggctgcaggaagcggcggatgccgcacaaccgaccgtttctgtctctaccacgcccgcgccgcctgctgtcgtatcacaccagcagaacgcgtccccacgccagtcattcagcctgcgccgcctgtttagctatagccgccgcgaagcgctggaactacgccgcgatccggtacgatcgacgctggcgctgctggggacggtgatcctgatgtttatcatgggctatgggattagcatggacgtcgaggatctgcgctttgccgtcctcgaccgcgatcaaacgatcagcagccagaactggtcgcagaatatcgcgggctcacgctactttatcgagcaggcgccactgcggagttatgacgaattggatcgtcgaatgcgtaacggcgagctggcggtagcgatagaaatcccgccgaactttggccgcgatatcgcccgcggaacgccggtgcaaataggtgtttgggtggacggcgcaatgccaaatcgcgcggaaacggtgcgcggatacgtacaggcgatgcatctggcctggctgcaggagatggccgggcagcaaagtagcccgaatcgtgatacctcgattatttccatcgagacccgctatcgctataacccggacgtaaagagcctgccggccatcgtcccggcggtgatcccgctgctgctgatgatgatcccggcgatgctcagcgcgctgagcgtagtgcgtgaaaaagagctcggttcgatcatcaacctgtacgtgacgccgaccacccgcagcgagttcctgctcggcaaacagctgccttacatcgtgttggggatgtttaacttctttctactatgcgctttatcggtcttcgtatttggcgtcgcgcataagggcagtttcctgaccctcaccctggcggctctgctgtatgtcaccatcgctaccgggctgggattgctgatctcgacatttatgaagagccaaatcgccgctattttcggtaccgcgattattacgctgattccggccacccagttctccgggatgatcgacccggtggcatctctggaggggccaggtcgctggatcggacaaatctacccgaccagtcatttcctgaccatcgcccgtggcaccttctccaaggcgctgaatattagcgatttgtgggtttcgttcattccactattgattgcggtgccgctggtgctcgggctgagcgtgtggctgctgaaaaaacaggaggaatga

SEQ ID NO: 88891 - DNA, 1125 bp, Enterobacter aerogenes
atgcgcggattacgcaatatttataacctcggcgtcaaagagctgcgcagcctgctcggcgataaagcgatgctggcgctgattgtgtttgcttttaccgtgtcggtttactcctcggccacggtaatgcccggctctctgcacctggcgcctatcgccattgccgatatggataaatcacagctctcatcgcggatcattaacggcttttatcggccgtggtttttaacgccggagttgatcagcgccgatgaaatggatgccgggctggatgcgggacgatacacattcgccatcaatattccaccaaacttccagcgcgatgtgctggccggtcgtcagccggaggtgcaggtcaacgtcgacgccacgcgaatgagccaggcctttaccggcaacggctatatccagaatattatcagcggtgaagtgaacagctttatcgcccgttatcgcgacaacagtgcgcttccggtagagctggcggtgaggatgcgctttaaccctaaccttgagcaagaacgcttcggcgcggtgatggcgattattaacaacatcaccatgctggcaattgtcctcaccggctcggcgcttatccgcgagcgagagcacggcaccattgagcacctgcttgtgatgccggtaacgccgtttgagataatgatggccaagatctggtcgatgggtctggtggtactggttgtctccgggctgtcgctactgctgatggtgcaggcagttttgcaggtaccgattgaggggtcgattccgctgtttatgctgggggttgcgctcagcctgttcgccaccacctccattggcatttttatgggcacgctcgcccgttctatgccgcaactggggctactgatgatcctggtgctgctgccgctgcagatgctctccggcggctccacgccacgggagagtatgccgcagctggttcaggacattatgttgaccatgccgaccacccatttcgtcagcctcgcgcaggcgatactttaccgcggcgccagctttgccatcgtctggccgcagtttttaattttgttcgctatcggcggcgctttctttaccattgcgctgctgcgttttcgcaagacaattggtgagatggcataa

SEQ ID NO: 88892 - DNA, 318 bp, Enterobacter aerogenes
atgaaaatcctgcttaactggccgccgctgcgccagatcgttacttacattcaggagcgctttacctttctggttctgctctgctggccggcgattatctggctgttctgccgggttggcgtgtggcttactgatagcacctatcaactgctgggaaaatcgcctgcccactctttcactgtttatcttcaaccgtttatgacgcccggcacgttactgcgcatttcaatcagttgggttgtgctgttattcatccttttcagtatggcgatggccttcacctggggtctgcgccgctttatgaatcgtcaaaaataa

SEQ ID NO: 88893 - DNA, 2439 bp, Enterobacter aerogenes
atgaaaatcaaagcccccgatgctttactggctgccgaagttagccgacgtggtttaatgaaaaccacggcgataggcggcctggcgatggccagcaacgcattgaccttacccttcacgcgtattgcgcacgccgctgatacgctggcgccagccagtgagaaagtggtctggagcgcctgcaccgtaaactgcggcagccgctgtccgctgcgcatgcacgtggttgatggtgcgattaagtacgtagaaaccgataataccggcgatgataactacgacggtctgcatcaggttcgcgcctgtctgcgaggccgctctatgcgccgtcgggtctataaccctgaccggctgaaatatccgatgaagcgcgtcggcaaacgcggtgaaggaaaattcgaacaaattagctgggaagaggcgttcgacactatcgccagcaatatgcagcgcctgattaaagattatggcaacgaatctatctatctgaactacggaaccggtacgctcggcgggactctgactcgttcctggccgccaggaaaaacgctgattgctcgtctgatgaactgctgcggcggctatctcaatcattatggcgactattcatcggcgcagattgcggctggtttgaattacacctatggcggttgggccgatggcaatagcccgtcggatatcgaaaacagtcagttggtggtgctgtttggcaataaccctggcgaaacgcgcatgagcggcggcggggtgacttactaccttgagcaggcgcggcagaaatccaatgcccgcatgatcattatcgatccgcgttataccgacaccggcgccgggcgtgaagatgaatggatcccgattcgaccgggaaccgacgcggcgctcatttcagcgctggcttgggtgatgattactgaaaatctggtcgatcagcccttcctcgataaatactgcgtcggctacgacgagaaaaccctgcctgccgatgcgccggcgaatggacattataaagcttacatccttggccagggttccgacggtatcgctaaaacgccggagtgggcatccaccattaccgggatcccgcgtgagcgcattgtgaagctggctcgcgagatagcgacggcgaaaccggcgtatatcagccagggctggggacctcagcgtcacgccaacggcgaaatcgccacccgcgccatctccatgctcgccattctgaccggcaacgttgggatcaatggcggcaatagcggcgcgcgtgaaggttcatatagcctgccgttcgagcgcatgccgacgctggaaaacccggtagagaccagcatctctatgtttatgtggaccgacgcgattgaacgtggtccggaaatgaccgcgctgcgtgatggcgtacgcggcaaagataagctcgacgtgccgatcaagatgatctggaactacgcggggaactgccttatcaaccagcactccgagatcaaccgcacccacgaaatcctgcaggacgataagaagtgcgaaatgatcgtggtcatcgactgccacatgacgtcgtctgcgaaatacgccgatattctgctgccggactgtaccgcctctgagcagatggacttcgcgctggacgcctcctgcggcaatatgtcctatgtcatctttgccgaccaggcaatcaaaccgcgtttcgaatgcaaaaccatctatgagatgaccaccgagttggcgaaacgcatgggggtagcggagaagtttaccgaaggccggactcaggaaggctggatgcgctatttgtatgagcagtcgcgtaaagcgattcccgaactgccggatttcgatactttccgccagcagggcatcttcaagcagcgtgacccgcaaggtcatcatgtggcgtataaagccttccgtgacgatccgcaggccaacccgctgaccacgccatcgggcaaaatcgagatctattcccaggagctcgctaaaatcgccgcgacctgggagctgccggaaggcgatgtcatcgatccgctgccgatctacactcctgggtttgaaaattacaatgatccgttgactgctaaatatccgttacagctgacgggattccactacaagtctcgcgtccactcaacgtatggcaacgttgatgtcctgcaggcagcctgccgtcaggaaatgtggatcaatccgatcgatgcgaagacgcgcggcatcgtcaatggcgatcgcattcgtattttcaacgaccgcggcgaagtccatatcgaagcgaaagtgacgccacgtatgatgccgggcgtcgtcgcgctgggcgagggcgcctggtataacccggacgcctcacgcgtggatcaggccggcagcattaacgtgctgaccacccagcgtccgtcgccgttggcgaaaggcaacccatcgcataccaacctcgtccaggttgaaaagctgtaa

SEQ ID NO: 88894 - DNA, 1293 bp, Enterobacter aerogenes
atgctcgatcccaatctgctgcgtaccgagccagacgcagtcgcagaaaaactggcacgccggggctttaagctggatgtagataaactgcgcgctcttgaagagcgtcgtaaagttctgcaggttcaaaccgaaaacctgcaggcggagcgtaactcccgatcgaaatccattggccaggcgaaagcgcgcggggaagatatcgagccattacgcctggaagtgaacaagcttggcgaacagctggatgccgcaaagtccgagctggaaacgctgctggcggaaattcgcgatatcgcgctggcgatcccgaatattcctcacgatgacgtgccggtgggccgtgacgaaaacgacaacgttgaagtcagccgctggggtacgccgcgccagttcgatttcgaggtgcgcgaccacgtgacgctgggtgaaatgcatggggggctggatttcgccgccgccgttaagctaaccggttcccgtttcgtggtgatgaaaggccagctggctcgcctgcaccgcgcactggcgcagtttatgctggatctgcacaccgaacagcacggttatagtgagaactatgttccttatctggtgaaccaggacacgctgtacggtactggccagttgccgaaattcgccggcgacctgttccatactcgtccgctggaagaagaagccgatagcagcaactacgcgttgattccgaccgccgaagtgccgttgaccaacctggtccgcgacgaaatcatcgacgaagacgatctgccgattaaaatgaccgcccatacgccgtgcttccgttctgaagcgggttcctatggtcgtgatactcgcggtctgatccgtatgcaccagttcgacaaagttgaaatggtgcagattgtacgtccggaagactccatggcggcgctggaagagatgaccggccacgctgagaaggttctgcaactgctgggtctgccgtaccgtaaggtagcgctgtgcaccggcgatatgggcttcagcgcctgtaaaacctatgacctcgaagtgtgggttccggcgcaggatacctatcgcgaaatttcttcctgctctaacgtctgggatttccaggcacgtcgtatgcaggcgcgttgccgcagcaagtccgacaaaaagactcgtctcgttcataccctgaatggttctggtctggcggttggccgtacgctggttgcggtaatggaaaactatcagcaggccgatggccgtatcgagatcccggaagttctgcgcccgtatatgcgtggcctcgaatatatcggttaa

SEQ ID NO: 88895 - DNA, 1344 bp, Enterobacter aerogenes
gtgagcaacttttcgctcgatttttccgataatgcatttcaacctctggccgcccgtatgcggccagaaaatttagcgcagtacattggccagcagcacctgctggcgccgggtaaaccgctgccgcgggcgattgaggcagggcatctgcactcgatgatcctgtgggggccgccgggcacgggtaaaactacccttgcggaagtgatcgctcgctacgccaatgctgatgtcgagcgtatctcggctgttacatctggcgtcaaagagatccgcgaagctatcgaacgtgcgcggcaaaatcgcaacgctggtcgacgcactatcctgtttgttgatgaagtgcatcgttttaataaaagtcagcaggacgcatttctaccgcacatcgaagacggcactattacttttattggcgcgacgaccgaaaacccgtcatttgaacttaattccgctttgctctcccgcgctcgcgtctacttgctcaaatcattgaccacggacgatatcgagcaggtgctcaaccaggcgatgagcgataaagcgcgaggctacggtgggcaagatattatcctgccggatgaaacccgcaaggcgattgccgagctggtcaacggcgatgcgcgccgggcgttgaacacgctggaaatgatggccgatatggctgaaaacgacgattcgggcaagcgagtgctgagagcggaactgcttaccgaaattgccggcgagcgtagcgcgcgttttgataataaaggcgaccgtttttacgatcttatatccgcgttacataagtccgtgcgcggtagcgcgccggatgcggcgctgtactggtacgcacggattattaccgcaggcggcgatccgttgtatgttgctcgccgttgtctggctatcgcgtctgaggatgtcggcaacgccgatcctcgcgccatgcaggtagccatttccgcgtgggattgttttactcgcgttgggccggcggaaggtgagcgggctatcgctcaggcgattgtttatctggcctgtgcgccgaagagcaacgcggtctacaccgcctttaaggccgcgctggccgatgcccgcgatcgccctgattacgacgtgccggtacatttacgcaatgcgccgaccaaactcatgaaagaaatgggctatggccaggagtaccgctacgcgcacgatgaacctaacgcctacgccgctggcgagcagtatttcccgcaggaaatggcgcaaacgcgctattatcagccaacaaacagggggctcgagggcaaaatcgctgaaaagctcgcctggcttgccgaactggatcaaaatagccagataaaacgctaccgctaa

SEQ ID NO: 88896 - DNA, 612 bp, Enterobacter aerogenes
atgaagaaacttgccatcacctgtgcattattgtctggcttcgtggtaagccaggtttgggcagacgctgccggcgacttaaaaagccgtctggataaagtcagcagtttccatgccagcttcactcagaaagtgaccgacgcaagcggtaatgccgtgcaggacgggcagggcgatttgtgggtgaagcgcccgaatctgttcaactggcatatgacccagccggatgaaagtattctggtatcggatgggaaaacgctgtggttctataatccgtttgtggagcaggcaaccgcaacctggctgaaaaacgcgaccagcaacacgccgttcatgctgatcgcccgcaaccagtcagcggactggcagcaatacaacatcaaacaaaacggcgatgattttgtgctgacgccgaaaagcggtaacggcaacctcaagcagttcacaatcaatgtcggccgtgacggtactatccatcagttcagcgccgttgagcaagacgaccagcgcagcagctatcagctgaagtcgcagcagaatggcgccgtcgacgcatctaagttcacttttacgccgccgcaaggggtgacggtggacgatcaacgtaagtag

SEQ ID NO: 88897 - DNA, 4011 bp, Enterobacter aerogenes
ttgagccaggaatacaccgaagacaaagaagtcaaactaacgaagctaagcagcgggcgccgcgttcttgaggcgttactcatcctttgctctctttttgccatctggctgatggcggcattactgagctttaatccatccgatcccagttggtcacagaccgcctggcatgagcctatccataatctgggcggcatgcccggcgcgtggctggcggatacgttatttttcatctttggcgtaatggcctacaccatccccgtgattatcatcggcggctgctggtttgcatggcgtcatcaggaaaatgacgagtatgtcgattacttcgctgtttcgttgcgcttgatcggcgcgctggcgctgatcctcacctcctgcggcctggcggcaattaacgccgacgatatctggtactttgcctccggcggcgtcattggcagcctgcttagcaccaccttacaacccttgctgcacagcagcggcggcactatcgccttgctctgtatctgggccgcgggtttaacactgtttaccggctggtcatgggtcagcattgccgagaaactcggcggcgcaatcctttctattctgacctttgccagtaatcgtacccgtcgggacgatacctgggttgatgaaggcgaatatgaagatgatgaatatgaagatgaagaagacgacgataccgcgcagccgcgggaatcacgtcgcgcccgcatcttacgcagcgcgctagcgcgtcgtaagcgtctggcggaaaagttcgccaacccgatggggcgtaaaaccgatgccgcgctgttctccggtaaacgaatggatgatgcggaagcagtacaatacagcgccagcggcgcgcctgtcgctgcggatgatgtcctgttctcaggcgccagcgccgcgcgtcctggcgatttagacccttacgatccgctactgaacggccatacggtggccgacccgatcggcgccgcctccgccgctgtcgttgcgccgcaggcatgggcggagcaggggacaggtcaggcataccaaccggaggccgctcacctgcaaccaccggtgtatcagcctgaatatgcgccgcagcagccgccggtttatcaaccggaagccgcgcatcctcagcagccggcgtatcagcctgagtatgcgccgcagcagccgccggtttatcaaccggaatccgcgcatccgcagcagccagtgtatcagccggaatacgcgccgcagcagcagccggtttaccagccggaagccgcgcatccacagcagccagcgtatcagcctgagtatgcgccgcagcagccgccggtttatcagccggaagccgcgcatccacagcagccggcgtatcagcctcagtatgcgccgcagcagccgccggtttaccagccggaagccgcgcatccacaacagcctgtgtatcagcctgagtatgcgccgcagcagccaccggtttaccagccggaagccgcgcatccgcagcagccgatataccagcctgaaccggctgttcaacaacctgtttatcatcaggaaccggcgccagccgctgagcctgagactcctcaggaagaaactaaacgcccgccgatgtactacttcgaggaagtcgaagagaagcgcgcgcgcgagcgtgagttgctggaatcctggtatcagccaatccctgaaccggcgagcccggtggcgaccaaaccgatcaccaccccggctgccccatccaaaccgtcagttgatgccgccgccgtgacggccgtcgccgcaggcgttcatcaggccaccacttctggcagcgcagccgcagccgcctcagtggcgtcaaccgccgctgacgcagcgccagttttcagcccggcatccagcggcccgcgggtacaggtaaaagaaggcattggtccgaaattgccgcgtccgaatcgcgtccgtgtgccgacgcgtcgggagcttgcttcctatggcattaagctgccgtctcagcgtattgctgaagagcgcgcgcgtcgggccgagcttgaacatcattacgataatgagccgctgagcgacgaagaagccgatgcgttggaacaggacgagctggcgcgtcagtttgccgctacccagcaacagcgctatggcgagtcctgggaatccgaaagcgatgagcaggacgaagacgctgccgctgaagccgaactggcgcgccagtttgccgcgacccagcagcagcgctatgccagcgagcagccgccgggagccaatcccttctcaccggcggactatgagttctcgccgatgaaaacgctggtcaatgatggtccaagcgagccgttgtttacgccgacgccggaagtgcagccccagcaaccggctcagcattatcaacaaccggcagccgcgccacagcagggttatcaacctgcgcagcagccaatgcagcaacaacagccggttgctcagcagcccgcgccgtcgccgcaggatagccttattcatccgctactgatgcgtaatggcgacagccgtccgctgcaaagaccaacaacgccgctgccgtcgctggatctcttgacgccaccgccgagcgaagttgaacctgttgatacctttgcgcttgagcagatggcgcgtctggtcgaagcgcgtctcgccgatttccgcattaaagcggatgtggtgaactactcgccgggtccggtgatcactcgtttcgagctgaacctcgcgccgggggtgaaggccgcgcgtatctctaacctgtcgcgcgaccttgcgcgttcgctgtcgaccgtggcggtgcgtgtggtggaagttattccgggtaaaccttacgttggcctggaattaccgaacaaaaaacgccagaccgtatacctgcgcgaagtgctcgattgtccgaaattccgcgagaacccatcgccgcttaccgtggtgctgggcaaagatatcgccggcgatccggtggtggccgatctggcgaaaatgccgcatctgctggttgccggtaccactggttcgggtaaatcggtcggcgtgaacgccatgatcctcagcatgctctataaggcgcagccggaagacgttcgtttcatcatgatcgacccgaaaatgcttgagctgtcggtgtacgaaggtatcccgcatctgctgacggaagttgtcaccgacatgaaagacgccgccaatgcgctgcgctggagcgtcaatgaaatggagcgccgttataagctgatgtcggcgctgggcgtgcgtaatctggcgggctacaacgagaagatcgctgaggccgcacgcatgggacgcccgatcccggatccttactggaaaccgggcgacagtatggacgccgtgcatccggtgctggaaaaactgccgtacatcgtggtgctggtggatgaattcgccgatctgatgatgaccgtcggtaagaaggtggaagaactgattgcgcgtctggcgcagaaagcgcgcgcggcgggtattcacctggtgctggcgacccagcgtccgtcggttgacgtgattaccggtcttatcaaggccaacattccgacgcgtatcgccttcaccgtatcgagcaagattgactcgcgtaccatccttgaccaggggggcgcagaatcgctgctgggcatgggggatatgctctattccgggccgaattccaccatgccggttcgtgtccatggcgcatttgtccgtgaccaggaagtacacgccgtggtgcaggactggaaagcgcgcggtcgtccgcagtatgttgacggtattacctccgatagcgaaagcgaaggcggtggtggcggctttgatggcggggaagagctggatccgctgttcgatcaggcggtcaacttcgtaaccgagaagcgtaaagcctcgatctcgggggtgcagcgtcagttccgtatcggttataaccgcgcggcgcgtatcattgagcagatggaagctcaggggatcgtcagcgagcaaggccataacggtaaccgtgaagtcctggcgccgccgcccttcgagtaa

SEQ ID NO: 88898 - DNA, 495 bp, Enterobacter aerogenes
atggtagatagcaagaaacgccctggcaaagatctcgaccgcatcgatcgtaacattctgaatgaactgcaaaaagacgggcgtatttccaacgtcgagctttccaaacgggtgggactttctccgacgccttgccttgagcgtgtgcgtcgactggaaagacagggttttattcagggctatacggcgctgctcaacccgcattatctggatgcatcacttctggtatttgttgagattactctgaatcgtggtgcgccggatgtgtttgagcaatttaacgccgcagtacaaaaacttgaagaaattcaagagtgtcacttggtatccggtgattttgactatctgttgaaaacccgcgtaccggacatgtcagcgtatcgtaaattgctgggcgaaaccctgctgcgcctgccgggcgtaaacgacacccgtacctacgtggttatggaagaagtcaagcagagtaatcgtctggtaatcaagacgcgctaa

SEQ ID NO: 88899 - DNA, 969 bp, Enterobacter aerogenes
atgggcacagccaaacacagtaaactgcttattctaggttctggacctgcaggatataccgcggcggtctatgctgcgcgcgcaaacctgcagccggtgctgatcaccggcatggaaaaaggcggtcagctgaccaccaccactgaagtggaaaactggccaggcgacccaaacgatctgaccggtccgctgctcatggaacgcatgcacgagcatgccaccaagttcgaaactgaaattattttcgaccatatcagcagcgtcgatctgcaaaaccgtccgttccgcctggtcggcgacagcggcgagtacacctgtgacgcgctgattatcgctaccggcgcttccgcccgttatctgggtctgccttctgaagaagctttcaaaggacgcggcgtctctgcctgcgccacctgcgacggtttcttctatcgtaaccagaaagtcgcggtcatcggcggcggcaacacggcggttgaagaagcgctgtatctgtccaacatcgctgctgaagtgcatctgatccaccgtcgcgacaccttccgtgcggaaaaaatcctgatcaagcgcctgatggataaagtggaaagcggcaatatcgtgctgcacaccgatcgcaccctggaagaagtcaccggcgaccagatgggcgtcagcggactgcgtctgcgcgataccaaaaatagcgataacgttgagacgctggacgtcgccggtctgtttgtcgccattggacacagcccgaacaccgctatctttgaaggtcagttagcgctggaaaacggttatatcaaagtacaatccggcatccacggcaacgccacgcaaaccagtatccctggcgtgttcgctgcgggcgacgtgatggaccatatctaccgtcaggcgattacctccgccggcaccggctgtatggcggcgctggacgcggaacgctatctggatggtttagctgacgcttgcaaataa

SEQ ID NO: 88900 - DNA, 1767 bp, Enterobacter aerogenes
atgaataaaacccgtcaacaagagttaacccgctggttaaaagaaaaaagcattatctcccgtcgctggttgatgatttctcgcctgctgggcgtcgtgagcggtctattgatcgtcgctcaggcgtggttcctggcgcgaatacttcaccgaatgataatggaaaatatcccggcgacggcgctgctgctgccgtttaccttgctggcgctggtgctgatcctgcgcgcctgggtggtgtggctacgcgaacgcgtcggcttccacgccggccagcatatccgttatgaaattcgccgccaggtgcttgaccgtcttcagcaggcgggcccagcctggattcaaggaaaacccgccggcagttgggcgacgctcatccttgagcaaatcgacgatatgcatgattactacgcgcgctatctgccgcagatgacgctggccgcctgcgtgccgctgctgattgttatcactatcttccccagcaactgggcagccgcgctaattttactcggcaccgctccgctgatcccgctctttatggcgctggtcgggatgggcgccgccgatgctaaccggcgcaatttccttgcgctcggtcgccttagcggccacttcctcgaccgtctgcgcggcatggaaacgctacgcctgttcaaccgcggcgaggcggaaattaacaatatccgcgatgcgtcgcaggatttccgccagcggacgatggaagtcctgcgtctggcctttctctcctccggcgtgctggagttctttacctcgctctctatcgcgctggtggcggtctatttcggtttttcctacctcggcgagctcgacttcggccactacggcgtcggcgtcacgctgatgtccggttttttaaccctgattctggccccggagtttttccagccgctacgtgatttaggcacattttaccatgccaaggcgcaggccattggcgcggcggatagcctgaagacttttatggaaacgccgctggcgcaggctgaacggggcgagaaaacgctaagcgatcatgaactgattcgcctcgaagcccgcgatctgatggtgaaatcgccggaaggcaaaacgctggcaggcccgctgagtttcaccctgaacgctggcgagcgcgtggtcctggtcggccagagcggttccggtaaaagctcgctgctgaatacgctgacaggctttcttccctatgaaggttcgctacaggttaacggcgtggagctgcgcgatctcgatgctgaacgctggcgtcggctaattagctgggtcggtcaaaacccgcaactgcccgccgccacgctgcgtgaaaacgtgctgctagcgtggccagaagccacggaagcgcaactgcagctagccctggataaggcctgggtcagcgagtttatttcccaattgccacaaggtattaataccccgttaggcgatcaggctggcggcctctcggtcggccaggctcagcgtattgccgttgcgcgcgcgctgctggtgccgtgccgcctgttgctgcttgatgaaccagcggccagccttgacgctcacagcgaacagcgtgtgatgcaggcgctatctaacgcttctacccagcagaccacgctgatggttactcaccaactggcaggactggccgagtgggatgctatctgggtaatgcaggatggacagattgtcgagcaaggcggctatgcgcagctttctgccgctggaggcgcgtttgcctcactgttagcccatcgccaggaggaaatttaa

SEQ ID NO: 88901 - DNA, 1722 bp, Enterobacter aerogenes
atgcgcgcactgttaccctatctggcgctatacaaacgccacaaatggctgctgaccctcggcgtggtgctggctatcgtcactctgctggcaagtatcgggctattaacgctttccggctggttcctgtcggcctctgcggtggtcggggtcgccgggatttacagttttaactacatgctgcctgccgcaggcgttcgcggcgcggcaattattcgtaccgccggccgctactttgagcgtctggtgagccacgatgccactttccgggtattgcagcacctgcgcgtcgccacgtttagcaaactactgccgctctcccctgccgggctggcgcgttttcgtcagggtgagctgctcaaccgcatcgtggcagatgtcgatacgctggatcacctctatttgcgcgtgatctcgccgctggttggtgcactggtggtcatcctggtggtgaccatcggcttaagcgtactcgatgtcaccctggcgctcacgcttggcggaattatgctggcgacgctactcctgctgccgccgctgttttaccgtgctggtaagccgaccggggagcagatcacccagctccgcgggcagtatcgccagcaactcacctcctggctacaggggcaagccgagttaatgctgtttaatgccagcgatcgctaccgtaaacagatggaaaaaacggaacagcgctggcaggaggcgcagcgccgccaggctgagctcaccgccctgtcgcaggcgctgatgctgctgattggcggcatcgcagtgatcgccatgctgtggatggcctccgaaggcgttggcggtaatagccagccgggggcgctgatcgccctcttcgtgttctgcgccttagcggcatttgaagcgctggcgccggtcaccggcgccttccaacatctcggccaggtcatcgcgtccgctcgccgcattacacagattaccgagcagcagcccgaggtgacgttcagccagcaggcgccgcaaagcttctcccaggtagcgcttaccctgaatgaggtaaccttcagctacccgcagcagtcggccccggcgctaaaagatatttctctgcaggtcgcggcaggcgagcatatcgccattcttggccgtaccggctgcggtaaatcgactctgctgcagctattgacccgcgcctgggatccggccaacggtcagattcagctaaatggccagccacttagcgagctgtctgaaacgacactgcgccaggcgatgagcgtcgtgccgcagcgggtgcatctcttcagcgcgacgctgcgcgataatctgctgctcgccgcgccgcaggtcagcgacgccaggcttgccgatatcctggcgcgagtcggcctggagaaattgcttgaagatagcggcctgaatagctggcttggcgaaggcggacgtcagctttccggcggcgaattacgtcgactggctatcgcccgcgcgctattgcacgatgcgccgctgatgctgcttgatgaacccaccgaaggcctggatgcaacaacggaaagccagatccttgatttacttagtgaagtgatgcgcgataaaaccgtgttgatggtcactcaccgtctgcgcgggctggcgcgttttaatcagataatagtcatggacaacggccaaattattgagcaaggtagtcacgcagagctgctggcgaaacagggccgttattaccagtttaagcaacgtctgtaa

SEQ ID NO: 88902 - DNA, 705 bp, Enterobacter aerogenes
atgcgtctggttcagctctctcgtgactctatcgccttcccttccccggaaggcgctctgcgtgaaccaaatggcctgctggcgctgggtggcgatctcagcccagcccgtttgttgatggcctatcagcgcggtatttttccatggttttctcccggcgaccctattttatggtggtcgcccgatccacgcgccgtactgtggccggagcaattccactatagccgtagcatgaaacgtttccatcaacgttcgccctatcgggtgacgctcaatcacgccttcggccaggttatcgagggctgcgccagccatcgcgatgaaggcacctggatcacccatggtatcgttcaggcctatcaccagttacatgaactcggtcatgctcactccatcgaagtatgggatgaggataggctggtcggcggcatgtatggcgtggcgcagggagcgctgttttgcggcgagtcgatgttcagccgggcggaaaatgcctccaaaaccgcgctaatgatcttctgtcaggcttttgcccagggcggtggcagattaattgactgtcaggttcttaatgcgcataccgcctctttaggagcgattgaaatcccgcgccgcgattatctcgattacctttccgtattacgcacctatcgcttaccggagcgattttgggtaccaagggtgctatttaccggtaatggataa

SEQ ID NO: 88903 - DNA, 219 bp, Enterobacter aerogenes
atggccaaagaagacaatattgaaatgcagggcaccgtacttgaaacgttgcctaacactatgttccgcgtagaactggaaaacggtcacgtggtaactgcgcatatttccggtaaaatgcgtaaaaactacatccgcattctgacgggcgacaaagtgactgttgagctgaccccgtacgacctgagcaaaggccgcattgtcttccgtagtcgctaa

SEQ ID NO: 88904 - DNA, 159 bp, Enterobacter aerogenes
atgctgaaggccgggctcctgcccggtcttttcatttcaacttcccgcacgcaggctgagttttccggcgcttttaccaacgccagggtgtcgtttgccctttttcgcgatctacgcgccgagtttaacgataaactcccgtcatatccggacatttga

SEQ ID NO: 88905 - DNA, 2280 bp, Enterobacter aerogenes
atgctcaatcaagaactggaactcagtttaaacatggctttcgccagagcgcgcgagcaccgtcatgaatttatgaccgtcgagcacttgttgctggctttgctcagcaacccctcggcacgcgaagcgctggaagcctgttccgtggacctggtcgctttgcgtcaggaacttgaagccttcatcgaacagaccactcccgtccttccggctacggaagaagagcgagacacccagccgacgctaagctttcagcgcgtgctgcagcgtgcggttttccacgtccaatcctccggtcgcagcgaagtgaccggcgctaacgtactggtcgcgattttcagcgagcaggagtcgcaggccgcctatctgctgcgtaaacatgaagtcagccgccttgatgtggtgaatttcatctctcacggcacgcgcaaagacgagcccagccagccttcggaaaacaatgcgagccagccgggtaacgaagagcaagcaggcggggaggatcgtatggaaaacttcaccaccaatctcaaccagcttgcgcgcgtaggcggtatcgatccgctgatcggccgtgataaagagctggagcgtgctattcaggtattgtgccgccgccgtaagaacaacccgctgctggtgggagaatccggcgtcggcaagaccgcgattgcggaagggctcgcctggcgtatcgtccagggcgacgtgccggaagtgatggcggattgcactatttactcgctggatatcggttcgctgctggcaggaaccaaatatcgcggcgattttgaaaaacgctttaaagcgctgctgaaacagcttgagcaggataccaatagcatcctgtttatcgatgagatccataccattatcggcgcaggggcggcctccggcggtcaggttgatgcggctaacctgattaaaccgctgctttccggcggcaagatcagggtgattggctccacgacctaccaggagttcagcaacatcttcgaaaaagatcgtgcgttagcgcgtcgtttccagaaaatcgacgtgaccgagccttctgtcgaagagacggtgcagatcatcaacggcctgaaaccgaagtatgaagcgcaccacgatgtgcgttataccgccaaagcggtgcgtgcggcggtcgagctggcggtgaaatacatcaacgatcgtcatcttccggataaggcgattgacgtgatcgacgaagcaggcgcgcgggcgcggctgatgccggtcagcaagcgtaagaaaacggtcaatgtggcggatatcgaatccgtggttgcgcgcatcgcgcgtatcccggagaagagcgtctcccgcagcgatcgcgatacgctgaaaaaccttggcgaccgcctgaaaatgttggtctttggtcaggataaggcgattgaagcgctgactgaagccatcaaaatggcgcgtgccgggcttggacatgagcataaaccggttggatctttcctgtttgccgggccgaccggggtcggtaaaaccgaagtcaccgtgcagttggcgaaagcgctgggcattgaactgctgcggtttgatatgtccgagtatatgaaacgtcataccgtcagccgcttgattggcgcccctccgggttacgtcggtttcgatcagggcgggctgttgaccgatgcggtgatcaaacatccgcacgcggtgctgctgcttgatgagatcgaaaaagcgcatccggatgtcttcaatatcctgctgcaggtaatggataacggtacgctgaccgataacaacggccgcaaagcggacttccgcaacgtggtgctggtgatgaccaccaacgccggggtgcgtgaaaccgagcgtaaatcgattggtcttattcagcaggataacagcaccgatgcgatggaagagatcaaaaagatctttacgccggagttccgtaaccgtctcgacaacatcatctggttcgatcacctctctaccactgtgatccatcaggtagtcgataagtttatcgtcgaactgcaggtacagttggatcagaaaggcgtatcgcttgaagtgagtcaggaagcgcgtgactggctggctgagaagggctatgaccgggcaatgggcgcgcgtccaatggcgcgggtgattcaggacaacctgaagaaaccgctggcaaacgagctgctgtttggttcgctggtggatggcggccaggtcaccgttgagttggataaagccaacaatgtgctgacctacggcttccacagcgcgcagaagcacaaaccggaagcggcgcattaa

SEQ ID NO: 88906 - DNA, 318 bp, Enterobacter aerogenes
atgagtaagagagattggctggacttcgatcaactggtagaagatgaagttcgtgatgcgcttaaaccaccatctatgtataaagtgatattagtcaatgatgactacactccaatggagtttgttattgacgtgttacaaaaattcttttcttatgatgtagaacgtgcaacgcaactgatgctcacggttcactatgaaggtaaggcgatttgcggcgtttttaccgccgaagttgcggaaaccaaagtcgctatggtgaaccagtatgccaaggagaacgagcatccattgctgtgtacgctagagaaagcctga

SEQ ID NO: 88907 - DNA, 222 bp, Enterobacter aerogenes
atggaaatgggtactgttaagtggttcaacaatgccaaagggttcggtttcatttgccctgagggcggcggcgaagacattttcgcccattactccaccatccagatggatggttacagaacgctaaaagccgggcaatccgttcggtttgatgttcaccaggggccgaaaggcaatcacgccagcgtgattgttcctgtggaagcagaaacggctgcataa

SEQ ID NO: 88908 - DNA, 1947 bp, Enterobacter aerogenes
atgacggcgctgcttgaactgcgtgatattcgccgcagttacccctctggcgacggtgaaattgacgtgctgaaggggataaccctcagtattgccgccggggaaatggtggcgatcgtcggggcttcagggtccgggaaatcgacgctgatgaacatccttggctgccttgataagcccaccagcggcacctatcaggttgccggggtcgatgtggcgcatctgagcggcgatgaactggccaggctgcgccgcgagcacttcggctttattttccagcgttaccatctgttatcgcacctcacggcggcgcaaaacgtcgaggtccctgctatttatgccggcaaagagcgccggattcgtcttgaacgggcgcgagatttactcacccgattaggtctgggcgagcgagcggaatacttcccgtcgcagctctccggcggccagcagcagcgcgtgagtatcgcgcgcgccctgatgaacggcggtgaggtgatcctcgccgatgaaccgaccggggcgctggatagccgctcaggcgaagaggttatggccatcctgcatcagctaaaggcgcaggggcatacggtgattatcgtcacccacgacccgcaggtcgcggctcaggcggagagaatcatcgagctgcgcgacggtgaaattgtgcgtaacccgccgccgtcatcgccggagaaaggcggcgtgcttcgcgccgaagcccgtgcggagccttccgtctggcgtcagttcagtagcggttttcgcgaggcgctggtgatggcctggcgggcgatggcggcgaataaaatgcgtacgctgcttactatgctcggcatcattattggtatcgcttcggtggtctctattgtggtggttggcgatgcggcgaaacaactggtcttagccgatattcgcgctatcggcaccaataccatcgacgtttaccccggcaaagattttggcgatgacgatccgcgttatcagcaggcgttaaaatatgatgatctgctggcaattcaaaaacagccgtgggtgagctctgcgacgccggcggtatcgaaaagcctgcgcctgcgcgccaataatatcgatgtggccgccagcgccgaaggcgttggcgcgcaatatttcaatgtttacggtatgacgttcagcgagggaaatacgttcaatgagctgcagctgaatagccgggcgcaggtggtggtgctggatagcaatgcccgccgccagctatttcctcacaaggcgaaagtggttggcgaggtgattttggtcggtaatatgccggcgacgattgtcggcgtggccgatgagaagcaatcgatgttcggcagcagcaaaattcttcgcgtctggctaccttactccacgatggccggacgggtgatggggcaatcgtggctaaactcgataaccgtccgcgtgcaggagggctacgatagcgccaccgctgaacagcagctggtgcgattgcttgagctccgccatggcaaaaaagatgttttcacctggaatatggacagtgtcttgaaaacggcggaaaggaccacacatactttacagctgttcctgaccctggtggcggtgatcgcgctggtcgtcggcggaattggggtgatgaatatcatgctggtttcagtgacggaacgtacccgtgaaatcggcatcagaatggcggttggcgcccgggccagggatgttctgcagcagtttcttattgaagcggtgctggtttgtctggtgggcggcgccatcggcgtgagtttatcgttgatgattgcgttcattttgcaactgttcttacccggttgggaaatcggtttttcgccgctggcgctattgaccgcatttttatgttcgacgttgaccggggtgctgtttggctggttgccggcgcgtaatgccgcgcgattagaccctgtggatgcgttggcacgagagtaa

SEQ ID NO: 88909 - DNA, 1116 bp, Enterobacter aerogenes
atgacattgaatggaaaacgcaggaaagtctggtggctgttggcgttagtggtagtgatagcggccatctggggatggcgcattcttaacgcgccgttgccgcagtatcaaacgctggtggcgcgcaaaagcgatctgcagcagagcgttctggcgacgggcaaattagatgctctgcgtaaagtcgacgtcggcgcccaggtcagcggccagttgaaaacgctgcgcgtcaatattggcgataaagtgcagaaagaccagctactgggggtcatcgacccggagcaggcggaaaaccagattaaagaagtcgacgcgacgctcatggaactgcgcgcgcagttgaaacaggcgcaggccgaacgcaagctcgcgcaagtaacattagcgcgccagcagcagttggcgcagcgtcagctggtttctcgccaggatctggataccgccgccaccgatgtggcggtgaaagaggcgcaaatcggcaccatcgaagcgcagatcaaacgcaaccaggcgaccctcgacaccgcgaaaaccaacctcgactatacgcgtatcctggcgccgatgtccggtgaagtgacgcaaatcacgaccctgcagggacagacggtgattgccgcccagcaggcgccaaacatcctgaccctggcggacctcagtaccatgctggtcaaagcgcaggtttcggaagctgacgtgatccatcttaagccggggcaaaaagcctggtttacggtactcggcgatcctctgactcgttacgaaggtacgctgaaggatattctgccgacgccggaaaaggtcaatgatgccatattttattatgcgcgttttgaagtccctaacccgcaggggatcctgcgtcttgaaatgactgcgcaggtgcatatccagctagcggaagtgaaaaacgtgattactattccccttagcgcgctgggcgacgccatcggcgataaccgctacaacgtacgcctgctgcgcaacggggaagtgaaagagcgtgaaatcgttattggcgcgcgtaacgataccgatgtggcggtagcgaaagggctggaagagggcgatgaggtgattatcagcgaaagcacgcccggagcgacaaaatga

SEQ ID NO: 88910 - DNA, 1659 bp, Enterobacter aerogenes
atgcatcttgagcgtgtagagatcgtcggatttcgcggtatcaaccgtttatcgttgatgcttgagcaaaacaatgtgctaatcggcgagaacgcctgggggaaatccagtctgctggacgctctgacgctgcttttatcgcctgagtttgacctgtaccatttcgtgcgcgatgacttctggtttccccccggcgatattcaggggcgggagcatcatctgcatatcattttaaccttccgcgaaaatgaacccgggcgccatcgcgtacgccgttttcgcccccttagcgattgctgggtgccctgtgatgacggctatcagcgcattttctatcgccttgagggtgagctggctgatgacggcagcgtgatgactctgcgtagttttattaactgccagggagaggcgctggagatgcatgatatcgacgatctggcgcgccacctggtgcgcttaatgccggtattgcgcctgcgcgacgcccgctttatgcgccgaattcacaacggaaccgtgccgcattcgccgcaaattgagattaccgccaggcaactggattttctctcccgcgaactggtcaatcatccgcaaaatcttaccgatggacaaatccgcgaagggctgtcggcgatggtgcaactgctagaacattacttcgccgagcagagcagcgcgcaaagccgcaatcgcctgatgcgccgacgttctcatgacgaacaacgcagctggcgctatctcgatattattaaccgaatgattgataaacccggcggtcgcagtcatcgggtgatcttgcttgggttgttctccactttattgcaggcgaagggaaccgtccgactcgatcgcgatgcgcggccgctgctgctgattgaggacccggaaacgcgtctgcatccgatcatgctctcggtcgcctggcatttgctgaatctgctgccactgcagcgagtgaccacgaccaattccggcgagctgttgtcgttgacgccggttgagcaggtgtgtcggctggtgcgtgaatcgtcccgcgtctcggcgtggcggctcggtcccggcgggatgaatgcggaagatagtcgccgcattgcgtttcacattcgcttcaaccgcgcgtcatcgctgtttgcccgttgctggttactggtggaaggcgaaacggaaacctgggttatcaacgaactggcgcgccagtgcgggcatcatttcgatgctgaaggggtgaaggtgattgaattcgcccaatccgggctcaagccgctgataaaattcgcccgccggatggggattgaatggcatgtgttggtagatggtgatgaggccggtaagaagtatgccgctacggtacgtgggctgctcaacaatgataacgaactggaacgagtgcacttaaccatgcttccggcaatggacatggaacactttatgtatcgtcaggggttcgacgatgtttaccatcgcgtggcgcagatcccggagaatatgccgatgaacatgcgccgggtaatcacaaaagccatacatcgttcatcgaaacccgatctggcgatagaggtcgcaatggaggccgggcggcggggaatcgacgccgtcccgacgttactgaaaaagatgttttcccgcgtgctgtggctggcgcgcgggcgcgctgattag

SEQ ID NO: 88911 - DNA, 696 bp, Enterobacter aerogenes
atgttcagaaaattagcagcagagtgctttggcacattctggctcgtattcggcggctgcggtagcgcagtgctggcagcggctttcccggaactgggaattggttttgccggcgtggccttagcctttggtttaaccgtattaactatggcgttcgccgtgggccatatttccggcggtcactttaacccggcggtcactttaggtctgtgggctggcggtcgtttcccggctaaagacgtaattggttatattgtcgcacaggttgtcggcggtattattgccgccgccgtgctgtacgttatcgccagcggtaaagccggtttcgacgctgccgcgagcggcttcgcttcaaacggtttcggcgaacactccccaggcggctactccatgctgtccgctatcgttatcgaaatcgtgctgacctgtggtttcctgctggttattcacggtgcgaccgataaaaacgccccggcgggctttgcgccgatcgctatcggcctggcgctgacccttatccacctgattagcattccggtgaccaatacgtccgttaacccggcacgtagcaccgcggtcgctatcttccagggcggctgggcgctgcaacagctgtggttgttctgggtgatgccaatcatcggcggtatcctcggcggcgtgctgtatcgcaccctgctcgaaaaacgcgattaa

SEQ ID NO: 88912 - DNA, 900 bp, Enterobacter aerogenes
atgttttcgggactattaatcattctgctgccgttgattgtcggctatctgattcctctgcgtcacccttccgcacttaaactgattacccggctgctgagctggattgtttacgtgatcctctttttcatggggattagccttgccttcctcgataatctcagcagcaatctgttgtcgatactgcattactctgcggtaagtattgtggttattattctgtgcaatattgcagcactattatggctggataaaaaaatgccgtggcgggtcaagcatcgtccggaaaaattaccctcgcgcctggcgatggctctcgagtcgctgcagctgcttggcgtcgtactaattggtttcctgctggggttaagcggcctctcatttttacaacacgcgaccgaagccagcgaatatacgttaattttcttgttattccttatcggtattcagctgcgtaataatggaatgacattacggcaaattgtgcttaatcgccgcggaatgattgtcgcggtagtggtcgcggcgagctcattatttggcggagtgattaatgcccttattcttggtctgcccattaaaaccggtctggcgatggcgtccggcttcggctggtactccctttccgggatcctgatgaccgaatcctatggcccggtcattggcagcgctacattctttaacgatctggcccgcgaactgctggcgataatgttaatccccggcatggtattgcgtagccgctctaccgcgcttgggctgtgcggcgcaacctcaatggactttactctaccggtgctacagcgctcaggcggcgtagaaatcgttcctgcagctatcgtacacggttttatccttagtctgctggtgccggtactgatggcgttcttctcagcctga

SEQ ID NO: 88913 - DNA, 1653 bp, Enterobacter aerogenes
atgttttgtgtgcaatgtgaacaaactatccgtacgccggcaggaaatggctgttcttacgcgcagggtatgtgcggtaaaaccgctgagacctctgatttgcaggatctgttgattgcttctttgcagggtctgtccgcatgggccgttaaagcgcgtgaatatggcatcatcgatcatgaggtggataattttgccccgcgcgcattcttctctactttgaccaacgtgaacttcgactcgccgcgtatcgttggttacgcccgtcaggcgatcgccatgcgcgaggcgctgaaagcgcaatgcctgaatattgatgccaacgcttcggtcgacagcccggtagccgatctgcaactggtcagcgatgatctcggcgatctgcagcgtcaggcggcggactatacgccaaataaagacaaggccgcgatcggcgagaatatcctcggcctgcgcctgctgtgcctgtacggcctgaaaggcgccgcggcctatatggaacacgcgcacgtgctcggtcagtacgacaacgacatttacgcccagtatcataaaatcatggcgtggctgggtacctggcctgccgatatgaatgctctgctggagtgttcgatggaaatcggccagatgaacttcaaagtgatgagtatcctcgacgccggtgaaaccacgaaatatggtcacccaacgccgactcaggtcaacgttaaagccaccgaaggtaagtgcatcctgatctccggacacgacctgaaagatctctataacctgctggagcagactgaaggcaccggcgttaacgtctatacccacggtgaaatgttgccggcgcacggttatccggagctgcgtaagttcaaacacctgattggcaactacggcagcggttggcaaaaccagcaggttgaattcgcccgcttcccgggccccatcgtgatgacctcgaactgcatcatcgacccaaccgtcggcgcctacgacgaccgcatctggacccgcagcatcgtcggctggccgggcgtcaatcatctggaaggcgaagatttctccccggttatcacccaggcgcagcaaatggccggcttcccgtacagcgaaatcccgcatctgatcaccgtcggcttcggtcgccagacgctgctcggcgcggcggatacgctgattgatctggttagccgtgaaaaactgcgtcacatcttcctcgtcggcggctgcgacggcgcgcgcggcgaacgtaactacttcaccgatttcgctaccagcgtaccagacgactgcctgattttgaccctcgcgtgcggtaaataccgcttcaacaaactggatttcggcgatatcgaaggcctgccgcgtctggtcgatgccggtcagtgtaacgatgcctactcggcgattattctcgcggtaacgctggcggaaaaactgggctgcggcgtaaacgatctgccgctgtcgttggtgctctcctggttcgaacaaaaagccatcgtcatcctgctgacgctgctgtcgctgggggtgaaaaacatagtcaccggtccgaccgcgccaggcttcttcaccccggacctgctggctatcctcaacgagaaatttggtctgcgttccgtcaccaccgtagaacaagatatgcagcagttgctgagcgcataa

SEQ ID NO: 88914 - DNA, 969 bp, Enterobacter aerogenes
atgacaatgccaaccgatcagtgcccgtggcggatgcaggttcatcatattcagcaggaaacgcctgatgtgtggaccatttcgttgctgtgccacgactactatccctatcgcgccgggcagtacgcgctggtcagcgtgcgccattcggcggatacgctgcgtgcctacaccctctcctcaacgccgggggtcagtgaatacattacgctgaccgttcgtcgtattgatgatggcgcaggctcacagtggttaacccgcgatgtgaaacgcggcgactatatctggctgtcggatgcgatgggcgagtttacctgtgaagataaaacaagcgatcgttttctgatgctggccgccggctgcggcgtgacgccgattatgtcgatgcgccgctggttagcgaagtatcgtccgcaggcggatgtgcaggttatctttaacgtgcgttcgccgcaggatgtcattttcgccgaagagtggcgtcaatacccggtcacgctggtggcggaacacgacgcgacgccgggcttcgtcgccggtcgcctcacccgcgaactattgcaaagcgtgccggatttagccaaccgtaccgtaatgacctgcggcccggcgccttatatggagatggtcgaacaggaagtgacggcgcttggcgtgacgcgtttctttaaagagaagttctttaccccggtggcggaagccgctaccgacggattgaaattcaccaagctgcagccggcgaaaacgttctacgcgccggtcggcaccacgttgctggaagcgctggagagcaataaggtaccggtgaccgtcgcctgccgcgctggcgtctgcggctgctgcaaaaccaaagtggttgccggcgaatatagcgttaccagcaccatgacgctgaccgatgccgaaatcgccgacggctacgtgctggcctgctcctgtcacccgcagagcgatctggttctcgcctga

SEQ ID NO: 88915 - DNA, 435 bp, Enterobacter aerogenes
atggttaagggattgttaaacgcagtaaataaaacgctgtcgcatgaagatgccggtaaactcttgttacgacttgccgttggcggcttaatgttgtttcacggtctacataagctaatcgacggcgtggatggcatcagcggcatgctggtcgcgaaagggctaccgggctttattgcctatggcgtgctggtgggggaagtcgtcgcgccttgtttacttattcttggcgttttgacgcgcccggcggcgctggtgctggcgtttaccatggcggtggcctggctgatggttgggacaggtaaaacgttcgcgctggatgcggtcggcgcatgggcgattgaaagcctggtctatttctttatcggcgcactggcgattgcgctattaggggcagggcgttattcgttgaccggtcagtcggcctggcggtaa

SEQ ID NO: 88916 - DNA, 1719 bp, Enterobacter aerogenes
atgaaacagaccgtagcgtcatatattgccaaaacgcttgaacaggccggcgtgaaacgtatttggggagtgaccggggattccctcaacggcttgagcgacagtttaaaccgcatggggaccatcgaatggatgccgacccgccatgaagaggttgccgcctttgccgccggtgccgaagcccaactcaccggcgagctggcggtgtgcgccggttcctgcggaccgggcaaccttcatctgattaacggtttgtttgattgccatcgtaaccacgtaccggttctggctatcgccgcccatattccgtcgagcgaaatcggcagcggttatttccaggaaacgcatccgcaggagctgttccgcgaatgtagccactactgcgagctggtctccacaccggagcaaattccgcaagttctggctatcgccatgcgtaaggcggtgattaaccgcggcgtgtctgtggtggtcctgcccggcgacgtggcgctgaaaccggccccggaaagcgccagcagccactggtatcacgctccgcagcccacggtcactccggcggatgaagagctgcacaagctggcgcagctgatccgctactcgagtaatattgccctgatgtgcggcagcggctgcgccggcgcgcaccaggagctggtggagtttgcggcaaaaattaaggcccctgtcgtccatgccctgcgcgggaaagagcacgtcgaatacgacaatccttacgatgttggcatgaccgggcttatcggcttctcttccggtttccataccatgatgaacgccgacacgctgatcctgctcggcacccagttcccctatcgcgcgttctaccctaccgacgccaaaattattcagatcgacatcaaccccggtagcatcggcgcgcatagtaaggtcgacatggcgctggtgggcgatatcaaatcgacactgaaagccctgctgccgctgctggaagagaaaaccgatcgtcgcttcctcgataaagcgctggaggattatcgcgaagcgcgtaaagggcttgacgatctcgccaaacccagcgaaaaagcgctccatccccagtatctggcgcagcagattagccgctttgccgacgacgacgcgatctttacctgcgacgtcggtacccccaccgtctgggcggcacgctatctgcagatgaacggcaaacgccgcctgttgggttcgtttaaccacggctcgatggccaacgccatgccgcaggctattggcgccaaagcgaccgcgccgaatcgccaggtcatcgccatgtgcggcgatggcggtttcagcatgctgatgggggattttctatcgctggcgcagatgaagctgccggtgaaaatcgttatttttaataacagcattctcggctttgtagcgatggagatgaaagccggcggctatctgaccgacggtaccgagttgcacgacaccaatttcgcccgcattgccgaagcctgcgggatcaaaggaatacgcgtcgagaaagcttctgaagttgatgaggcgctgcagaccgcctttagcaccgacggtccggtattagtcgatgtagtggtagcgaaggaagagctggcgatcccgccgcaaattaagctggagcaggccaaaggatttagcctgtatatgctgcgggcgattatcagcggacgcggcgatgaagtgatcgaactggcgaaaaccaactggctcaggtaa

SEQ ID NO: 88917 - DNA, 1002 bp, Enterobacter aerogenes
gtgatagatcttcgcagtgataccgtaactcgccccgggcgcgccatgatggaggccatgatggccgccccggtcggggacgatgtgtatggcgacgacccaaccgtcaatgaactccagcgctatgccgctgagctcgcaggcaaagaggcggcgctgtttctgcctaccggcacccaggccaatctcgttggcctgcttagccactgccagcgcggcgaagagtacatcgtcggccagggcgcgcataactatctgtatgaagccggcggcgcagcggtgctgggcagtattcagccgcagccgatcgatgccgcggcggacggttcgctgccgctggataaagtcgcggccaaaattaagcccgacgatatccatttcgcccccacccgcctgttaagcctggagaatacgcacaacggtaaggtgttgccgcgcggctatctgcaagaggcctggacattcacccgccagcgcaatctggcgttacatgtcgatggcgcgcgtattttcaacgccgttgtagcgtacggctgcgagctgcgcgatattgcgcagtactgtgattcgttcaccatttgcctgtcaaaagggctcggtacgccggtcggttctctgctgctgggcagcgaagcgtacatccgccgcgccattcgctggcgtaaaatggtcggcggcgggatgcgtcaggcaggcattctggccgctgccggtctgtacgcgctgcagaataacgtagcccgtctgcaggaggatcacgacaacgccgcgtggatggcggaacagctacgcgccgtcggcgctgatgtgatgcgtcacgataccaacatgctgttcgtacgcgtcggtgaggagcaggctcgggcgctcggcgaattcatgcaggctcgcggcgtgttgatcaacgcctcgccagtcgtgcgtctggtcatgcatctcgatgttaatcgccagcagttgacggaagtggtcggtcactggcaagcctttttacaacgctaa

SEQ ID NO: 88918 - DNA, 1443 bp, Enterobacter aerogenes
gtgtcgcaatctattctggtgcttggcgccagcggctatattggccagcatctggtgcgcgaattaagcgcacgaggttatccggtgttggcggcggcacgccatatcgacaggctgcagaagctcgatcttcccggcgtcacctgccacgctatcgacctcaatcagccgcaggatctcccggcactgcttcgcgaggtcgataccctttactatctggtgcatggcatgggcgaaggcggcgatttcatcgcccatgaacgccgggtcgccgttaacgtgcgcgatgccttgcgtcagacgccggtgcgccaggtgatatttctcagctcgctgcaggctccggcgcaggagcagtccgaccatctgcgcgcccgtcaggtgacggccgatgtcctacgcgagtcagggatccccgttaccgagttacgggcgggtatcatcgtcggcgccggatccgccgcttttgaagtgatgcgcgacatggtttacaacctgccggtgttgacgccgccgcgctgggtacgctcacgcacaacccccatcgcgctggaaaacctgctctactatctggtggagttacttaatcatccggctcgcgagcaccgcgtcttcgaggccgccggcccggatattctcagctatcagcagcagttcacccattttatggcggtcagcggcaagcatcgcctgttgatccctatcccctttccgacccgctggatttcggtgtggttcctgaacgttatcacctcggtgccccccaccatcgctaaagcgctgattcagggtctcaagcacgatctgatcgccgacgatcgttcgcttcgcgcgctgatcccgcaaaccttgattcccttcgatcaggcggtgcgtcgtactttgaaagaagaagaacagctggtgaactccagcgattggggctacgacgctcaggctttcgcccgctggcggccggagtatggctactacccaaagcaggctggctgcaccgttagcacccaggcaagccgtaaggcgctatggcgagtggtgaaccaaatcggcggtaaagagggttatttcttcggcaacattctgtggaaaatccgcggtgccatggatctgctggtcggccatcgtttagcaaaagggcggccgcagcatgattatctgcaaactggcgatactgtcgacagttggaaagtgattattgtggaagaagaacaacagctaaccctattgtttggcatgaaagcccccggtcttggtcgtttaagctttaccattagcgataaagtcgaccatcgtgaactggacgttcgcgcctggtggcatccgcacggcatgcccggcctgttctactggctactgatgatcccggcgcatctgtttatttttcgcggcatggcgcgacgcatcgcccgccaggccgagcaaatcacaggcaaaaacgaagattaa

SEQ ID NO: 88919 - DNA, 1014 bp, Enterobacter aerogenes
atgaaggtactggttaccggtgcgaccagcggattaggccgtaatgcggtggaatatctgcgcaacaagggcatcagcgtgcgagcgaccgggcgcaacgaagcaatgggtaagcttctgagcaaaatgggcgcggagtttattcctgccgatctcaccgaactggtctcttcgcaggctaaagtgatgctcgccggtattgatacgctatggcactgttccagctttacctcgccgtggggtacccagcaagccttcgatttagctaacgttcgcgcaacgcgccgccttggcgaatggtccgttgcctggggcgtacgcaatttcgtccatatttcatcgccttcgctctatttcgattatcaccaccatcgcgatattcaggaagatttccgcccacaccgcttcgccaatgaattcgcccgcagcaaggcggccagcgaagaggttatcaacctgctggcgcaggcgaacccgcatacccgctttacgatattgcgcccgcaaagcctgtttgggccgcatgataaggtctttattccgcgaatggtgcaaatgatgcgccactacggcagcgtgctcttgccgcgcggcggtaacgcgctggtggacatgacttactacgaaaacgcggtgcatgcgatgtggttggccagtcagccgcagtgcgaccacttaccttccgcgcgggcgtggaatatcagcaacggcgagccgcggacgctgcgcagtatcgtgcagaagctcatcgacgagctgggcatcaagtgccgaatccgctcggtgccctatccgatgttggatattattgcccgcagcatggagcatttcggcaataaatcggcaaaagaaccggctttcacccattatggcgtttcgaagctcaatttcgactttaccctcgatatcagccgcgctcagcaggaacttggctatcagccgatcgttaccctcgatgagggggttacccgcaccgccgcgtggttaaaagaccacggtaaactacacgattaa

SEQ ID NO: 88920 - DNA, 843 bp, Enterobacter aerogenes
atggtcttattagcaaagcgcattatccagcttgcgcttgccgctttgctgctgacaggctgtgtgcaggagcagggtattgtcgacaaacagggttatcagttggatacccgtcatccggcgcaggcctcctatccgcgtattaaagtcctggtcattcactataccgccgataactttgatgtctcgctggcgaccctgaccgataaagaggttagttcgcactatttaattcccgagcagccgcctcagcaccacggtaaaccgcgtatctggcaattggtgccggaggaagatttagcctggcacgccggtatcagcttctggcgcggcagcacgcgtatcaacgatacctctatcggtattgagctggaaaatcgcggctggcaaaaaaacggcgatataaaaagttttaccccatttaatccggcgcaaattgacgcgcttatcccgctggcgaaagatatcatcgcccgctatcacattcagccgcaaaacgtcgtggctcatgccgatatcgcgccgcagcgcaaggacgaccctggcccgctgttcccgtggcgggcgctggcgcagcagggaattggcgcctggcctgatgattcacgcgtcgccttttatttgcaagggcgtccaggctggcagccggttgatagcggagaattgttagacctgctgtcgcgctacggctatcaggtcaccccggagatgaccccggcgcagcaaaaacgggtgattatggccttccagatgcacttcaggccggcacgctgggacggcgtggccgatgcgcaaacgcaggcgatcgccgaggcgttgctggaaaaatatggacaaggatga

SEQ ID NO: 88921 - DNA, 1140 bp, Enterobacter aerogenes
atgccgaccgaacaacggctggatccgcgccaggatcgagcaatgctgtgggccaatcgcgaaaatgtgcaaaaacacgcgctgtcgcgcagcatgccgtggttagcgttcgtcaatatcgcctttgccttgatggtcatcttccgcaacgttctgtttaccgagtttgatcatcagagcttgactcaccatgatattattccttatctggagatggcgcttggggccattatcgttttctcgctggcgctttgcatgatggttatctccgggcggatattaagcggtatttatgccacaaaagtgatctccgcaatcttgttgatcctcagtttatgctggtcggtgagtagttactgcttcatcattttctggtcgctgccgttcgcgtggccgctgctggttattttaatgaccaccggtcttgccgcgctctattatttcccggtgggccttgtggcttaccttattcctttatggggtacttcattactcgctggcgtgcaaatacatcatggcgtcgatttacgttttctgatcctttggggaatatgtaccgccattatggtgtacggtcgtcagatactgcagcgctggtatgacgaggcctggaacacccatcaggagaatatacagttgattaaccggctggaaaacatggctaatcaggatgccttgacggcgaccgccaaccgccgggcgctggacaattttttagcgcaagcctgggaacgtaaagagccgctggcgctgatcatcctcgatgtcgacttttttaaacgttataacgatcactacggtcaccaggcgggagattactgcctctcctgcatcgcctccgtgctgaaaatgtcggtacgcgcgcaggaggatatggtggcgcgctatggcggcgaggagtttgtgattgtcctgccgctgcaatcattagatagcgccacggcggtggcgcagcggatccaacagaagattcgcgaagcggcgctggcgcatgccaaatccgatgccgggccgctagtgacggtcagtatgggtattgtcgcctcggacgggcgcgtcccggcgtcagagttaatcgcgcaggcggatgctgcgctgtataaagccaagcaagaaggacgtaatcgatggtcttattag

SEQ ID NO: 88922 - DNA, 273 bp, Enterobacter aerogenes
atgaaatatgcagctttagtggcaggtgcagcattgtttttaaccgcgaacgcgttttctgcagaaattctgagcaaagaagatttcgctaaggtagagggtcaataccaaaaaattggcaccatctcctctaccggacaaactgcgccaagcgatgcgcgcgaagaattgatcaaaaaagccgatgaaaaaggcgctgacgttgtggtgctctcttccggtaacaccgataagaaactgcacgtatccgcgaatatctataagaagaaataa

SEQ ID NO: 88923 - DNA, 1188 bp, Enterobacter aerogenes
atgaaaaaaatcgcattccttatttctgggttgctctgctcaggcttcagccatgccagcgcactctatttttatgaaatcggcaccgaagacgtcggcctggcaggcgcaggtcaggccgcccgcgcgcaggacgcctccaccatcgtcaccaacccagccggcatgacccggcttcctgaccatatgtttaccggcggcgcgcaggtcatgggcggcgatatcccgtatcagatgaataacgaacacggcggtaatagccctggtaacgtgatgaatctgtttcctaacgccagcggcttttacgcacagaaaattaacgatgatttatatgccgggattggcttgtacggcaactacggtttaggcatcgattttggcaactgggccggcgatcgtcttatcaagaaaagcaccatggtggcgatgacgctgagcccgtcgctggcgtggaaacttaacgatcgtctctctgtcggcgcatccgccaacctgaactatggttatttatcgctgacgcgtaacgtcgacggtaatgacgagaaagataaagaccatgactgggcgatgagctatcgtctgggtctgctgatgcagttaaccgaccagacccgcgccggcatcacctggaacagtaaaaccgattatgactttaacgttaagggcaaagcgcgttttcccaatttaccgaacgttgcgtatgatttgcctatctccgcccaggtccgcgcgccgcagcagatcatgctcagcatggtccacgatattaataaacagtggtcggtgatgggcgatctcggctggcaggactggagccagttcggcagcccgcaaatcaccgtttccggtcacgaaagtagtaaaaataaccgcctgaaggactcctggcataccgccgtcggcgtacagtaccggccgaccgagcagtggcgtctgaacgccggcgtcgggttcgacagcacggtttatgattcacaaagcgacacggcgctctcgctgccaaccggcgatgagtggcgcttcgccaccggcgcgcaataccagataaccccggccagcaatatcggcgtcgcggtctcttatctgcacatgcaatcttcccacgtaaaatcaccggaaatcgtctccggcagctacgatcacccttacctgtggttcgccagcgtcaactatagttatcaattctga

SEQ ID NO: 88924 - DNA, 516 bp, Enterobacter aerogenes
atgcgctacaacattcttgcacttgttttgccttgcgcactggcgctgagcgcctgtaccaccgtgaccccggcttataaagacaacggcacccgcagcggttcctgcatcgagggcggcccggacgaggtagcgcagcagttctatgattatcaaatccagcatcgtaataacgatctcaccgcgctgcgcccgtatctgagcgacgatttggctaaactgctgaacgacgctcgtcaggacccatcgcgtaacgggctactgcaatcaaatccattctccagcagttccaccccggcggatagcgccgacgtcgccagcgcctcaaccatcccgaaccgcgatgcacgcaatattccgctgcgcgttgaattaaaacagggaactcagagctggaaagatgaagtgctgatgattcaggaaggccagtgctgggcggttgacgatgtccgctacctcggcataaacagccacgctccggccggctcgctgcgtcagagtcttgagaaacgctaa

SEQ ID NO: 88925 - DNA, 795 bp, Enterobacter aerogenes
ttgcataactattctgtcaaaggtactatttgcggcctcaatagctatttgtatcagactgcccagatgagtattaaactaaacggcattaattgcttctacggcgcgcaccaggcgctgttcgacatcacgctggattgcccgcagggggaaacgctggtgctcctcggcccaagcggcgccggtaaaagctcgctgcttcgcgtactcaacctgctggagatgccgcgttccggtaccttaaacatcgccggtaatcaattcgacttcaccaaagcgccgtctgacaaagctattcgcgagctgcgccagaatgtcgggatggtcttccagcagtacaacctgtggccacacctgaccgtggtgcaaaacctgatcgaagccccgtgccgcgtgctgggcttaaccaaagatcaggcgctggcgcgcgccgaaaaactacttgagcgtttacgccttaaaccttacagcgaccgctatccgctgcatctgtcaggtggtcaacagcagcgcgtagcgatagcccgcgcgctgatgatggagccgcaggtgctgctgtttgatgaacccaccgccgcgttggatccggaaattaccgcccagatcgtcagcatcattcgcgaactggcggaaaccggaattacccaggttatcgttacccacgaagtggaagtggcgcgtaaaaccgccagccgcgtggtgtatatggaaaacgggcatatcgttgagcaaggggatgctaactgcttcgcgcatccgcaaaccgacgcctttaaaaactatctttcacattga

SEQ ID NO: 88926 - DNA, 732 bp, Enterobacter aerogenes
atgaaaaaagtactgattgccgctctgctcgcgggcatgagcctttccgctaccgcagcccagactatccgtttcgccaccgaggcctcctaccctccgtttgagctggtagacgccaacaacaaaatcgtcggttttgacgtcgatctggctaacgcgctgtgtaaagagatggacgcgacctgcacctttactaaccaggctttcgatagcctgatcccagggctgaaattccgccgcttcgacgccgtcatggccggtatggatatcacccctgagcgtgaaaaacaggtgctgttcagcaccccgtattatgaaaactcggcgctgtttgtcggccagcagggtaagttcaccggcattgaccaactgaaaggcaaaaaagttggcgtgcagaacggtactactcaccagaaattcatcactgataagcatccggaaatcaccaccgttccttatgacagctaccagaatgccaaactggatctgcaaaacggccgcattgacgccgtcttcggtgacacggcggtagtgaccgaatggctgaagagcaatccgaagctggccccggtgggtgataaagtgacggataaagactacttcggtaccggcctcggcattgcggttcgtcagggcaataccgagctgcagcagaaatttaacgctgcgctggaaaaagtgaagaaagatgggacgtaccagaccatctatagcaaatggttccagaagtaa

SEQ ID NO: 88927 - DNA, 717 bp, Enterobacter aerogenes
atgaacgaattttttccattagcaagcgccgccgggatgaccgtcggccttgccgtttgcgcgctggtcattggcctggtgctggcgatgcttttcgccgtgctggagtcggtgaaatggcgccctgtggcatggctggcgaccggcatcgtgacgattttacgcggcctaccggaaatcctggtggtgctgtttatctactttggttcctcacagctgctgctgacgctgtctgacggttttactcttaatcttgggtttgtgcagattccggtacagatgcaaattgagaatttcgacgtcagcccgttcctctgcggcgccattgcgctttccctgctgtatgccgcctatgcctcgcagaccctgcgcggcgccttgaaagcggtgccgcaggggcagtgggagtccggccaagcgcttggtttgtcgaaggcggcgatattcttccgcctggtgatgccgcagatgtggcgccatgccctgccgggcctgggcaaccagtggctggtgctgctgaaagataccgcgctggtcagccttatcagcgtcaacgatctgatgctgcaaaccaaaagtattgctacccgtactcaggagccgtttaactggtacatcattgcggcagctatttatctcgtcatcaccctgttgagtcaatacattctcaaacgtattgatcagcgtgcgacgcgcttcgaacggagaccaggttga

SEQ ID NO: 88928 - DNA, 669 bp, Enterobacter aerogenes
atgctcgattacttacccgaactgctgaaagggctgcataccagcctgacgctgacggcggcatcgatcgtcgtggcgctgatcctggcgctgatctttaccattgtgctgacgttaaaaacgccggtggtggtgtggatcgtccgcggctatatcaccctgtttaccgggacaccgctgctggtgcagatcttcctgatctactatggaccaggacagttcccgtcattacagaattacccggtgctgtggcatctgatctctgagccctggctgtgcgcgctgatcgctttgtcgttaaacagcgcggcttataccacccagctgttctatggcgccatccgcgccattccggacggccagtggcagtcctgcagcgcgctggggatgagcaagaaggatacgctggcgattctgctaccgtatgcttttaaacgcgccctctcctcgtactctaacgaagtggtgttggtctttaaaagcacctcgctggcttacaccatcacgctgatggaagtgatgggtcatggccagctgctgtacggacgcacctatgacgtgatggtcttcggcgcagccggtatcatttatctggtggtgaacggcctgctgacgctgctgatgcgtctggtggaaagaaaagcgctggccttcgaacgtcgtaactaa

SEQ ID NO: 88929 - DNA, 732 bp, Enterobacter aerogenes
atgaaaaagttagttctggccgcactgcttagctctttcgcctttggcgccgctgccgcggaaaaaatcagctttggcgtttccgcgacctatccgccatttgaatccatggatgcgaataaccagattgtcggtttcgatcttgatctggccaaagcgctgtgtaagcaaatgcaggccgactgtacttttaccaaccacgctttcgacagcctgatcccggcgctaaaatttaaaaagtatgatgcggtgatctccggcatggacatcacgcctgagcgtagaaaacaggtcgcgtttactgacccgtactacgccaactcggcgctggtaatcgccaaaaaagacgcgtaccactcttttgatgacctgaaaggtaagcgtatcggcatggaaaacggcaccacgcaccagaaatacctgcaggataagcacccggaagtcaaaaccgtcgcttacgatagctaccagaatgccattatcgacctgaaaaacggccgtatcgacggcgtcttcggcgataccgcggtggtcaacgaatggctgaagaccaacccgcagttaggcgcggcgacgccgaaagtgaccgatccgcagtatttcggtaccggcctcggcattgcggtgcgcccggataataaagcgctgctggaaaaactgaacgcagcgctgaaagcgattaaagctgacggaacctaccagaaaattagcaaccagtggttcccggagtaa

SEQ ID NO: 88930 - DNA, 1473 bp, Enterobacter aerogenes
atgatccgccgactcagcctcagccagcggttatcgttggtgtttatcgccttgctgctgctgtgtgcgctgtccgtttgtctactccagctctatagcagcgcgcagtacggtaacgtcatggtacaacggctttcagccggtctggcgcagcagatcgccgcccgcgagctgctgctcaacgcgcgcggcgaggtcgatcgcgcggcgttgaaaccactattcgaccgtctgatggtgtttaacccaagcgtcgagctgtacctcgtttcgccggatggcgagctgctggcggatgccgcgccgccggggcacattaaacgccagcgcattgccatggcgccggtgcaggcgtttctctccggcggcgcgtggccaatttatggtgacgatccgcgcagcatggaccagcaaaaagtgtttagcgccgcgccgctgcgccttgacggccagctacgtggctatctctacattatcctgcagggcgaaacttttaatgaactggcacaaaacgcctggcagaagacgctgtggagcctgctgctatggaccctgctgctggtggcgctgtttggcctgttggccggcggcctggcgtggtattgggtaacacgcccggtacgccagctgacggcgcaggtggcagccggagacagcgacagcattcgagcaatcaaagcgctggcggcgcaggcgccggacccgcatcccggaaatgaagtggcgctgctgcataaccgctttatcgaactggcgcagcagatcgccgggcaatgggatcggctggctgatagcgatcgtcagcgccgggaatttattgccaatatttcgcatgacctgcgcacgccgctcacttcgctgctgggatatctggagacgttatcgctaaaggatgatcgcctgacggcgcaggagcgtaagcagtatctgaatatcgcgctacgccagggaaataaagttcgtcatctgtcgcagcagctatttgagctggcacgccttgaacatggcggtattaagccgcagccggaaaagtttatccttgccgagctgattcaggacgtggcgcaaaaattcgatctggcgattgccacccgcgaaatccgtctgcgcctggaattggcgtcaggcttgcctttggttgaggcagacctctcgatgatggagcgggtattaaccaatctgctggataacgccattcgccatactccgcacgggggcgaaattcgtctctcctcgcgccagcagggggcacaggtggtggtcgaggtggccgatagcggcccgggcgtcgccggtgagttacgggccaatctgtttgagcggccatcggtactggaaccggggcagcagagcgcctcacggggcgggctggggttgatgattgttcgccggatgctgcaactgcacgggggggaaattcgcctgctggaagtaccggcaggggcctgtttccagtttaccctgccgctgtga

SEQ ID NO: 88931 - DNA, 717 bp, Enterobacter aerogenes
atgagtaaaaaaatcctgctggtggaagatgatgatgatattgcggctttgttgcgcctgaatctgcaggatgaagggtaccaaatcgtgcacgaggcggacggcgcgcaggcgctgcgccagctggataacggcgtctgggatgcggtgattcttgacctgatgttgcccaacgtcgacgggctggagatttgccgtcgcatccgtcagcaaacgcgctatctaccggtgattattattagcgcccgttcgagcgaaacccagcgcgtgcaggggctggaaatgggggccgatgattatctggcgaaacctttttctctgctggagctgattgcccgggtgaaggcggttttccgccgtcaggaagcgatgggacaaaatctcttgatggatgccggacgtatcgcctgccacggcctgaatatcgacccgctgtcccgggaggtcaggctgcgcggtgaactggttgacctcacgccgcgcgaattcgatctgctctattactttgcccgccatcccggtgaagttttttcgcgtctggcgctgctggatagcgtctggggctatcagcatgaaggctacgaacatacggtcaacacgcatattaatcgtctgcgtacgaaaatagagcgcgacccggcagagccggacattattcttaccgtctgggggaaggggtataaatttgcgccctatagcgccggggcgcagtcatga

SEQ ID NO: 88932 - DNA, 1128 bp, Enterobacter aerogenes
atgcattgcgcactttacgacgcgggccgctgccgttcttgtcagtggctggaattgccattgacgcaacagctcgccgataaaatggctaacctgcgcgaactgctggcgggtcatccagcggcgacatggcttgctccggtttcaggtccggagacggcgtttcgcaacaaagcgaaaatggtcgtaagcggtagcgtagagcgcccgctgctaggcatgctgcaccgcgatggcacgccggaagatctcaccgattgtccgctgtatccgccgagttttgaaccggttttcgccgcgctgaagccgtttatcgcccgcgccggactcaccccctataacgttgcccgcaagcgcggcgaactgaagtatttgctgctgacagaaagccagcacggcggcatgatgttgcgtttcgttctgcgctctgcggcaaagcttgaacagttgcgcgccgcgctgccgtggttacagcagcagttgccgcagctaaaggtgattaccgccaatattcagcccgtgcatatggctatcatggaaggggagcaggagattttcctcagcgatcaacaggcgctggcggagaactttaacggcgtaccgctgtggatccgcccgcaaagctttttccagaccaacccgacggtggcgagccagctctatgctaccgcccgcgactgggtacgcgcgctgccggtcaaccacatgtgggatctgttttgcggcgtcggcggtttcggcctgcactgcgcaaccccgcagatgcgccttaccggtatcgaaatcgccccggaagccatcgcctgcgcgaagcaatccgcggcccaattgggattaaccaatcttcattttcaggcgctggattccacgcaattcgcgacgcatgaagacgatattccacagcttgtgctggtcaacccgccgcggcgcggcatcggcgccgaactgtgcgattatctaagccgcatggcgccgccgtatatcatttattcgagctgtaacgcccggacgatggccgcagatattgatcgtctgcagggctatcgccttgagcgagtgcagttgttcgatatgtttccacataccgcgcattatgaagtgctgacgctgctggttcgtgaagtttaa

SEQ ID NO: 88933 - DNA, 489 bp, Enterobacter aerogenes
atggatgactttacgttgggattgtttacaaaaactcgatcgtctcatgctcgtcttaacgtccctgcgctggtacaggtggcggcctttgctattatcttaattcgcggtcttgacctgttaatgatcctcaatcagcttggcgtgcaggggattgccgattttgtccatcgtagcgtgcaaacctgggccctgacgctggtgtttctggcgagcctggcgctggtgtttatcgagatctggtgcgccttttcgctggtgaaaggccgtaactgggcgcgctggctctacctgttgacgcaaattatcgtcatctcttatctgtgggcggcctcgattggctacggctatccagaactgttcagcgtggccggggagtcaaagcgggaaattctccatgcgctgtttctgcagaagctgccggatctgctggtgctggcgctattgtttatccctgcgtcgtgccgacggtttttccgcttgcaataa

SEQ ID NO: 88934 - DNA, 846 bp, Enterobacter aerogenes
atgaatgacttaccggtagtacgttcgccatggcggattctgatcctcgtgctcggttttaccttcctgtatgcgccgatgctgatgctggttatctattcatttaacagttcgaagctggtgacggtatgggcggggtggtcgacgcgctggtatagcgagctgtttcatgatgacgcgatgatgagcgcggtggggttaagcctgaccattgccgcctgcgcggcgacggcggcggcgatccttggcacgattgccgcggtggtgctggtgcgttttggccgttttcgcggttccaacggttttgcttttatgatcaccgcgccgctggtgatgcccgatgtgattaccgggctgtcgctgctgctgctgtttgtcgcgctggggcattccatcggctggccatcggatcgtggcatgttgacgatatggctggcgcatgtcaccttctgtaccgcctacgtggcggtggtgatctcttcacgtctgcgcgagctggacaggtcaatcgaagaggcggcgatggatcttggcgccgcgccgctgaaggtgtttttcgtgataaccttgccgatgattatgcccgcggtcatttccggatggttgctggcgtttaccttgtcgcttgatgacctggtgattgccagcttcgtttccggaccaggggcgacgacgctgccgatgctggtcttctccagcgtgcggatgggcgttaacccggaaattaacgccctggcgaccttaatcctcggtgtggtgggaattgtcggttttatcgcctggtatttaatggctcgcgcagaaaagcagcgagtgcgtgatatccagcgtgcaagaaggggctga

SEQ ID NO: 88935 - DNA, 954 bp, Enterobacter aerogenes
atgagcacattagaacctccagccggcggcaaaaagcccggcggttttgccctgtggctggcgcgccagcagatggcccatgggcgtaagctggtgattgcgctgccgtatctgtggttaatcctgctgtttttactgccattcctgatcgtttttaaaatcagtctggccgaaatggcgcgggcgatcccgccctataccgagttactgtcgtgggccgacggtcaactgacgttgacgctcaacctcggcaacttcctgcagttgaccgacgatccgctgtactttgaggcttatctgcagtcgttgcaggtggcggcaatttccaccttttgctgtctgctattgggctatccgctggcgtgggcggtggcgcatagcaagccgtcgacgcgcaatatcctgctgctgttggttatattaccttcgtggacctcgttcctcattcgcgtttacgcctggatggggctgctgaaaagcaacggggtgctcaataacttcctgttgtggctcggagttatcgatcaaccgctggagattttgcataccaatctggcggtgtacatcggtatcgtttacgcctacctgccgttcatggtgctgccgatttataccgcgctgacgcgtatcgactattcgctggtggaagcgtcgctggatctcggcgccaggccgttaaagaccttcttccaggtgattgttccgttaacgaaaggcggcattatcgccggctcgatgctggtgtttattccggcggtgggcgagttcgtcatcccggaactgctcggcggccccgacagcattatgattggccgcgtgctgtggcaggagttctttaataaccgcgactggccggtagcatcggcggtggcgattgtgatgttgctgttgctgatcgtgccgatcatgtggttccacaagcatcagcaaaaacagatgggggatcatggatga

SEQ ID NO: 88936 - DNA, 1134 bp, Enterobacter aerogenes
gtgaatgacgcaatgccccgcccacaggcgaaagcccccaaagcgctgaccccgctgctggaaatccgtaatttaaccaaatccttcgatgggcaacacgccgtcgatgatgtcaacctcactatttataaaggcgaaatctttgccttactgggcgcgtccggctgcgggaaatcgacgctgctacgtatgctggcaggttttgagttgcccaccgccgggcagattgtgctggatggcgtcgacctggcgcgcgtgccgccgtaccagcggccgatcaatatgatgttccagtcttacgcgctatttccccacatgacggtggagcaaaatatcgcctttggtcttaagcaggacaagctgccaaaggcggagattaacgcccgcgtccaggagatgctggcgttggtgcatatgcaggagttcgccaaacgcaagccgcaccagctttccggcggccaacgtcagcgcgtggcgctggcgcgaagcctggcgaagcggccgaaattactgctgcttgatgaaccgatgggcgcattggataaaaaactacgcgaccggatgcagcttgaggtagtggatattcttgagcgcgtcggcgtcacctgcgtgatggtcacccatgaccaggaagaggcgatgaccatggcgggccgtatcgccatcatgaaccgcggtaagttcgtgcagatcggcgagccggaggagatctatgaacatccgacgacccgctatagcgccgagtttatcggctcggtaaacgtcttcgaagggctggtcaaagagcggctggaagatggcctggtactgaatgcgccggggctggtgcatccgctgaaagtcgatccggatgcctcggtggtggataacgtgccggtctgggtggcgctgcgtccggagaaaatcatgctctgcgacgaaccgccggcagacggctttaactttgcggtaggcgaggttatccatattgcctacctcggcgatctgtctatctatcatgtccgtctgaaaagcgggcagatgatcagcgcgcagctgcaaaatgagcatcgccatcggaaaggaatgccgacctggggtgatgaggttcgcttgtgctgggatgccgatagctgcgttgttctgacggtgtaa

SEQ ID NO: 88937 - DNA, 1113 bp, Enterobacter aerogenes
atgaccgccttgggtaaaaaatggttaacaggtgtgattacgggtgcgctgatggccgtttctgccggctcgctcgcagcggaacaaaaaacgctgcacgtttataactggtctgattatattgcgccggacacggttgccaattttgaaaaagagaccggtattaaagtggtgtatgacgtattcgattccaacgaagtgctggaaggtaaattaatggccggcagcaccgggtttgatctggtggtgccgtcggcaagcttccttgaacgccagctggcggccggggtattccaaccgctggataaaagcaaactgccgaactggaaaaacctcgacccgatagttttacaactggtggcgcgtcacgatcccgataataaatatgcgatgccatacatgtgggcgaccaccggcatcggctataacgtcgataaagtgaaagcggcgctgggtaaagacgttccgttgaacagctgggatctggtgcttaagccggaaaaccttgagaagctgaaaagctgcggcgtctccttccttgatgcccccgaagagattttctcgacggtgctgaactatctcggcaaagatccaaacagcaccaaagccgatgattacaccggaccggcaaccgatctgctgctgaagctgcggcccaatatccgttacttccactcttcgcaatatatcaatgacctggcaaacggtgatatttgcgtcgctatcggctgggcgggcgatgtctggcaggcggcgaatcgcgcgaaagaggcgaagaatggcgtcaatatctcctactttattccgaaagagggggcgctggccttctttgatgtcttcgccatgccggcggatgccaaaaataaagacgaagcctatcagttcctgaactatctgctgcgcccggaggtcatcgcccatatcagcgatcacgtctactacgctaacgctaacaaagaggcgacgccgctggtcagtgccgacatccgcaacaacccggcgatttacccgcctgaggatgtcttcgccaagctgttcaccctcaaggtgcaggatccgaagattgaccgcgtgcgcacccgcgcgtggaccaaagtgaaaagcggaaaataa

SEQ ID NO: 88938 - DNA, 486 bp, Enterobacter aerogenes
atggattcactggtcgttccgggtcttgatacattacgtcattggctcgacgagttaggcatcagtttttttgagtgcgactcctgccaggcgttgcacctgccgcatatgcagaatttcgacggtattttcgatgccaaaatcgacctgctggacaacgtggtgttgttttcggcgctggcggaagtgaagccctctgcgctgctgccgctgtcggcggatctgtcggcgattaacgccagttcgctgaccgtaaaagcgttccttgatattcaggatgataacctgccgaagctggtggtctgccaggcgctgcccgttggcgcgggcgtcactctcgaacagtttgcctggttcttccgccagagcgaagagcaggtctcgatggtcattctggaagccggtgccaatcaactgctgtataaagcggaagagcaggaagaagaggccgcagccgaagaagtgcaataccattttctgcactaa

SEQ ID NO: 88939 - DNA, 903 bp, Enterobacter aerogenes
gtgaaaatcgctatattatcccgggatggaacgctttattcttgccgccgcttgcgtgaagccgcgcaaaaacgcgggcatcaggtcgagatcctcgatccgctctcctgctatatgagcgtcagcccggttgcctcctcgattcactacaaagggcgacagttgccccattttgatgcagtcattccgcgtattggcacggcgatcacctattacggcaccgccgcgctgcggcagttcgaactgctgggcagctatccgctaaacgagtcggtggcgattacccgcgcccgcgataagctgcgctcgctgcagttgctggcgcgtcagggaatcgatctaccggtcaccggtattgctcactcgccggacgacaccagcgatctgatcgccatggtcggcggcgcgccgctggtggtgaagttagtggaggggacgcaggggatcggtgtggtgctggcggaaacgcgacaggcggcggaaagcgtgattgacgccttccggggcctcaatgcgcacattctggtgcaagaatatatcgctgaggcaaaagggtgcgatatccgctgcctggtggttggcgatgaggtggtggcggcgattgaacggcgggcgaaggagggcgattttcgctctaacctgcaccgcggcggcgtcgccactacggccatgcttagcgatcaggagcgggagatggcgattaaagcggcgcaaacgctgggtctggacgtggcaggcgtggatatcctgcgcgcccaccgcggcccgctggtgatggaagttaacgcctcgccggggctggaagggattgaaaccaccactcacgtcgatattgccgggcggatgatcgcgtggatcgaacgtcaggccacgcctggatattgtctaaaaatgggagggtag

SEQ ID NO: 88940 - DNA, 723 bp, Enterobacter aerogenes
atgacgccgaccattgatctgctgcgtaaccaccgttccatccgccattttaccgacgcgccgattagcgaccaacagcgtgaggcgatcattgccggggcgcaaggggcttccagctccagctttttacaatgtacctcgattattcgcattaccgacccgcagatgcgtgagcagctggttgagttgaccggcggccagcagcacgtggcgcaggcagcggagttttgggtattctgcgccgatttcaaccgccacctgcaaatttgcccgcaagcgcagttgggactggctgaacagctgctgctgggcgttgtcgacaccgcgctaatggcgcagaatgccttaatcgccgcggaatccctgggattaggcggcgtctatattggcggcctgcgtaataacattgacgcggtaaccgagctgctgcagctgccgaaacacgtgttgccgctgtttggcctgtgccttggctggcctgctgacgacccgcaggttaagccgcgtattccgcctgcgatgctggtgcatgagaatcactaccaaccgcttgatcaacaggtgctggcgcagtatgacgaacagctggcggactattatctgacgcgcggcagcaatacccgccgcgatacctggagcgatcatatccgccgcaccatcatcaaagagagccggccgtttattctcgattatttgcataaacagggctgggcaacgcgctga

SEQ ID NO: 88941 - DNA, 291 bp, Enterobacter aerogenes
atgcgatcgcctgccgcattacccaaaagtattctgattgttgagctcgtcggcatggcgctgctgacgttggcctggctgtcattaaaccagtatgttcaactgcctgcgccatttgccagcccgacggcggcgctcatcatgatctttgccgggatcctgctgatgatcccggcggcgatagccttaatgtggcgaatagcgaaaattgtcgcgccgcagttgaccgataataagacctcatcttctaccccgtccgaacgagaaaaacaccatgacgccgaccattga

SEQ ID NO: 88942 - DNA, 264 bp, Enterobacter aerogenes
atgtttaccgttatttttggtcgcccaggttgcccgtactgcgttcgcgctaaagaactggctgagaaactgagcaccgagcgcgatgacttcagctatcgctacattgatatccacgcggaaggcatcagcaaagccgatctggaaaaaaccgtcggtaagccggtagaaacagtaccgcagattttcgtcgatcagaaacacatcggcggctgcacggatttcgaagcctgggcgaaggaaaatctcggcctgtttgcctga

SEQ ID NO: 88943 - DNA, 384 bp, Enterobacter aerogenes
gtgaaatctgagcgcgcgtgggccggtataatttgtgggttctttctgtttattgtggtctgtttatcgctgttgctgcatatgaaaggggcttttcggcaaacgggcaaccccgagcttggactgctgttctttgtgctacctggcgccgtggcgagctgtttatcccccggaaggcgcgtcatacgtccgctgattggcgccatgctggcggcaccggtttgtctggtggtgatgcggatgttctttattactcatcgatcgttttggcaggaactggcgtggctttttagcgcggtcttctggtgcgcgctcggggcgctatgctttttatttatttgcgtctggctggacgccagacgcaggcactcaacggaagagtga

SEQ ID NO: 88944 - DNA, 1686 bp, Enterobacter aerogenes
gtgaatataaacgtcgcagatttgttaaacgggaattacatcctgttattgtttgttgtactcgcactgggtctttgcctggggaaacttcgcctcgggtcagtacaacttggtaattccattggcgttttagtcgtttctttattattaggtcagcagcacttcgccattaacacagatgcgctaaatcttggctttatgctgtttattttctgcgtcggcgtcgaagcgggccccaactttttttcgatttttttccgcgacggcaaaaactatctgatgctggcgctggtgatggtggccagcgcgatgttaatcgctatggggctgggcaaattgtttggctgggacatcggcctgaccgccgggatgctggcgggcgctatgacctccaccccggtgctggtgggcgctggcgataccctacgccactttggcctgcccagcgatcagctggcgcagtcgcttgaccacctgagcctgggttacgccctgacttacctggttggcctggtgagcctgatcgtcggcgcgcgctatatgccgaagctgcagcatcaggatctgcagaccagcgcccagcagatcgcccgcgagcgcggtctggataccgactccaagcgtaaagtctatctgccggttatccgcgcctaccgcgtcggcccggaattggtcgcgtgggcggacggcaaaaatcttcgtgagctgggaatttaccgccagaccggctgctatatcgagcgtattcgtcgtaacggtatcctggcgaacccggatggcgacgcggtactgcagatgggcgacgatatcgcgctggttggctacccggacgcccatgcccgcctcgacccaagcttccgtaacggtaaagaggtgtttgaccgcgacctgctcgatatgcgtatcgtcaccgaagagattgtggttaagaatcataacgccgtcggccgccgcctggcgcagctgaagctgaccgatcacggctgtttcttaaaccgggtgatccgcagccagattgagatgccaatcgacgataacgtggtgctcaataaaggcgacgtgctgcaggtgagcggcgacgcccgccgcgtaaaaaccgtcgctgaccgcatcggctttatttcgattcacagccaggtgaccgatctgctggctttctgcgccttctttatcgtcggcctgatgatcggcatgatcactttccagttcagctcgttcagcttcggcatcggtaacgccgccggcctgctgttcgccggcattatgcttggcttcctgcgcgccaaccatccgaccttcggctatatcccgcagggcgcattgaacatggttaaggagttcggtctgatggtgtttatggccggggtcggcctgagcgccggcgcgggtattaataacggtctgggcgccattggcgggcaaatgctggctgccggtcttatcgtcagcctggtgccggtggtgatctgcttcctgttcggcgcctatgtgctacgcatgaaccgcgcgatgctgttcggcgcgatgatgggcgcgcgcacctgcgccccggcgatggaaattatcagcgataccgcgcgcagcaacattcccgcactcggctatgctggcacttacgctatcgccaacgtgctgctcacccttgccggtacgctgatcgtcatcatctggccgggccttggctag

SEQ ID NO: 88945 - DNA, 225 bp, Enterobacter aerogenes
atgaaatctgtaaaattctcggccagccattcttataaaagaattggcgtgcattgcatcaatatgattgatgcaatggggagggggatttgctcaattatggcttttgttagtcttattgcgctggatggctggctattcaagctgggtggctttgcgatttgttttgttctgatttgcctaattatttttctggccgactggttaaaggcaaaaattcagtaa

SEQ ID NO: 88946 - DNA, 645 bp, Enterobacter aerogenes
atggatgcaaagctaattgccaggggaattgttgatggtttaacttccctttccgaaggattttatttatcagcaataagaacggtagaaggttcaggagtcttggggcgtgatcttaaaaggcgtaatgaatatgaaacggagcgttttattagggcgttcagagcattgatatcgaacgatcaaccaatcaggcagctaatcaccattgtgagcacggatttttatgcaaaactcgatgacaaagggaagaaagcgattaatgacaggattggttattctgacgcaaaactgggaacacgtacgggggctcagttttgcctgtccctgactttatccgaaaaaataattgcgcaattgaaaacaaccagaattggaaactacgttctgcggggctcggcatcgtttgctttaagtgccgttattatgcaggggataatcgaagaggcagcgagagcttctcgtaggatgaaggacaggtattcatcaacctatatgaaagtttcaccaatgaatcttgatatggtctactttctggttgaagaaccactagaaccgtatctcaagtacatagagagccatccaatgcaatgtaaaggaatagaaaatgaaatctgtaaaattctcggccagccattcttataa

SEQ ID NO: 88947 - DNA, 798 bp, Enterobacter aerogenes
atgttgcttaaagataagaccgtggtgattttcggcggcagcggcgcgattggccgcgcggcggcgctcgccatggcgaaagaaagcgcgcggatctttctggccgcccggcaggcggataagctggaaaaggcggcggctgagattcgcgccgcaggcgggagcgtcgagaccctgcaactggatgtgctggatggcgggcaaaccaccgcgcaggtggccaacctggccgggctaaccggcgggattgacatcgtagttaatgccaccggctttctccacaatcaggggaaaacgctggcacaattatcccttgccgagtatcaccagggttttgtcccctttcttgatgcccaatttattattgctaaggcagtggcgccgtggatgggtggcgaacgcgagggcgtcattattaccactatccctccttccgcgacgatggccatccctggacacctcggccatatcgtcggctgcgccgcaatggaagcctttatcaacgcattggccagcgaactcggcgccaaaaaaatccgcgtgctcggcgtacggtcacacgcgatagcggatgcggcgctggcgggttcttatactgccgaggtgtttgcgcctaaagcacaggcgttgggcttgagcgtcgaacagtggctgggtggtgcggcgcacggcacgatgctgcagcggttgccgacacttgagcagatagccggagtcatcacctttcttgcctcaccgttggcggcggcgatgaccgccacggtggttaacgtcactgcgggggcgacacttagctag

SEQ ID NO: 88948 - DNA, 555 bp, Enterobacter aerogenes
atgacccgcagaccgaacgatccgcagcggcgcgagcgcatcctgcaggcgacgctggataccatcgccgcgcacggaattcatgcggtaacgcaccgtaaaattgccagctgcgccggggtaccgctgggctcgctgacctattattttagcggtattgaggcgctgattgaggaagcgtttcgtaacttcaccgtcgaaatgtcggcgcagtatcagcaatttttcgacggcgtcggcagccgccaacaggcctgcgacgctatcgccgagctgatcttcagcgcccaagtgaccaccgcgcgcaatatggagttaatgtaccagctgtacgcgttttgcagcagccgaccagcactgaaaacggtcatgcagagctggatgctgcgcagccagcagacgctggagcagtggtttgaaccggcgacggcgcgcgggctggatgcgtttatcgaggggatgacgctgcacttcgtgaccgatagcgcgccgctgtcgaaagcggcgattcgcttaatggtcgggcggctggcgggggagaatagcgctagctaa

SEQ ID NO: 88949 - DNA, 1203 bp, Enterobacter aerogenes
atgacggcgcaaacttctcgcaaagccctccagcttcggctgtgggcgctatttatgttcttctttattcccggcttattgatggcctcctgggccacccgtacgcccgcgattcgcgatttactaaccctttccactgctgaaatgggaatggtgctatttggcctgtcgattggttcaatgagcggtattctctgttcagcatggctggtgaagcgcttcggtacccgtaaagtcatccgcacaactatgttgtgcgccgtggcgggcatgctggtgttaagcctggcgctgtggctcgcctctgcgccgctgttcgcctttgggctggctatctttggcgccagcttcggctcggcggaagtagcgattaacgtcgaaggcgccgccgttgaacgggaaatgaataaaaccgtgctgccgatgatgcacggtttttacagcttcggcaccctcgtgggcgccggcatcggtatggcggtgaccggttttggcctgcccgccgcgccgcatattctgatcgccgcgctggtggcgattgcccccatcgttatcgccattcgcgccatccccgacggcacgggcaaaaacgccgccgaatccgcccatagcgaggccaaaggcctaccggtctggcgcgacgtgcagctgttgctgatcggcgtgatcgtgctggcaatggcctttgccgaaggttccgccaacgactggctgccgctgctgatggtcgacggccacggctttagccccacttccggttcgctgatttacgccggtttcaccctcggcatgaccctcggccgcttcaccggcggctggtttatcgaccgctacagtcgcgtcaccgtcgtacgcgccagcgcggtaatgggcgcgctgggtatcgggctgattatttttgtcgacatcacctgggttgccggggtatctgtactgctgtggggactcggcgcgtcgctcggtttcccgcttaccatttccgccgccagcgataccggcccggatgcgccgaaacgcgtgagcgtcgtggcgattaccggctatcttgctttcctcgtcgggccgccgctgctgggcttccttggcgaacattttggcctgcgtagcgccatgatggtagtactgggtctggtgatggtggcagcgctggtagcccgcgcggtagccaaaccgcagcctgaacctgtgatggagaatagctaa

SEQ ID NO: 88950 - DNA, 813 bp, Enterobacter aerogenes
atgagcatcaaactgattgcggtagacatggacggcacctttttaagcgatgccaagacctataatcgcccacgttttctggcgcagtatcagcgcatgcgcgaacagggcattcgcttcgtggtcgccagcggcaaccagtattaccagctgatatcgttcttccccgagctggtcgatgaaatcgccttcgtcgccgaaaacggcggttgggtggtgagcggtaaagaggatatctttaactgccagctgccgacgacgcatttcaacgccgtcgtcgaccacctgcaaacgctgccgcatatcgaaattatcgcctgcggcaaacgcagcgcctatacgctcaatagctataacgacgagctaaaagcggtggcggcgaagtactatcaccgtctcgaactggtggatgattttaaccatctcgatgacgcgatcctcaaattcggtctgaacgtgccggatcatctgatcccggaaattcagccgaagctacacgcggcgctgggcgatatggttaccgccgtcgccaccggctacggcagtatcgatttaatcatccctggcgtgcataaagccaacggcctgcgcattttgcaggagcgctggggcattgataaccatgaggtggtggccttcggcgatagcggcaatgatattgaaatgctgcagcatgccggttttggtttcgccatggcgaatgccaaagcggaggtcaaagccgtcgccagtcatcatgccccgcataataacgaagaaggcgtattgcatattattgataaggtattgaatcgcgaagcgccgttcgcctga

SEQ ID NO: 88951 - DNA, 1233 bp, Enterobacter aerogenes
atgcagaattattcgttatcaggtaagcgcctcggtcgtcaggcattactgttcccgctgtgccttgtgttatatgaattctccacctatatcggcaacgatatgatccaaccgggtatgctcgcggtggtgcaggagtttcaggtcggcaatgagtgggtccccacctctatgaccgcctatctggcgggggggatgtttttgcagtggctgctggggccgctgtcggatcgtattggccgccgtccggtgatgctgaccggggtggtgtggtttatcgtcacctgtctggcgacgctgctggcgcaaaccattgagcaatttaccctgctgcgtttcctgcagggcatcagcctgtgctttatcggcgcggtgggctatgcggctatccaggagtcgtttgaggaggcggtgtgtatcaaaattaccgccctgatggctaacgtcgcgctgattgcgccgctgctcgggccgctggtcggcgctgcctgggtgcatatgctgccgtgggagatgatgttcgtgctgtttgccgtgctggcggccatctcctttgtggggctgcagcgggcgatgccggaaacggcgacgcggatgggggaaagactgtcggtaaaagagctgggccgcgactatcgtctggtgttgaaaaacctgcgctttgtcgccggcgcgctggcgaccggttttgttagcctgccgctgctggcgtggattgcgcaatcgccggtgattatcatcagcggcgagcaggccaccagctatgagtacggcatgctgcaggtgccgattttcggcgcgctgatcgccggcaacctggtgctggcgcgtctgacctcgcgccgctcggtacgttcgctgattattatgggcggctggccgattatgtttggcctgctcctgtcggcggcggccacggtggtctcgtcccatgcttatctgtggatgaccgctggtttaagcttctacgctttcgggattggcctggctaacgccgggctggtgcgcttaacgttgttcgccagcgaaatgagtaaagggacggtttcggcggcgatgggtatgctgcagatgctgatctttaccgtgggcattgagcttagcaagcatgcgtatgagcttggcggtaacggcctgttcagcctgtttaacttgctgggcggggtgctatggctggggctgattatttacttcctgaaagataaaagcgtcggcagttcgcagcaggcgtga

SEQ ID NO: 88952 - DNA, 594 bp, Enterobacter aerogenes
atgctggaaaatatcaactacgcgctgtttgccctgattaacgccaccccgtcctcctcgtggtgggcgattgaggtcgccacgtttattgccaaagacttaattatcattgtgccgctgctggtggtggcgctgtggctgtgggggccaaaccaacgtcagctggtatttaaggtcatgctggccctggccctgagcctgtctatttcgtgggttatcggtcatctgtttccacacgaccggccgtttgttgacggcgtcggctataacttcctgcatcatgcggcagatgactcgttcccaagcgatcacggcaccgtcatctttaccttcgcgctggcgtttttattctggcaccgggtgtggtccggcgcgctgctgctggtcatcgcctcggcgattgcatggtcgcgcgtctatctgggagtacactggccgctggatatgttgggcgggctgctggctggcatgtgcggctgccttggggcgcaactgctgtggcagagcggcggtcatggcctctaccaacggctgcagcgcctgtatcgtctctgcttctcgctgccgattcgtaaaggctgggtacgcggctaa

SEQ ID NO: 88953 - DNA, 759 bp, Enterobacter aerogenes
atggaaactcgtcgtgacgaacgcattaaccagctcattcaggcactcaagcgcagcgataaacttcacctgaaagaagcagcttcgctgcttggcgtatcagaaatgaccattcgtcgcgatttaaacggccacagcggcccggtggtgctgttgggcggctacatcgtgctggaaccgcgtagcgccacgcactatctgctgagcgatcagaaaacccgtctggtggatgaaaaacgccgcgccgcgcgccatgccgccgggctgcttgaagcgcatcagatggccttttttgactgcggcaccacgacgccatggatcatcgacgccatcgataacgagctgccgtttaccggcgtgtgctactcgttaaatacctttctcgccctgcaggaaaaaccgctgtgtcgcgctattctgtgcggcggcgaattccacgccagcaacgccatctttctaccgctcagcctgcaggataccttgagtcatctcagcccggatatcgcctactactccgccgccggtatcgactgcgagcaaggcgcgacctgttataacctggaagagctgccggtgaaacactgggccatgaacaacgctcgctaccatgtgctggtggtcgatcacagtaagtttggcaaagtgcggccggcgcggatgggggaattatcgcgttttgacgtcatcgccagcgacgttcgcccggatgacgatctgttggcgctggcgaaagaaaagcaaatatcactgctgtactaa

SEQ ID NO: 88954 - DNA, 1212 bp, Enterobacter aerogenes
gtggctcttatgacgcatgatgctttttcccttcgcggcctcgcggcaggctgcgcgcttttacttctcgtggcccctgcagtgcaggcggcggatcaacttccggatgcgccatcgattgatgcgcgagcctggatcctgatggactatgccagcggcaaagtgctgagtgaaggcaatgccgacgagaaactcgacccggccagcctgaccaaaatcatgaccagctacgtggtaggccaggcgctgaaagcaggcaaaatcaaactgaccgatacggtcaccgtcggccgcgatgcgtgggccaccggcaacccggcgctgcgcggctcctcggtgatgttcctgaagccaggcatgcaggtatcggttgaagacctcaataagggcgtgataattcagtccggcaacgatgccagcatcgccatcgccgactatgtcgccggcagccaggattcgtttgtcaatctgatgaacggctacgcgcagaaaatcggcctgaccaacaccacctttaaaaccgtccacggcctggacgcgccggggcagttcagtaccgcgcgcgatatggcgctgctgactaaagcgatgatccatgatgtgccggaagagtacgcggtacacaaagagaaagagttcaccttcaataaaatccgtcagccaaaccgcaaccgtctgctgtggagcaccaacctcaatgccgatggcgttaaaaccggcaccaccgccggcgcgggctacaacctggtctcttccgcgacccagggcgatatgcgccttatcgcggtagtgctgggcactaaaaccgaccgtattcgttttaacgagtccgaaaaactgctgacctggggcttccgtttctatgaaaccgtcacgccaatcaaaccggatgccacctttatttcccagcgcgtgtggttcggcgacagtaatgaagtcaaactgggcgccggcgaagccggatcggtgaccattccacgcgggcaattgaaaaacctgaaagccagctacaacctgactgagccgcagctcaccgcgccgttggcgaaagggcaggtggtgggcaccatcgactttaaactcaatgacaaaactatcgaacagcgaccgctgatcgtcatggaagacgtgaaagagggcggcttcttcagccgcattgtcgacttcgtgctgatgaaactgcacggctggttcggcagctggttctcttaa

SEQ ID NO: 88955 - DNA, 627 bp, Enterobacter aerogenes
atgattacgttatggggcagaaataactcgaccaacgtgaagaaagtgcgctgggtgctggcggaactggatcttccttatcagcagattctggcggggctggagtatggcctcaatcacgacccggagtatctggcgatgaacccgaacggcctggtgccactactcaaagacgatgccaatgggctggtgctgtgggaatccaacgccattattcgttatcttgccgcgcagtacgggcaaaaccgtctgtgggtggagtcgcctgtgcagcgcgcgcagggtgaaaagtggatggactgggccaacgctacgctgtccccggcgcaccgtccggtattaatggggctggtcagaacgccgccggaccagcgcgatccggcggccattgaggcgggtattcacgcctgtgaagggctgttcgccatgctcgacgatgaactggcgaagcatgcctggctttctggcgatgagttcggccttggcgatgtggcggtggcgccgttcgtttataacctgctttccatcctcgacaactggcagccgcggccccatcttcagcgctggtatcagcaaatccagcagcgtcaggccttccgcgacgtcgtcatgatcccggtcacctga

SEQ ID NO: 88956 - DNA, 1104 bp, Enterobacter aerogenes
atgcgccgatatctcaaaataacacttatgactgtgctgctgcccatggcggcgatggccgcgccgcgcgttgaggtgctgcaggataacctcgaccacccctggtcactggcattcctgccggacaatgaaggcgtgctgattaccctgcgcggcggcgaacttaaacgctggcagctcgatcaaggattatcggcgcccattcgcggcgtgccgaaggtgtgggccaacggccagggcggcctgctggatgtggttctggcgccggattttgctcagtcgcgccgggtatggctgagctatgccgaagctggcgatgacggcaaagcggggacggcggtggggtatggccgcctcagcgccgacctgcaaaacctggaagattttaaaaccgttttccgccagcagccgaagctctccactggcaatcatttcggcgggcggatggtcttcgatggcaaaggtcatctgtttatcggtttaggcgaaaataatcagcgcccgacggcccaggatctcgataagctgcagggaaaagtggtacgcctgaccgaacagggggaaatccccaaagataatcctttcgtcggccgtactggcatcagaccagaaatttgggcttatggcattcgcaacccgcaggggatggcgatgaatccgtggagcgatacgctgtggctgaacgaacatggcccgcgcggcggcgatgagatcaatattccccgggccgggaaaaactacggctggccgctggcgacgcacggcattaactatagcggtcaacctatcccggaagctaaaggaaagagcgcaccgaataccgaggcgccgctgcatgtctggcccgtctccccggcgttgagcggtatggcgttttacaacgcgtcaactttcccgcagtggcgacataagttgtttatcggcgcgctgaaggatgagtccttgattgtgctctcggtggacggcaataccctcagcgaggagacgcggctattaaaagatcgcggcaaacgcattcgcgatgtgcgcgtcgggcccgacggttatctttatctgttaaccgacgagcccgacggtgaactgctcaaggtcagcccggagtaa

SEQ ID NO: 88957 - DNA, 384 bp, Enterobacter aerogenes
atgagcgttgacagacgttacactaaccttttgaataagctgattaatgccaatatcgatttggcggcttatctccagcttcgtaaagcgaaaggctatatgtcagtcagcgaaaatgaccatctgcgtgataacttgtttgagctatgccatgaactgcgcgtacacgcgccgcgtttgcagcacgccatcgcgccggaagagatggaagccttccgccttgccggcgaatccgtcgcttcggcggcggtttgcctgatgagcgggcatcatgattgcccggcttatattgccgttaacgtagagaagctagaacgctgtctgtcgggattgacgatgaatattcacattctgaataactcagcgccaatgacccacgcctga

SEQ ID NO: 88958 - DNA, 1326 bp, Enterobacter aerogenes
atgagcaatgtcacgcaccagccgaaaatcggcttcgtctccctgggctgcccgaaaaacctggtagactcagaacgtatcctcaccgaactgcgtaccgaagggtatgatgtggttcccagctacgacaacgccgatatggttatcgtcaacacctgcggctttatcgatagcgccgtgcaggagtcgcttgaagcgatcggcgaagccttaaaagaaaacggcaaagtgatcgttaccggctgcctcggcgcgaaagaagatcaaatccgcgaagtgcatccgaaggtgctggaaattaccgggccgcatagctacgagcaggtgctggaacacgttcatcactatgcgccaaagccgaagcacaacccgttcctcagcctggtgccggaacagggcgtcaagctgacgccgcgtcactacgcgtacttaaaaatttctgaaggctgcaaccatcgctgcaccttctgcatcatcccgtcaatgcgcggcgatctggtgagccgcccgattggcgaagtgctggcggaagccaaacgcctggccgacgccggggtgaaagagctgctggtgatttcgcaggacacctccgcctatggcgttgacgtcaagcaccgcaccggtttccacaacggcatgccggtgaaaaccagtatggtcagcctgtgcgaagagctggcgaagctcggcatttgggtgcgtctgcactacgtctacccgtatccgcacgttgacgatgtgattccgctgatggcggaaggcaagattctgccgtatctcgatattccgctgcagcacgccagcccgcgcattctgaaactgatgaagcgcccgggttccgcagaccgtcagctggcgcgtattaaacagtggcgcgagatctgcccggatctgaccctgcgttccacctttatcgtcggtttcccgggcgaaacggaagaagatttccagatgctgctcgatttcctgaaagaagctcgcctcgatcgcgtgggctgcttcaagtacagcccggttgaaggcgccaccgccaacgaactagcggatcaggtcccggaagaggtgaaagaagagcgctggaaccgctttatgcagctgcaacagcagatttccgccgagcgtctgcaggagaaagtgggccgcgaaattatggtactggtcgatgaagtcgatgaagaaggcgcgattggccgcagcatggccgatgccccggaaatcgacggcgcggtctatctgaacggtgaaaccaacgttaaaccgggcgacgtgctgcgggtgaaagtcgaacacgccgacgaatatgacctgtggggttcccgggtctaa

SEQ ID NO: 88959 - DNA, 948 bp, Enterobacter aerogenes
atgccgccattaacccggctatcaggtacaagtaaggtgcgattgctcaactggagaagggaagcggttatcaacgccatgccgggcgttaagcccgggcagatccgcacgccgtggcatgaattctggcggcgttttcgtcgccagccggtggcgatggcagcgggcctatttgtgctgctgctgattgtcgtcgcgattatcgcgccgtggatagcgccgtatgacgcggaaaactattttgattacgaccggctcaatgaagggccgtcaatggtgcattggttcggcgttgattcgctggggcgcgatatcttcagccgtgtgctggtcggcgcgcaaatttcgctggccgcaggggttctggcggtactaattggcgcgctaattggcaccgtgctcggcctgctggccggttactacgaaggctggtgggaccgcatcaccatgcgtatctgcgacgtgctgtttgccttccccggcattctgctggcgattgcggtagtggcggtgatgggcagcgggatggccaacgtgattatcgcggtggcgatattctcaattccggcgttcgcccgcctggtgcgcggtaatacgttagtgctgaagcagcagacgtttattgagtcggcgcgcagtatcggcgccagcgatacgaccattctgttcaaccatattttgcccggtacggtatcgtcgatagtggtttattttaccatgcgcatcggcgtgtcgattatctccgccgccagcctgtcgttcctcggccttggcgcccagccgccgacgccggagtggggggcgatgctgaacgaagcgcgcgcggatatggtgatggcgccgcatgtggcgttattcccggcgatcgccattttcctgacggtgctggcgtttaatctgttgggcgacggcctgcgcgatgcgctggatccgaagataaaggggtag

SEQ ID NO: 88960 - DNA, 921 bp, Enterobacter aerogenes
atgctgaattacgttctgaagcgcctgctgggcctcattccgacgctgtttatcgtcgccgttctggtgttcctgtttgtgcatatgctgccgggcgatccggcgcggctgatcgccgggccggaagccgatgcgcaggtggtggcgatggtacgccaacagctggggctcgatcagccgttgcacgtgcagttctggcactacatcaccaatgtattgcagggggatttcggtatctcgatggcttcgcgccgcccggtgaccagcgaaatcgccagccgctttatgccgacgctatggttaacgcttgccagtatgagctgggcggtgctgttcggcatggcggcgggcatcgccgcggcggtgtggcgcaatcgctggccggatcggttggggatggcgctggcggtaaccggtatctccttcccggcgttcgccctcggcatgctgctgatgcaggttttttccgtcgagctgggctggctgccgacggtcggcgccgacagctggcggcactatattctgccgtcgttgacccttggcgccgcggtggcatcggtgatggcgcgcttcacccgcgcgtcgttcgtcgacgtgctgcatgaggattacatgcgtaccgcgcgggctaaaggggtgagcgaaacgctggtggtgttgaagcatggcctgcgcaacgcgatgatcccggtagtgaccatgatgggtctgcagttcggttttttgctcggcggctccattgtggtggagaaggtcttcaactggccggggcttggccggctgctggtcgattccgtagagatgcgcgactacccggtgatccaggcggaagtgctgctgttttcgctggagttcattcttatcaacttagtggtggacgtaatgtatgccgccattaacccggctatcaggtacaagtaa

SEQ ID NO: 88961 - DNA, 1542 bp, Enterobacter aerogenes
atgactcaacctgttacacgcaaatggctactggcgcttggcatcgcctcggcgctggcggcgacgccggccttcgccgcgaaagatgtggtagtggcggtcggttccaacttcacgacccttgatccctatgacgcgaacgatacgttatcgcaggcggtggcgaagtcgttttatcaaggcctgttcggccttgataaagagatgaaactgcaaaacgtattggcggaaagttataccgtttcggcggatggtctggtgtataccatcaagctgcacagcggggtgaaattccaggatggcaccgattttaacgccgaagcggtgaaagcgaatctcgaccgcgccagcaatccggataaccatctcaaacgctataacctatataagaatatcgccagcaccgaggcggtggatccgacgacggtcaaaatcacactcaaacaaccgttctcggcgtttatcaatatccttgcccatccggcgacggcgatgatttcgccggcggcgctgaaaaaatatggcaaggagatcggcttccacccggtaggtaccgggccgtataagctcgacacctggaatcagaccgatttcgtcaaagtcagcaagtttgacggttactggcagccggggctgccgaagctggattccattacctggcgcccggtggtcgataacaacacccgtgcggcgatgctgcagaccggcgaggcgcagttcgccttcccgatcccttacgagcaggcgccgctgctggcgaaaaacagcaaactggagctggtggccagcccgtcgattatgcagcgctatatcagcatgaacgtaacgcagaagccgttcgataatccgaaggtgcgggaagccattaactatgcgattaaccgtcaggcgctggtcaaggtcgcgtttgccggatacgccaccccggcgaccggcgtcgtaccgccttctattgcttacgcccagacctacagcgcatggccttacgacccggcgaaagcccgtcagttgctgaaagaagccggtttcccgaacggctttagcaccacgctgtggtcatcgcataatcacagcaccgcgcagaaggtgctgcagtttacccagcagcagctggcgcaggtgggtataaaagcgcaagtgacggcgatggatgccggacagcgtgcggcgcaggttgaaggcaaggggcagaaagagagcggggtgcggatgttctacaccggctggtcagcgtcgactggcgaagccgactgggcgctgtcgccgctattcgcctcacaaaactggccgccgaccctgtttaacaccgcgttttacagtaacccgcaggtcgataaagatctgagcgaggcgatgaaaacgaccgatgcgcaacagaagaccacactctataaagatgcgcaggacattatctggaaagagtcgccgtgggtgccgctggtggtggaaaagctggtatcggcgcatagcaaaaacctgaccgggttttatattcaaccggataccggttttagcttcgagcaggcggatctgacgcagtga

SEQ ID NO: 88962 - DNA, 1854 bp, Enterobacter aerogenes
ttgccgcaaagtcatgaaattgatgaagacgatgtgctggtggtacgcgatcttaacgtcgcctttagccagcagcggcagcgcgtttctgcggtgcgtaacctgtcatttagcctccgccgcggcgagacgctggcgattgtcggcgagtccggttccggaaaatcggtgaccgccctggcgctgatgcgcctgctcgacggggcggtcagcgaagtcagcagcgaggcgttgctgctgcgtcgacgcaaccgtcaggtgattgatattaatgcacaaacggcggggcagatgcgtcaggttcgcggcgcggacgtggcgatgatttttcaggagccgatgacctcgctgaacccggtattcaccattggcgaacagatcgccgagtctattcggctacatcaggggctgcgccatgacgaggcgctgcgggaagctaaaaagatgctcgaacgggtgcgtattccggaggcggaagcgatgctttcacgttacccgcatcagctttccggcggcatgcgccagcgggtgatgatcgccatggcgttatcgtgtcgcccggcggtactgattgccgatgaacccaccaccgcgctggacgtcacgattcaggcgcagatcctgcagcttatcgccgcgctgcaaaaagagatggcgatgggggtgatgtttatcactcacgatatgggcgtggtggcggaaatcgccgatcgcgtgctggtgatgtaccgcggcgaagcggtagaaagcgggcgcgtcgaggatatttttcgcgccccgcagcatccttatacccgggcgctactggcggcggtgccgaagctcggctcgatgcgcggcagcgatttgccgcgacgcttcccgctgctcaacgacggtgtgacccagcagccggaacagaataccgtggtagccggcaaaccgattttacaggtacgcgacctggtcgcgcgttttccgatccgcggcggtattctcaaccgcgtcacccgcgaagtgcatgcggtggaaaaagtgagtttcgacctgtggccgggcgaaacgctgtcgctggtcggcgaatccggctgcggtaaatcgaccaccgggcgggcgctgctgcggctggtggaagcgcagggcggcagcatcacctttaacggccagcgtattgatgcgctgtccggcggcaagctacagacgctgcgccgcgatattcagtttatttttcaggatccttacgcttcgctcgacccgcggcagacggtcggttattccattatggagccgctgcgcgtgcatggtctgctggaaggggatgcggctcgcgaacgtgtcgcctggctgttgcagcgcgtggggctggaggcggaacacgcgtggcgttatccgcatgagttttccggcggtcagcggcagcgtatctgtatcgcccgcgcgctggcgctcaatccgaaagtggtgatcgccgatgagtcggtgtcggcgctggacgtgtctattcgcgcgcagattattaatctgctgctcgatttacagcgtgaaatgggcatcgcatttctgtttatttcccatgacatggcggtggtggagcgcatcagccaccgcgtagcggtgatgtatcgcgggcggatcgtggagattggcccgcgtcgcgccgtgtttgagaacccgcagcatccttacacccgtaaactgatggcggcggtgccggttgccgatccggcgcatcgtcaaccgcagcgcgtattactctctgacgagctgccggggaatatctataaaccgggagaagaaatcgacagcgcgccgttacagctggtagcgccggggcattatgtcgcccgcgagcccgccgatgtactgagccgataa

SEQ ID NO: 88963 - DNA, 942 bp, Enterobacter aerogenes
atgggtaaggcggtaatagcaatccacggcggcgccggcgcgattagccgcgcgcagatgactcaggcgcgcgaaagcgagtatgtggccgcgctgtcggccatcgtcgatagcggacaaaaaatgttggcagcaggcgccagcgcgctggatgcagtgaccgaagcggtacgcctgctggaagagtgcccgctatttaacgccggaataggttccgtgtttacccacgatcaaactcacgaactggatgcctgtgtgatggatggctatagcctgcaggccggcgcggtggctggcgtaaagcatctgcgtaacccggtgctggcggcgcgtctggtgctggaagaaagtccgcacgtgctgcttatcggcgaaggggcggaaaagtttgccgcctcgcgcggcatggcgctggttgaaaacgagttattttccactaccgagcggcttctgcagttgcagcaggcgaaagagggcggcgagattattctcgatcatcatgccgcgccgctcgatgaacgccacaaaatgggtaccgtcggcgcggtggcgctggatctggccggtaatctggcggcagcgacctctaccggcggaatgaccaataaactgcccggacgcgtcggcgacagcccagtgccgggcgcgggctgctatgccaataatgccagcgtcgcggtctcctgcaccggcaccggcgaagtcttcatgcgcacgctcgccgcttacgacatttcagcgttgatggagtacggcaatctcagcctgtttgaggcctgcgagcgggtggtgcaggaaaaactgccggcgctgggcggcagcgggggccttatcgccatcgaccgcgaggggaatgtggtactgccgttcaacagtgaggggatgtaccgggcgtggtgttatgcgggcgatacgccgacgattggaatttatcgcgaataa

SEQ ID NO: 88964 - DNA, 1236 bp, Enterobacter aerogenes
atggattttaccgccggactgatgccgctcgacacagccctgactcagatgctcgaccgtatttcgccgctgcaggccacggaaaccctgccgctgctgcaggccttttcgcgcgtgaccgcccatgatgtcgtttcgccgctggacgtacccggttttgataactcggcgatggacggctatgccgtgcgcctggccgacctcaccgacggcgcggcgctgccggttgccggtaaggcctttgccggccaaccgttccacgacgcctggccggcgggcacctgtatccgcatcatgaccggcgcgccggtgccggaacgctgcgacgcggtggtgatgcaggaagaaacggaacaaagcgacgccggcgtgcgcttcatcgcgccggtaaaagccgggcaaaatattcgccggcgcggcgaagatatcgccaacggcgcggtagtattcccggcgggcacgcgtcttaccgtagccgagttgccggtgctggcatcgctgggcattgccgacgtcgaggtagtccgtaaagtgcgcgtcgcggtcttctcgaccggggatgaactccagttgccgggccaaccgctcggcgacggccagatttatgatactaaccgcctggcggtacatttgatgctcgaacagctgggctgcgaggtgatcaacctcggcattattcctgacgatccggcgaagctgcgcgacgcctttatcgccgccgaccagcaggctgatgtggtaataagctcaggcggcgtctccgtgggcgaagccgattacaccaaaactatcctcgaagaactgggcgagatcggcttctggaagctggcgattaagccgggtaaaccgttcgccttcggcaagctcagcaacagctggttctgcggcctgccgggcaacccggtttccgccaccttaaccttctatcaactggtacagccgctgctggccaagctctccggcaaccgcggtcaaacccagccgatgcgtctgcgcgtgcgcgccgccagtcggctgaaaaaatcgccgggccgcctcgacttccagcgcggcgtgctgcaacgcaatccggaaggcgaactggtggtgagcaccaccggccatcagggctcgcacattttcagctcattcagcctcggtaactgctttatcgtactggagcgcgaacgcggcaacgtcgaagcgggcgaatgggtcgaagtcgagccctttaatcatctgtttggggggctgtaa

SEQ ID NO: 88965 - DNA, 756 bp, Enterobacter aerogenes
atggccgttgagctgagcgacgaggagatgctgcgctataaccggcagatcgtactgcgagggtttgatttcgacggtcaggagcgcttaaaagccgctcgcgtactggtcgtcggcctcggcgggcttggctgcgccgccgctcaatacctggcggcagccggggtaggtcagctcacgctcgtcgatttcgataccgtttcattatccaatctacaacgccagacgctgcacagcgacgcgaccatcggccagccgaaggtcgattctgcccgcgatgcgctggcgcgcattaacccgcacgtccggctggtcaccatcgatgcaatgctggatgacgcggcgctggcaacgcagattgccgaccaccatctggtgctggactgtaccgacaacgttgctgttcgcaatcagcttaacgccggctgcttccagcacaaaacccctctggtctccggcgcggcgattcgtatggaagggcaaatcagcgtctttacctatcaggacggcgagccctgctatcgctgcctgagccgcctgtttggcgaaaacgccctcacctgcgtcgaagccggggtgatggcgccgctggtcggcactatcggttcactgcaggccatggaggcgattaaactgctgaccggttacggcacccccgccaggggaaaaatcgtgatgtatgacgcgatgacctgccagtttcgcgaaatgaagctgatgcgccacccgcagtgcgaggtgtgcggttcacgctaa

SEQ ID NO: 88966 - DNA, 900 bp, Enterobacter aerogenes
atgatcttcaacatccagcgctactccacccatgacggcccggggatccgtaccgtcgtattccttaaaggctgttcgctgggctgccgttggtgtcagaacccggaaagccgcgcccgcagcgaagacctgctgtacgacgcgcggttgtgccttgacggctgcgagctttgccagcaggcggcgccggaggtgattacccgtaccctggatggcctgattatccatcggcaaaacgtcaacgacgcccatattgccgcgctacgccactgctgccccactaccgcgctgacggtctgcggcgaggaaaaaagcgtggcggaaattatggcgacggtgctgcgcgataaaccgttttatgatcgcagcggcggcggcattactctttccggcggcgagccctttatgaacccgacgctggcgcaggcgctgttcgaagccagccatcaggcgggcattcacaccgccgtggaaacctgcctgcacgtaccgtggaagtacattgaaccctctttaccgtttgtcgatctgtttctggccgacctgaagcacgtcgacgaggccgtcttccagcagtggaccgacggcagcgcccgccgggtgctggataacctgcagcgcctggcgcaggcagggaaaaaaatcattatccgcgtcccgttaattcaggggtttaacgccagcgaagccgatattaccgcgattaccgattttgccgctgaccgcctgcaggtcagcgaaatccatttcctgccgtaccacacgctgggaatgaataaataccaactactcagtcagccctataccgcaccggacaaaccgctggccgctcccgagctgctggcctttgcacagcagtacgcgcaaagcaaaggtttaacggcgaccctacgaggataa

SEQ ID NO: 88967 - DNA, 2433 bp, Enterobacter aerogenes
atgaccaccttaaaactggatactctgagcgcccgcattcaggcgcataaaatggcgctggtgcatatcgttaagccgccggtttgtaccgagcgcgcccaacactataccgccgcctatcagcaacatctcgataaacccatcccggtgcgtcgcgcgctggcgctggcgcatcatctggcggaacgcactatctggatcaagcacgatgaactgatcgtcggcaaccaggccagcgaagttcgcgccgcgccgattttcccggaatataccgtcagctggattgagaaagagatcgacgatctcgccgaccgtccgggcgccggcttctcggtcagtgaagcgaacaaacgcgtattacatgaagtgtgcccatggtggcgcgggcagaccgttcaggaccgctgctacggcatgtttaccgatgaacaaaaagcgctgctcgccaccggcattatcaaagccgaaggtaacatgacttccggcgacgcccacctggcggtcaactacccgctgctgctggaaaaagggctcgacggcatgcgcgcgaaagtcgctgagcgccgctcacgcattaatctgacggtgctggaagatctgcacggcgaacagttcctgaaggcgatcgatatcgtgctcgcggcagtgagcgaacactgcaaacgcttcgctacgctggcgcgcgacatggcggcgcaggagccgcgcgaactgcgccgcaacgagctgctggcgatcgccgaaaactgtgaaattatcgcccaccagccgccgaaaaccttctggcaggcgctgcagctctgctactttattcagttgatcctgcagattgaatccaacggccactcggtctcctttggccgcatggaccagtacctctatccgtactaccgccgcgacgttgaactgcagcaatcgttggatcgcgaacaggccattgagctgctgcattgctgctggctgaagctgctggaggtcaacaaaattcgctcgggctcgcactccaaagcttctgccggcagcccgctgtaccagaacgtcaccatcggcgggcaaaatctggtcgacggtcaaccgcaggacgccgtcaacccgctgtcgtacgcgatcctcgaatcctgcggccgcctgcgctcgacccagccgaacctcagcgtgcgttaccacgccgggatgagcaacgacttcctcgacgcctgcgtgcaggtgatccgctgcggtttcggcatgccggcgtttaacaatgatgaaatcgtcattccggaatttatcaagctagggattgagccgcaggacgcctacgattacgccgctatcggttgtatcgaaaccgcggttggcggcaaatggggctatcgctgcaccggcatgagctttattaacttcgcgcgggtgatgctggcgacgctggaaggcggccgcgatgccaccagcggccaggtgttccttgcccaacaacatgcgctgtcgaaaggtaacttcgctaacttcgaccaggtactggaagactgggatacccagatccgctactacacccgtaaatccatcgagattgagtacgttgtcgataccatgctggaagagaacgtccacgatattctctgctcagcgttagttgatgactgcatcgaacgggcgaagagtatcaagcaaggcggcgcgaagtatgactgggtttctggtctgcaggtcgggattgccaacctcggcaacagcctggcggcggtgaaaaaactggtcttcgatcagggcgttatcggccagcaggagctggcgaaagcgctggcggaagattttgccggcctgacccacgagcagttacgtcagcgcttgatcaacggcgcgccgaagtacggtaacgacgacgacagcgtcgacattctgctagcgcgggcctatcagacctatatcgacgagctgaagcagtaccataacccgcgttacggccgcggcccgattggcggtaactattacgctggtacgtcgtctatctccgcgaacgtcccgttcggcgcgcagaccatggcgacgccggatggccgcaaagcgcacgcgccgctggcggaaggggccagcccagcctccggtaccgatcacctggggccaacggcggttatcagttcggtaggcaaactgccgaccggcgcgatcctcggcggcgtgctgctcaaccagaagctgaatccttccacgctggagaacgagtccgataagcaaaagctgatggtgctgctgcgcaccttcttcgaggtgcataaaggctggcatattcagtacaacatcgtgtcacgcgaaacgctgctggaagccaagaaacaccctgaccagtaccgcgatttagtggtccgcgtcgccggatactcggcgttcttcaccgccctgtcgccggatacccaggacgacatcatcgcccgtaccgagcatacgctgtaa

SEQ ID NO: 88968 - DNA, 816 bp, Enterobacter aerogenes
atgaccgttaaagttatcgtcaccgatatggacggaacttttctcaatgacgccaagcagtacgaccgcccgcgtttcctcgcgcagtttgcgcagcttaaacagcaaggtattgaatttgttgtcgccagcggcaaccagtactatcagctgatctcatttttcccggaaatccgcgagcagatttcattcgtcgcagaaaacggcgctctggtttacgagcatggcaaacaggtgttccacggcgaactgacccgtcacgaatcacaggtggtgattggcgaactgctgaaagatccgcagctcaactttgtcgcctgcggcctgcaaagcgcatacgtgagcgataaagccccggacgcctttgttgagctgatgtcgaagcactaccatcgtctgcagcgggtaagcgattaccatcgcatcgacgatacgctattcaaattctccctcaacctgccggatagcgatatcccccagcttatcgataaattgcacgtctcgctggatgggatcatgaagccggtcaccagcggctttggctttgtcgatttgattatccccggcctgcataaagccaacggcatcagccgcctgctcaaacgctggaacctttcgccgcagcaatgcgtagcaattggcgacagcggcaatgacgccgaaatgttaaaactggtgaaatatgcttttgctatggccaacgctgccgacagcatcaaagccatcgccggtttcaccaccgatgacaataaccacgacggcgcgttgaaggtgattcaggccgttctcgataagaccgcccctttcaacgactga

SEQ ID NO: 88969 - DNA, 1266 bp, Enterobacter aerogenes
atggctgctctccctacccacgaaacattacctgccgaccataaagcggcgattcgccagatgaaacaggccttacgggcgcaaatcggcgatgttcaggcagtgttcgataaactctcggcgcgtatcagcgagcgcctggacgagattaacgccctgaaagccgcaggcaaggaggtctggccgacgatcccgtttagcgatatcgcccagggtaaagtgagcgatgcgcagcgtgaggcgattaagcgccgcggttgcgcggttatcaaaggccactacccgcgcgaacaggcgctggcctgggataacgcgatgctggaatacctggacctgaaccattttgacgacgtttacaaagggcccggcgacagcttcttcggttcgctggaggcttcgcgcccggagatctatccgatctactggtcgccctcgcaaatgcaggcgcgccaaagcgatgaaatggcggcggtacaatccttccttaaccgcctgtggcgctttgagcaggacggcaaacgctggttcgatccggatgtcagcgtgatttaccctgaccgcatccgccgccgcccgccgggaaccacgtcaaaggggctgggcgcgcataccgattccggggcgctggagcgctggttgcttcccgcttatcagcaggttttcgccaacgtctttaatggcaatatcgacgcctacgatccgtgggacgcggcgcatcgtaccgaagtggaagagtacaccgtcgataacaccaccaaatgttcggtcttccgcactttccagggttggacagcgctgtcggacatgatccccggtcaagggctgctgcacgtggtgccgatcccggaggcgatggcttacgttctgctgcgtccgctgctggatgatgtgccggaagatgaactatgcggcgtcgcgccgggcaaggtactgccgatctctgagcaatggcatcctctgctcatcaaagcgttaagctcgattcccgcgctgaatgccggcgattccgtctggtggcactgtgatgtcattcactcggtcgcgccggtggaaaatcaacagggctggggcaacgtcatgtacatcccggccgcgccgatgtgcgagaagaatctcgcctatgcgcagaaggtaaaaatcgcgctggaaaaaggcgcctcgccgggggatttcccgcgtgaagattacgaatgcgactggcaggcgcgcttcaccgttgccgatcttaacgatcacggcaaacgcgcattgggcatgaagatctaa

SEQ ID NO: 88970 - DNA, 1074 bp, Enterobacter aerogenes
atggataaaaagctgcgagtcgccgaaattgccgcccgcaccgggctgtcagccagtacggtttcgcgcgtcttagccggaaaagcgaataccagcgaaaaggcccgtcaggcggtattggcctgcgcccgcgagctgggggtgatgcagggattggccgccgggcggctactgctcaacaacctgctgatttttgctccgcaacgggccttcgacgaacgttcagatattttctactaccgcgtcatccagagtattaataacgcgctggcgccgcatgaagtacgtctgcgctattgcgcgctggaagaaaacgacagcgacgccaatctgtttctggcccgcatgaacgagaccgacacccaggcggcggtattgctgggtattgacgatcggcatatccacgcgctggcggcggatcttggcaaaccttgcgtattaattaactgccgggatgaagggatgcggcttccttctattgcgcctgaccatcggctgattggccagtgcgccgctcgttatctgtttgatatgggccatcaggcggtaatgaacgtgatgtgcttgcgccgctataccatggagctacggctggtgggtatcaaggaggcgtggcgcgcgcgcaacctgcgatttaccggtagccgcgacctgattagcgtcgccaactttagcgccagagaaacggaagagcaggtcggggcctggctcgacgctttacaggggcgcccgatgccgacggcgtttctggtgggcggcgattttatggccgcaggtaccgtcagcgcgctgcaaaaacgaggcctgcgggtgccgcaggatgtctcggtgatgagtatcgacggttttaatctggcggcgattcaggacgtgccgctaacggcgattcatgtaccgcgggatgagctcggcagcgaggcggtgcatcttttgcagcagcgtctgctgcgcccggaagcgccgcacggctcgctactgctgcacggcgccctggtggtacgcgattcggtgcggcggatccggccaggcaagagccataccgccgtagaacagcaaggtctgtatgatgattag

SEQ ID NO: 88971 - DNA, 1302 bp, Enterobacter aerogenes
atgagtcaaggcctcaacaatgatatggcagtcagcaaaacgcgccgggtggtgaaaaacctgcgctggtgggtgctggtgctgtttttacttggcgtcaccgtcaactacatcacacgtaactcgctggggattatcgccccggaactgaaagccactctcggtattaccaccgagcaatattcgtggatcgtcggcgcatttcagctggcttataccatcttccaaccgctgtgcggctggcttatcgacgtcatcgggctcaagctgggctttatggtttgcgccaccttgtgggcggtagcctgtatcgcgcacgccggagcaggcagctggctgcatctggctattttacgcttctttatgggcggcgcggaggcggccgccaccccggctaacgctaaaaccatcggcgagtggttcccgaaatccgaacggccgatcgccgccggctgggctggcgtcggcttttctatcggcgcaatgctggcgccacctatcatctacttcgcccacgcctccttcggctggcagggcgcgtttatgtttaccggcgtgctggcgctgctgtgggtcgtgctgtggtgggcgttctatcagagcccggaaaagcacccgaatctcagccaaagcgagctggagtacatcaagcaggacaacgaagcgccgccggtgaagcagcccttttttaccgcgctaaaaaccgtctcgaagaacaaacgtttctacggtatcgccatccccgcttttatggccgagcccgcctgggcggtgctgagcttctgggtgccgctgtacctggcgaaagagcacggtatggatcttaagcagatagcgatgttcgcctggctgccgttcctcgccgccgaccttggcagcgtggtcagcggctatctcacccgcctgtacgtccgttggttcggctgtacgcgagtcaattcggtcatcgccagttccgtgaccggcgcgtttctgatgctctcgctggccctggtggccattacccgcgatccctatatcaccatcatcctgatctccattggcggtttcggccatcagatcatctcctgcatgctcagcgcgctggtggtggagtctttcgacaagggacaaatggcgactgtcaacggtatgcgcggttccgcggcgtggatcgccagcttcctgttctcattattaatcggggtgaccgccgacaaaatcggcttcaacccgctgtttatcgccatgggtttctttgacctgattggcgccgttttcctggtggcatttattgctgaacgtcgcgccaagcgcgcctga

SEQ ID NO: 88972 - DNA, 2364 bp, Enterobacter aerogenes
atgaagacgttgaaacactggagtttgcaccaacagctggagcatcacgttgaattgaccgttgatggtcagcacactttgtgtctgtacgtgctggaagagaatttattccgcgtcctgctgaagcgccagggccaactggcgctggatcgcacctggagtatcgccccgcagcaggatgtgccgtgggaaggccgcgcgcgggatgacctcagcggttttagcctcccggcctggcagatgagcgaagcggatgacacgctgaccatcgccacccgccagctgcgcgttaccgtccatcagccgctttggctggagtggagctatcgcgacgaggccggcgagtggcagacgctcgccaatgaccgcccaaccagcgcctatctggcaaacgcccacggggatggcgtcgcccattatcttagccgccgcaaagatgaacgttactacgggctaggtgaaaaagccggtgacctgcagcgtaacggcaaacgctacgaaatgcgtaacctcgatgccatgggctacaacgccgtcagcaccgacccgctgtataaacatattccctttaccatcacgcagcgcagcgatatcagctacggcctgttctatgacaacctgagcagttgctggctggatctgggcaatgaaatcgacaactaccacaccgcctatcgccgctggcaggcggaggccggcgacatcgattattacctgtttaccggtaagcaggtgctggatgtgaccaaagcgtttgtccgtttgaccggtaaaacgctgtttgggccgaaatggagcctcggctatagcggctcgacgatgcactataccgacgcaccggatgcgcaaaatcagctgatgaactttatccgcctgtgcgagcagcatgcgatcccctgtgattcgttccagctctcttccggctatacctcaatcaacggcaaacgctacgtctttaactggaactacgacaaggtgccgcagccaaaagtgatgagccagtcgttccacgatgccgggctgaaactggctgccaatatcaaaccgtgtctgctgcaggatcacccacgctatggcgaagtggcggaacgcggccttttcattcgcgattcgcaaaccgatgcgccggagcgctccagcttctgggacgatgaaggttcgcatctcgacttcaccaacccgcacaccgtgacctggtggcaggaaggcgtgaccacccagctactggagatgggtatcgattcgacctggaacgataataacgagtatgaggtgtgggacggcgaggcgcgctgctacggctttggccgcgaaatcgccattaagcatattcgcccggtgatgccgctgttaatgatgcgcgcctcgctggaagcccagcaacgctttgcgccgcaaaagcgcccgtatctgatctcccgctccggctgtgccgggatgcagcgctacgtacagacctggagcggcgacaaccgcaccaactgggatacgctgcgctataacacccgtatgggattagggatgagtctttccgggctgtttaacgtcggccatgacgtcggcggattctccggcgataaacccgagccagaactgttcgttcgctgggtgcaaaacggcgtgatgcatccgcgctttaccattcactcgtggaatgacgaccagacggtcaatgaaccctggatgtacccggaaatcaccccggcgatccgctctgccatcgagctgcgctaccgtctgctgccctatttgtacaccctgttatggcaggcgcatgccgatgacgaacccatgttgcgcccgaccttcctcgatcaccagcacgatacccagaccttcgccgagtgtgatgacttcatgctggggcgcgatctgctggtggcaagcgtagtagagcccggcgcccgtcagcgccagctgtggctgcccgataatcaggacggctggtacgatttttacagccaccagtggttcgccggtggtcagtgggtgacgctggacgcgccgctggaaaaactgccgctgctggtccgcgccggcgccggtctgccgctcagtgaacgtatcaaccacgtcgatgcgcaaaaagacgatcgtcgcgaactgcagttgttcccactgaaaggtaccggctcaacccgcggtttgctgtttgaagacgacggcgaaagctggggctataaagagggtgatgcgctatggctggagtgggaaatgacctgcagcgccaacagcataaacctgaagctcgacgcttgcggcaactatcgcccagcgtggaaagcgctgaagctgtcattaccggcgggagaaaaacgccaactgctggtgaatggcgtcgaaggaacagagtggaggctctga

SEQ ID NO: 88973 - DNA, 1593 bp, Enterobacter aerogenes
gtgctagtatccagcaacgtcaccatgcagtttggcagtaagccgctgtttgaaaacatctccgtcaaatttggcggcggcaaccgctacggcctgattggcgccaacggcagcggcaaatctacgtttatgaagatcctcggcggcgatcttgagccgacgctgggcaacgtgtctctcgatccgaacgagcgcatcggtaagctgcgccaggatcagttcgccttcgaagagttcaccgtgctggatacggttatcatgggccacggcgagctgtgggaagtgaagcaagagcgcgatcgcatctacgcgctgccggaaatgagcgaggaagacggctataaagtggccgacctggaagtaaaatacggcgagatggacggctattccgccgaagcgcgcgccggtgaactgctgctcggcgttggtattccggtggagcaacattacggcccgatgagcgaagtcgcgccgggctggaaactgcgtgtcctgctggcgcaggcgctgttctccaatccggatatcctgctgctcgatgaaccgacgaacaacctcgacatcgatactattcgctggctggagcaggtgctgaacgaacgcgacagcaccatgatcatcatttcgcacgaccgtcacttcctgaacatggtttgtactcatatggcggatctcgattacggcgaactgcgcgtgtatccgggcaactatgacgaatatatgaccgcggcgacccaggcgcgtgagcgtctgctggccgataacgccaagaagaaagcgcaaattgccgacctgcaggcctttgttagccgctttagcgccaacgcttcaaaatcgcgtcaggcgacctctcgcgcccgtcagatagataaaattaagctggatgaggtgaaagcctccagccgccagaacccgttcattcgcttcgaacaggataagaaactattccgtaacgcgctggaagtggaagcgctggcgaaaggctttgataacggcccgctgttcaaaggggttaatctgctgctggaagttggcgaaaagctggcggtactggggaccaacggcgtcggtaaatcaacgatgctgaaaaccctggtcggcgaactggaagcggataacggtaccgtcaagtggtcggaaaacgcccgtatcggctactacgcgcaggatcatgccgaagatttcgagaacgacctgacggtctttgactggatgagccagtggaaacaggaaggcgatgacgagcaggcggtacgcagtatcctcggtcgtctgctgtttagccaggacgatatcaaaaagccggcgaaagtcctctccggtggtgagaaaggtcgcatgctgttcggtaagctgatgatgcagaaaccgaatatcctggtgatggatgaaccgactaaccacctggatatggaatcgatcgaatcgctgaacatggcgctggagatgtatcagggcaccctgattttcgtttctcacgaccgtgagttcgtgagttcgctggcgactcgcgtactggagatcaccccagaacgcgtaatcgatttcagcggcaactacgaagattacctgcgcagtaaaggtatcgagtaa

SEQ ID NO: 88974 - DNA, 783 bp, Enterobacter aerogenes
atgaccacccgcaccagccatcctgcatttatctcgcttcaaggcggcatcaactttcgcgacctcggcggtcaacgcgcggccgacggccggcgcgtacgttcaggcaaactgctgcgctcaggctcgctgcacaacatgacgccggaggatctcaatcatctcagcgccattccgctgagccgggtgctggattatcgcgatccgacagaggtcaatcgcagccccgatcggctgaatagcgaagccttttacctcaacgccccggccaatccgctttccagcagcgtcaatgcgaaagtcaccgagtttaacgccgcgaccctcaacaccatggacggcgagcagtttatgctacagctctaccgccagttaccgtttaataacgccgcctatcgccagttgacgcaatggctaatggagccttttgacggcgccctgctgcagcactgcgccgtcggtaaagaccgcaccggcgtcggctgcgccctgacgctgttcgcgctcggctgtgatagcaatacggtcatggaagagtatctgctgacccaggggatgctggcgcaggtcgaaggattcctgctcgacaccttcggcgaaggccttaatgagcacgggcgtaaaaatctcgccgccatcatgaccgttcaggagtcatatctggcgaccgcgttgtccagcattgaacagcgttacggtcatgtcgaccgctggctggaacaggaataccgcctgacgccacaggcgcgcgaagcgttgcagtcacggctgctggaagattaa

SEQ ID NO: 88975 - DNA, 924 bp, Enterobacter aerogenes
atgaagaatatgaaattatcgacactcttagcggcagccttcgccatcgtgggcttttgcaacacagcttcagctgttacctatcctctgccaaccgacggcagccgtctgattggccagaaccaggtcatcactattccagacgataataaacagccgttggaatatttcgctgccaaatatcagatgggtctgtccaacatgttggaagcgaacccgggcgtggatacctacctgccaaaaggcggtaccgtgctgaatattccgcaacagctgattctgccggacaccgtgcatgaaggcatcgtcatcaacagcgccgagatgcgtctgtactactacccgaaaggcaccaataccgtgatcgtactgccgatcggtatcggccagttgggtaaagatacgccgatcaactggacgaccaaagttgagcgtaagaaagcgggcccgacctggaccccgacggcgaaaatgcacgccgaatacgccgcggaaggtaacccgctgccggcagtcgtaccagcaggcccggataacccgatgggtctgtacgcgctgtatatcggtcgtctgtacgccatccacggtaccaacgccaactttggtatcggcctgcgcgtgagccacggctgcgtacgtctgcgtaacgaagacatcaaattcctgtttgagaacgtgccggttggcacccgcgtgcagtttatcgatgagccggtaaaagccaccaccgaaccggatggcagccgctacgtcgaagtacacaacccgctgtcgaccaccgaagcgcagttcaaaggcggcgaaatcgtgcctatcagcctgactcaggccgtgcagtcggtgaccagccagcctgacgttgaccagagcgtaatggatcaggcgatccagaaccgttcagggatgccggtgcgcctgaactaa

SEQ ID NO: 88976 - DNA, 717 bp, Enterobacter aerogenes
atgacggcgaagtatcttaatatcgcgcgggaaataaaaaagcggatcattagccagcagtatcctgccagcgcgccgttacccgaccagtttgcgctggcggcagagttcaataccagccggatgacgatccagcaggcaatgcgtcagctgattgtcgaggggcttatctacacccgcaaagggcagggtacctttgtgcggaaaaatttcctccagctatcgcagtgggaactgcccggcagcgactatttcggcgccaccaaaacctgggagcatctcggcgaggtgcaaagcgaagtcgtgcgctttgaactgcgttttcccagcgagaaggaacagagttcgctgctgatcgacgccgatgcgccggtgtatgactttgtccgcctgcggttgcttaacggcgagccgatttcgctggatttaacggtaatgccggtggcgctggtgccggggctcaataaaagccatctacaaagctcggtgtttcgttacgtgcaggagacgctggggctgaagctgatggggtcttatcgggtggtgcgggcgattaagccggatgagctggataaattacatcttaactgcgagccgaccgacccggtgctggaggttgagcaggttatctatctggaagacggtacgccgctggagtacgcgcactgtcactaccgctacgatcatggcggggtcattctggtcaataacggctaa

SEQ ID NO: 88977 - DNA, 1377 bp, Enterobacter aerogenes
atgaaagacaaactaccggccaattttttatggggtaattcggtctccagcatgcagaccgaaggggcgtggaatgagggggggaaggggatgtcggtgtacgatatccgtgaaccgtcggagttcgcctcggactggaaggtagcgaccgactcctaccatcgcttccgcgaagattttgatttaatgcaggatctgggcatgaactgctatcgcttccagattgcctggagccgcgtctgtccgcagggagatggcgagtttaatgaagaggggattgcgttctaccatcagtttattgatgagctcattgcccgcggtattgaaccgatgatctgcctctatcacttcgatatgcccttgtcgctggcggagcgctataacggttttaccgatcgccgggtaatggacgcttttatccgctatggccagaagatgatcgactgctacggcgataaggtgaagtactggctgaccttcaacgaacagaatctttaccattcgccggaggcttttctgatcaccggctatctgcgtggcgataaaacgttgcgcgaactctaccagatccagcaccacgtgatgatggcgcacgtccatctcaccgactatctgcatcaggccaaaccgcagtgtctgatgggcggaatgctggcccatgcgctggtctatccggcaacctgtaagccgcgcgatattctgtgcgcccagcaactggacgagtttttaaatcagaacctgctgcgcgcgtacgcgggcgagggctatagtccggaagtgatgcattttgtcgcccgtgaaggttttgacgatatctatcgtcctgaagatatcgcgttgatggcaagggtgaaggtcgactatctggcattcagctactacgccagccgcacgctcaatagcgacgcgattccgccaggtacggcggtgaacaactatatgttgttcggtaatcaggacaatccatacctgaaagcgacggaatggaactggcagatcgatccgctgggattccgcacgatcattacccgctattacaacgactggcggctgccggtcttcccaattgaaaacgggattggggtgatcgaatcctgggacggcgaaaatcaggtcgccgatgattaccgcattgcctaccaccgtgaccacattaacgccatgaaagcggcaatgtttgaagacggggcgcaggtgataggctatctcggctggggattaatcgatatccttagctcgcagggcgacatgcgtaaacgctatggtgtggtgtacgtcaatcgtgaaaaccacgatctcaaggatcttaagcgggtaccgaagaaaagctacgcgtggttgaagcgggttatccacagtaatggcgaagagatgtaa

SEQ ID NO: 88978 - DNA, 1041 bp, Enterobacter aerogenes
atgcgttatcaaaaactgggaaataccggcctgtttgtctctgagctgtgccttggcaccatgaccttcggcggcgaagaggggatgtggggaaaaatcggccagctgcgccaggcggaagccgaacagctggtgggcagcgcgctggatgcgggcatcaacttcatcgataccgccaacgtttattcagaaggacgctcggaggagatcaccggccaggcgttaaagaatctgaagataccgcgtgaaaacgtggtggtggcgaccaaagtgttcggcgaaaccggcaccgctggggtgaactcgcgcggcagctcacgctaccacattatgggcagcgtgaaagagagcctgcgccgcctgcagctcgatcatatcgatctctatcaattacacggtttcgatccggcgacgcctatcgaagagacgctatcggcgctggacaccctggtgcagcaggggcatgtgcgctatatcggcgtttctaactgggcggcatggcaaatcgccaaagcgctgggcatcgcggaacgcctcgggctctcgcgctttgcttctctgcaggcttactacacgattgccgggcgtgagctggaacgcgaactggtgccgatgatgcaaagcgaaggtctcggcctgatggtctggagcccgctggcgggcggtctgttgagcggtaaatatcgccgcgatggtcaggcggaagcgggcggtcgtcgactggagttcgatttcccgccggtgaataaagatcgcgcctttgactgcattgatgttatgcaggtgatagccgaagcgaaaggggtctcggtggcgcagattgcgctggcgtggttactgcatcagccggcggtcaccagcgttattattggcgccaaacgggccgagcagttgcaggataacattgccgccaccgctattcgcctgagtgaagatgagctgcgccagcttgacgcggtcagcgcgctgccgcgcgagtatccgggttggatgctggagcgccagggggaatatcgccgtaagcagcttgacgcgcagtaa

SEQ ID NO: 88979 - DNA, 627 bp, Enterobacter aerogenes
atgctgccgctggcggcggcgatgatgatcacgctattggtgctgtgttggttctgtttccccgccgctcggctcaattatcaaagtagcgacaaagcgccggagtggcggccgaggctggtgtggagctgcctcgctttctaccttatctttctggcggcgctggagatgaagcaggaactctggggactgtcgatcattgccgtcgggttcctgctgctggcgcgagcggtgattatcaacgtcgactggtcgctgctgctggtgtttatggcgatgtttatcgacgttcatctgctgacgcagttgccggtgctgcagcagtggctgaacgacgtcggccagctctcgcatggcgggctatggctgacggcaattggcctgtcgcagtttatcagcaacgtgccgtcgactattttgctgctcaattacgtgccgccaacgatgctgttagcctgggcggtgaacgtcggcggctttggactgctgcccggatcgctggcgaacctgattgcgctgcggatggccggcgaccgccggatctggtggcgttttcatctttattccattccgctgctgatctgggcggcgcttaccggttacgccatgctcgcgctgtggcgctga

SEQ ID NO: 88980 - DNA, 429 bp, Enterobacter aerogenes
atgaatctcccccttgtgcagtcgctcgctcgcgaccgtttcctgcatcttttgttacttatcgccgttatccttagcctgtttgttcctttcgcgcctcagcgctgggggcaggctatcgactggcacactatcatcacccttagtgggctgatgctgctgaccaaagggattgaactgagcggttattttgatgtgctggggcgcaaaatggcgcgccgtttcgtcaccgaacgccaactggccatcttcatggtgctggctgccgcgctgctttccacttttttgaccaacgacgtcgcgctgttcattgtcgttcccctcacgttaacgctaaaaaaatggtgcgccatcccggtgaaccggctgattatttttgaagcgctggcggttaacgccggctctttattaacgccggctctttattaa

SEQ ID NO: 88981 - DNA, 468 bp, Enterobacter aerogenes
atgaaccgtcgcgcaggtaagcccataactaaaaaagtgacgcagctggttaatgtcgaagaacacgtagaggggtttcgtcaggtgcgcgaagcgcatcgtcgcgagctgattgatgactatgtggagcttatctccgatctgatcaacgaagtgggcgaagcgcgccaggtggatatggctgcgcgtcttggcgtttcgcaaccgacggtggcgaaaatgcttaagcgtctggcgagcgtcggcttgatcgaacagatcccctggcgcgggatcttcttaaccccggaaggggaaaagctggcccatgaaagccgcgagcgtcatcagatagtggaaaactttctgctggcgattggcgtgagtccggagattgcccgccgcgacgccgagggaatggaacaccacgttagcgaagagacgctggcgcaatttaagctgtttacccagagattacacgcagaatga

SEQ ID NO: 88982 - DNA, 126 bp, Enterobacter aerogenes
atgaacgaattcaagaggtgcttaaacgtgtttagccattcaccctttaaagtacgcttaatgctgatcggcatgctgtgcgacatgatcaacggcaaaccgcagcaggataaacctaaccactaa

SEQ ID NO: 88983 - DNA, 1578 bp, Enterobacter aerogenes
atgaatgtcactctgaaagaaacgctggccgcccgcagactggccctgaacccgtggacaggattctactttttacagtcgctgttgattaatctggcgcttgggtatgaatttagcttgctctataccgttgcgtttacctgcgtactccatctgctttggcgcacctttccgcgggtacaaaaaggggtagttggcctctattccctgctggccgcgatgtactatcccttcggccaggcttacggcgcgccaaacttcaatacgctgctggcgctgcacgccaccaacgtggaagagtcgacggaaattctcactattttcccgtggtacaactatttgctggcggtatttatcttcgccctcggcgtcattgccgtacggcgcaaaccacagccgcccgcgcgccttggcaaagtggaatatctggggctgctgtttagcatcggtatcttcttcctgcaacctgtgcagaatctggcctggggcggcgtctttaaagtcattgatagcggttatcccgccgtgcgcttcgtaaaagacgtgatcgttaataacaatgaagtgctggatgaacaggcgcggatggcgcagttggcgaacatgaaagatagctggcacgtgctggcggtgaagccgaaataccatctctatgtcgtggtgattggtgagagcgcgcgccgcgatgcgcttggcgctttcggcggccactgggacaacacgccgttcgccagttcggtcaacggctatctgtttaaaaactacgtcgccgccagcggctccacgcagaaatcgctgggcctgaccctcaatcgggtggtagacggtaaaccccagtatcaggataacttcgtcaccctcgccaaccgcgcgggcttccagacctggtggttctccaatcaagggcaaattggtgaatacgacaccgccatcgccagcatcgccaaacgcgccgatgaggtgcagttcctgaaaaatggggattttgaagccaataaaaatacgcaggatgagcagctgctgaaactgaccgagcaggtattatcagtcgagcgcagccagccgcagttgatcgtattgcatattatgggctcgcacccgcaggcctgcgatcgtaccaaaggcaagtacaccacctttgtgcagtcaaaggagacctcatgctatctctacagcgtgacgcaaaccgacgcgctgttggcgaaactctacggccagctacagaattccggcagctctttctcgctcacctatttttccgatcacggtctggcatttaaagaacgcggtaaggcggtgcagtatctcgcccatgatgacaaatatcagcagaacttccaggtaccgtttatggtgctctccagcgacgataaagcgcataagatgattaaagcccgccgctcggcgaatgatttcctcagcttcttctcgcagtggaccggcatcagcgcacaggaaattaccccacgctatcgctttatctcggaacagaaagccggaccggtgtatatcaccaatttccagttacagaaggtggactacaaccatctgggcagcgacgagtttaccgtcaactaa

SEQ ID NO: 88984 - DNA, 516 bp, Enterobacter aerogenes
atgaataaaattgcacgtctttcagcactggccgttgttctggctgcatccgtaggtactactgctttcgctgcaacttctaccgttaccggtggttacgctcagagcgacatgcagggtaaagctaacaaagcaggcggtttcaaccttaagtaccgttacgagcaagataacaacccgctgggcgttatcggttccttcacctacaccgaaaaagacaacaccagcaacggtacttacaacaaaggtcagtactacggcatcaccgctggtccggcttaccgtctgaacgactgggcgagcatctacggcgtaatcggtgttggctacggtaagttccagaacaacaacttcccgaaccacaaatccgacatgagcgactacggtttctcttacggcgctggtatgcagttcaacccgatcgaaaacgttgccctggacttctcctacgagcagtctcgcattcgtaacgttgacgtcggcacctggattgctggcgtaggttaccgcttctaa

SEQ ID NO: 88985 - DNA, 888 bp, Enterobacter aerogenes
atgcccggctcgtcccgtaaagttccggcgtggttgccgatactggttattttgatcgccatggtctccattcagagcggcgcatctctggcgaaatcgctcttcccgttgattggcgcaccgggagtcaccgctctacgcctgacgctcggcactttaattttagtcgttatttttaagccgtggcgactgcgctttgccccgcagcagcggctaccgctgttcttttacggcgtggcgctaggggcgatgaactatctcttctatttatcgcttcagcggatcccgcttggcgtcgcggtcgcgctggagttcaccgggccgctggcggtggcgctcttcggttcacgccgcccgcttgatttcgtctgggtggcgctggcggtgctcgggctgtggttcctgctgccgcttgggcaaaacgtaggggaagtggatttagtcggcgcgctgttcgcgctcggcgccggcgcattctgggcggtctatattcttaccggccagcgcgcgggtgaagaacatggcccggcgacggtggccatgggctcgctcatcgcggcggtaatttttgtgcccatcggcgtcgtccaggccagcgatacgctgctgcaatggtcgttgctgccgctggggcttggcatcgccattctctccaccgccctaccctattcgctggaaatgatcgccctgacccggatgcccacccgtaccttcggcacgctgatgagcatggagccggctctggcggcgctgtcgggaatggtgttcctcggcgagacgctaaccctgacgcaaactctggcattaggggccattatcgttgcctcaatgggttccacgctgaccatgcagcggcaaagcaaaatcgagaaagtcgatataaattaa

SEQ ID NO: 88986 - DNA, 504 bp, Enterobacter aerogenes
atgagtaccgcaaaactggttaaaactaaagcgtctaacctgctctacacccgtaacgatgtggcagacaatgagaagaaagcgactattgagctgctgaatcgccaggtgatccagttcatcgacctgtctctgatcaccaagcaggcccactggaatatgcgcggtgccaactttattgctgtccatgaaatgctggatggtttccgcactgcgctcaccgatcaccttgatacgatggctgaacgtgccgttcaactgggcggcgtcgcactgggcaccactcaggtcatcaacagcaaaagcccgctgaaaagctacccgctggatattcactccgttcaggaacacctgaaagagctggcggaccgttacgccatcgtggccaatgatgtgcgtaaagcgatcagcgaagcgaaagatgaagacaccgccgatatctttaccgcggcttcccgcgacctggataaattcctgtggttcatcgaagcgaatatcgaataa

SEQ ID NO: 88987 - DNA, 747 bp, Enterobacter aerogenes
atgaagtctgtattaaaagtgtcactggctgcactgaccctggcttttgcggtttcgtctcacgccgcagataaaaaactggtagtcgccaccgatacggcgtttgttccgtttgaatttaagcaaggtgataaatacgtcggcttcgatattgacctgtgggccgcggtcgctaaagagctgaaactggactacaccctgaaaccaatggacttcagcggcatcattcccgcgctgcagaccaaaaacatcgatctggcgctggcggggatcaccatcaccgacgagcgtaaaaaagcaatcgacttctccgacggctactacaaaagcggcctgctggtgatggtgaacgcgaaaaacaatgacattaaagatgtgaaagatctgaacggcaaagtggtcgccgtgaagagcggcaccggctccgttgattatgcgaaagccaacatcaaaaccaaagatctgcgccagttcccgaacattgataacgcttatatggaactgggcaccggccgcgctgacgcggtactgcacgacacgccaaacatcctgtacttcattaaaactgccggtcagggcaagttcaaagcggtaggcgaatcgctggaagcgcaaagctacggtatcgccttcccgaaaggcagcgacgaactgcgcgaaaaagtgaacggcgcgctgaaaacgctgcgtgaaaacggcacctacaacgaaatttacaaaaaatggttcggtactgaaccaaaataa

SEQ ID NO: 88988 - DNA, 660 bp, Enterobacter aerogenes
atgcagtttgactggagtgccatctggcccgccattcctattttgctggaaggcgccaaaatgacgctgtggatttcggtcctcggcctggttggcggccttatcatcggtctggtggccggtttcgcccgctgtttcggcggctggatagccaaccacatcgcgctggtatttattgaaatcatccgcggcacgcctattgtggtgcaggtgatgttcatttacttcgcgctgccgatggcgtttagcgacttacgcatcgacccgttcaccgccgcggtggtgaccatcatgatcaactccggggcctatatcgcggaaatcacccgcggcgcggtgctgtccatccataaaggtttccgcgaagcgggtctggcgctgggactctcccgccgcgagaccatccgccacgtgatcctgccgctggcgctgcgccgtatgctgccgccgctcggtaaccaatggattatcagtatcaaagatacgtcgctgtttatcgttatcggcgtcgccgaactgacccgccagggccaggagattattgccggtaacttccgcgcgctggaaatctggagcgccgttgccgtcatttatctgatcatcaccctggtgttgagcttcattctgcgtcgtcttgaaagaaggatgaaaatcctgtga

SEQ ID NO: 88989 - DNA, 723 bp, Enterobacter aerogenes
gtgattgaatttaaaaacgtttccaaacactttggcccgactaaagtgctgcacgatatcgatctgaagatcaacaaaggcgaagtggtcgtgatcatcgggccgtccggctccggtaaatccacgctgctgcgctgcatcaataaactggaagagatcaccagcggcgatcttatcgtcgatggcctgaaggtgaacgacccgaaagttgacgagcgcttaattcgccaggaagccggaatggtattccagcagttctatctgttcccgcacctgacggcgctggagaacgtgatgttcggcccgcagcgcgtgcgcggcgcgtcgaaagcggcggcggaaacgctggcgaaagagctgctggcgaaggtgggtcttgcggaacgcgcgcaccactatccatccgaactctccggcggccagcagcagcgcgtcgctattgcccgcgcgctggcggtgaaaccgaaaatgatgctgtttgatgagccgacttcggcacttgacccggaactgcgccatgaagtgctgaaagtcatgcaggacctggccgaagaaggcatgacgatggtcatcgtaacccacgaaatcggctttgctgaaaaagtggcatcacggctgatcttcatcgataaaggccgcatcgccgaagacggcgacccgcaggttctggtgaagaacccgccaagcccgcgtctgcgcgagtttttgcagcacgtagcctga

SEQ ID NO: 88990 - DNA, 2199 bp, Enterobacter aerogenes
atgccgtggatcctactgttgctcgctgcgctgtggatttcgccgctgtcggcggcgtcattgcccggcattccggcggcgacaaccgacaaaagcacagccagcgagcctgacctcgaacaaaaaaaagccgcctgggcggcattagctgacgtgctggataatccagactcgcggcaggagttaatcgatgagctgcgcaaagccgccgctacccagccccctgccgccgcccccacgctgaccccgccagaagtcaaagacgagcaaaccgttctggaaagcgtgacggaaattagccgccagtatagcgagcgcctgtcgtcacggttttcgcagctatggcgcaatatcaccggctcgccgcataagcctttccatgccgatgcttttcgcaatgccgctggcgacttcctgctgctggccgggctggtatttgccttctggtggttagtacgcctggcggcgctgccgctgtaccgcaaaatgggccattggggaaggcacaaaaaccgtgagcgcaataactggctccagttaccggcaaccattgctggcgcttttatcattgacctgcttttgctggcgctaacgctgtttatcggccagctgttaagcgatcgtttaaacggcggcaaccgcaccattgcttttcaacaaagcctgtttcttaacgccttcgcgctgatcgagttttttaaagccattctgcgactgattttttgtcctcgtatcgccgatttacgccccttcaatatcagcgacgaacacgcaatctactggaacttacgcctcagcgccctgagtagcctgattggttacgggctgatcgtggcggtaccgattatctccaaccaggttaacgtgcagattggcgcgctggccaacgtcatcataatgttgtgcattacggtgtgggcgttgtatctgattttccacaacaaacgcgccatcactcaggggcttatccatcttgccgaccgctcgctgccgttcttcagcttgtttattcgcgcttttgcgctggtctggcactggctggcctgcgcttactttatcgtgctgttcttcttttcgctctttgaccccggcaacagcctcaaatttatgatgggcgcgacgctgcgcagcctcgctatcgtcggcgccgcggcgctggtatccggtattttgtcacgctggatagccaaaaccatcaccctgtcgccagaaacccaacgccactacccggagctgcaaaaacggctcaacggctggatctccgcctcgctgaaagccgcgcggatccttacggtatgcgtggcggtgatgctgttgctgagcgcctggggtctatttgattttcagcaatggcttcacaatgatgccgggcagaaaacggtggatgtcctgattcgtatcgcgctgatcctgttcttctccgccgtcggctggaccctgctggcaagcctgattgagaaccgcctgtcatcggacattcatggacgcccgctgcccagcgctcgcgccagaacgctgctgacgctgtttcgcaacgcgctggcggtggtcattaccactattacgataatgatcttattgtcggaagtgggggtgaacatcgcgccgctgctggcgggcgccggggcattaggattggctatctctttcggcgcccaaacgctggtcaaagatattattaccggcatctttatccagtttgaaaacgggatgaacaccggcgatctggtgaccatcgggccattaaccggcacggtggaacggatgtcgatccgctcggtgggcgtgcgccaggataccggggcgtaccatattattccctggtcttcgataaccaccttcgccaactttgtgcgcgggatcggttcggtggtcgccaactatgatgtcgacaggcaggaggatttggataaagccaatcaggcgctgaaggcggcggtcgacgatctgatggcgcaggaggagatccgcgggctgattattggcgaaccgtcgttcgccgggctggtaggactaagcaataccgcgtttacgttacgcgtcagctttacgacgctgccgctgaagcagtgggcggtacgctttgccctcgatacccaagtgaagcagcatttcgatcgcgccggcgtgcgtgcgccggtacaaacctggcaggtattgccgccgccgggcaacgtaaccccggcggcagagacttaa

SEQ ID NO: 88991 - DNA, 915 bp, Enterobacter aerogenes
atgaaagccgaaaagccggggttgcacccgcgtaaccgtcatcaccaacgctatgatttgccagcgctgtgccagactcatcccgagctgcaaagctatatcaccctgaatccggcaggtgagcaaaccattgattttgctaatccactggcggtgaaggcgctgaataaggcgctgctggcgcacttttacgcggtaaaacactgggatattcctgacggcttcttgtgcccgccggtgccgggacgcgcggactatatccaccatctggccgacctgctggcgcaggatagcggcgagatcccgaaaaatgccaccattctcgatatcggtaccggcgcgaactgcatctatccgctgattggcgcgcatgaatacggctggcgctttaccggtagcgaagtcaacccgcaggcctttgccagcgcccaggcgattatcaacggcaacccagggctgacgcgacaaattcgtctgcgtcgtcagaaagagggccaggcaatctttaccggcatcattcataagaatgaaacctatgatgcgaccctctgcaacccgccgttccacgattccgccgccagcgcgcgtgccggtggagagcgtaaacgccgtaatctggggctgggggaagatagcgtactgaacttcggcggccagcagcaggaactgtggtgtgaaggcggcgaagtggcctttatttcgcagatgatccgcgaaagccagcagttcggccgccaggttaaatggtttacctcgctggtctcccgcggcgacaatctgccgccgctgtatcgcctgctgaccgaagtcggcgcggtgaaagtggtgaaaaaagagatggcgcaggggcagaaacagagccgctttatcgcctggagctttatggacgacgcaaagcgccgccgtccattttaa

SEQ ID NO: 88992 - DNA, 615 bp, Enterobacter aerogenes
atgtacttctatcaacctgccgaaggccacggcctgccgcacgacccgctgaatgccatcgtcgggccgcgccccatcggctggatcgcttcgctcgatagcgcagggcaacgcaatctcgccccctacagcttcttcaactgctttaactatcggccaccgatcatcggtttcgccagcggcggctggaaagacagtgtgcagaacattgttgaaacaaaagaatttgtctggaatctggctacccggccactcgccgaagcgatgaatgaaacttccgccactattccacgtcatgaagatgaattcctgcgcgccggattgaccgccgcgccgagccggatcgtccgcgccccgcgcgtggcggaaagcccggtcaacttcgaatgtcgcctgtcgcagtgtattcagttaacgcgcgccagcggtgaagccatcgatagctggctggtgctcggtgaagtggtcgccgtgcatatcgatgagtcgctgctggaagacgggatttatcaaaccgcgaaagcgcagccgattttacgcgccggcgggccgacggcctactacagcattgatgaaagccagcgcttcgatatgatccgcccggacgctcgttaa

SEQ ID NO: 88993 - DNA, 264 bp, Enterobacter aerogenes
atgagaacctttctgctcgcccccgcttttatcgcccttgctcttctctcctcacccacacaggccaacaaccccgagaccgctgccgtggccgttggcccgctgcgcccgtccggctcagtttccgcctccggcgccagcaccctcgacgatttacaggcgcaactggcgcaaaaagcccaccagcagggggcgattgcctggcgaataaacgccgctggcggcggcaacaaattagccggcagcgcgataatttataaataa

SEQ ID NO: 88994 - DNA, 267 bp, Enterobacter aerogenes
atggcatcaggttgggcaaacgatggggccgtccaggatcaaattgacagcacggtaaacgatgccgtcgcccgcgcccgcagcgagctcccaggcggcgagagcaacaaattttgtgaagaatgcggagagcccattccggaagcgcggcgtaaggcgctcgccggggtcagatactgcgtgaagtgccagcaggataaagatttacacaacaatacatattcaggatataatcgtcgtggctccaaagacagccagctacgctga

SEQ ID NO: 88995 - DNA, 261 bp, Enterobacter aerogenes
atgaaaaacatcaaatacgctgccgctgctatcgccctttccgctctgtctttcggcgcattcgccgctcagccggtaaccccagcccaggcagaaagcatgaataaaatcggcgttgtttccgctgaaggcgcaacaacactggatggtctggaagccaaactggctgctaaagccgatgccgctggcgcaaccggctacagcatcacctccgctaacaccaacaacaaagttagcggtaccgcggttatctacaaataa

SEQ ID NO: 88996 - DNA, 969 bp, Enterobacter aerogenes
atggattacaccaaaattatcaaagaagtcgggcgcggaaaaaatcacgctcgcgacctggatttagtcacggcccgtgcgctgtatacgcggatgttaaacggtgaagtggacgatctggaactgggcgctattctcattgcgctgcgcatcaagggcgaaggcgaagccgaaatgcagggcttttatgaggcgatgcagctacagaccatccgcctgacgccgccggtagcgaaaccgatgccgattgttatccccagctataacggcgcgcgcaaacaggccaacctgacgccgctgctggcggtactgctgcataaactcggtttcccggtggtggttcatggcgtcagtcatgatccaacccgcgtcctgaccgagaccatttttgcgctgatggggatcccggccaccacccacgcgggtcaggcccaggcgcgtctcgacagccatgagccggtctatatcccggtcggggcgctgtgcccgccgctggaaaagcagctggcattgcgttggcggatgggggtgcgcaacagcgcgcatacgctggccaagctggcgactccgttcgctgaagatgccgcgctgcggctgtcgagcgtgtcgcatccggaatatgtcggcaaggtcgcggcgttctttacgcagatcggtggccgggcgctgctgatgcacggtaccgaaggtgaagtctatgccaacccgcagcgctgcccgcaaattaacctgattgatgcggcgggaaccagagtgttgcatgagcgggccgacgagagtgtgcaggaaaaagtggcattgccggaatccaaagatcctgaaattaccgcgcgctggattgagcgctgcgtgagcggtagcgagccggttccgcagtcgctgaaaattcagcttgcctgctgcctggtcgccaccggccaggcgacttcgctcgcttatggcctggcgcaggttgccgaacgctggtga

SEQ ID NO: 88997 - DNA, 2145 bp, Enterobacter aerogenes
atggctttgaccgctgcgcttaaagcgcaaatcgccgcctggtataaggcgcttcaggaacagatcccggactttatcccccgagctccgcagcggcagatgatcgccgatgtggcgaaaacgctcgccggggaagaggggcggcatctggctatcgaagcgccgaccggcgtcggcaaaacgctgtcatatctgatccccggcatcgccattgcccgtgaggaacaaaaaacgctggtggtcagtaccgccaacgtcgcgctgcaggatcaaatctacagtaaagacctgccgctgctgcgcaagattattcccgacctgcgctttaccgccgcctttggccgtggccgctacgtttgtccgcgtaatctggcggcgctggccagtaccgaggcgacgcagcaggatctgctggcgttcctcgatgacgatctgacgccaaaaaaccaggccgaacaaaagctctgcgcgacgctgaaaaccgatctcgacggctataaatgggatggactgcgcgatcataccgacaagcccattgatgacgccctgtgggggcggctgagcaccgataaagccagctgtcttaaccgcaactgccactactaccgcgaatgcccattcttcgtcgcccggcgcgaaatccaggaagcggaagtggtggtggccaaccatgcgttggtgatggcggccatggagagcgaagcggtgctgccagagccgaaaaacctgctgctggtgctcgacgaaggccaccatctgccggacgtcgcccgcgacgccttagagatgagcgcggagataaccgcgccatggtaccggctgcagttggatctgttcagcaaattggtggcgacctgcatggagcaattccgtccgaagaccacgccgccgttggccaatccggaacggttaaatgaacactgcgaagagctgtatgagcttatcgcctcgctcaataatattctcaatctctatatgcctgccgcccaggaggcggagcatcgcttcccgatgggcgaactgccgcaggaagtgatggagatttgccagcggctggccaagctcaccgaaatgctacgcgggctggcggagctgtttctcaacgatctcagcgaaaagaccggcagccacgacgtggtgcgcctgcatcgtatcctgctgcagatgaaccgggcccttggcatgttcgaaagtcagaacaagctgtggcggctggcctcaatggcgcagtcttccggtgcgccggtgaccaagtgggccacccgcgagattcgcgatggccagatccatgtctggttccactgcgtggggatccgcgtcagcgatcagctcgaacgtctgctgtggcgcagcgtgccgcatattgtcgtcacctcggcgacgctgcgttcgttgaatagcttctcgcgcctgcaggagatgagcggtctgaaagagaaagcgggcgatcgtttcgtggcgctggactcgccgttcaatcacgtcgagcagggaaaaatcattattccgcaaatgcgctatgagccgcttattgataacgaagagcagcacatcgccgaaatggcggcttttttccgtgagcaggtcgagagcaaaaagcatcttggtatgctggtgctgttcgccagcgggcgggccatgaatcgctttctggaacatgttaccgatctgcgcctgatgctgctggtgcagggcgaccagccgcgctatcgactggtcgagctgcatcgtaaacgcgttgaaggcggcgagcgcagcgtgttagttggcttgcaatcttttgccgaagggctggatttaaaaggcgaactgttaagccaggtgcatatccataaaatcgccttcccgccgatcgacagcccggtagtgatcaccgaaggcgagtggttgaaaagcctcaaccgctatccctttgaggtgcaaagcctgccgagcgcctcattcaacctgattcaacaggtcgggcgcctgatccgtagccatcagtgctggggcgaagtcattatttacgataagcgcctgctgactaaaaattacggcgcgcgattgttaaatgcgttaccggtatttcctatagagcagccgggcgttcccgaggttatagtaaaaagcaaagcaaaacagacgcgtcgccgacgccgctaa

SEQ ID NO: 88998 - DNA, 1341 bp, Enterobacter aerogenes
atgtcttttgattcccttggcctgaatcccgatatcctgcgcgccgtcgccgagcagggctacgttgagccgacccccatccagcagcaggcgatcccggcagtactgcagggccgcgatctgatggccagcgcccagaccgggaccggcaagaccgccggctttacgctgccgctgctgcagcgcctgacccaggatcagccgcacgcgaaggggcgccgtccggtgcgcgccctgatcctgacgccgacccgcgaactggcggcgcaggtgggtgagaatgtccgcgactacagcaaatatctcaatatccgctcgctggtggtcttcggcggcgtgagcatcaacccgcagatgatgaagctgcgcggcggcgtcgatatcctcgtcgccaccccaggccgtctgctggatcttgaacatcagaatgcggtcagcctggataaagtcgaagtgctggtactggatgaagccgatcgcatgctggacatgggctttatccacgacatccgccgcgtgctggctaaactgccgccgcgtcgtcaaaacctgctgttctccgccaccttctctgatgagatcaaggcgctggcggaaaaactgctgcataacccgctggaagtcgaagtggcgcgccgcaacaccgcctctgagcagatcacccagcacgttcactttgtggataagaaacgtaagcgtgaactgctctcgcagctgattggcgaaggcaattggcagcaggtgctggtctttacccgtaccaagcacggtgccaaccatctggcggagcaactgaataaagacggtatccgtagcgccgccatccacggcaataagagccagggtgcgcgtacccgcgcgctggctgactttaaatccggcggcattcgtgtgctggtcgccaccgacatcgccgcgcgcgggctcgacatcgaagagctgccacacgtggtcaactatgagctgccgaacgtgccggaagattacgtgcaccggattggccgtaccggacgcgcggcggcgactggcgaagcgttgtcgctggtctgcgtggacgagcataagctgctgcgtgatattgaacgcctgctgaaaaaagagatcccgcgtattgctgttgccggttacgagccggatccgtcgattaaagcggagccgattcaaaacggtcgtcagcagcgtggcggcggtggccgtggtcaggggcaaggacgcggcggtcagagccagggccgtagccagcaggcgccgcgccgtcaggatggcgaagcgccgaaagcgcgtacccaggacggtaaaccaccgcgtcgccgtcgcccgcgtaaacctgccggcgaataa

SEQ ID NO: 88999 - DNA, 678 bp, Enterobacter aerogenes
atgaacagtacctccgtgaccagtaaaggcgaacaagccaaaagccagcttatcgccgccgccatcgcgcaattcggcgaatatggcctccatgcgacgacccgcgatatcgccgcgcaggccgggcagaatatcgccgctatcacctattatttcggttcgaaagacgacctgtatctcgcctgcgcacagtggatcgccgactgtatcggcgagaatttccgcccgcatgccgaggcggccgaagccctgctcgcccagacgaaacctgacaaaccggcgctgcgggaattgatcctgcgcagctgccgcgatatgagtctgctgctgacccaggacgacacggtcaacctcagcaagtttatctctcgcgagcagctctcccctaccgcggcttaccagcttatccaccagcaggttatcgccccgctacatagctatttgacccggcttatcgccgcctggaccgggcgcgatgccaacgatacgcagatgattctgcacacccacgccctgcttggcgaggtgctggccttccggctcgggcgggaaaccattttactgcgtaccggctgggcgcagttcgatcaacaaaaggctgaacaaatttttcaggtgatcacctgtcatatcgatttcattctgcaagggttagcgcaaaggagcctgggatcatga

SEQ ID NO: 89000 - DNA, 993 bp, Enterobacter aerogenes
atgaaaaaacccgtcgtcgttctattggtcgtcatcgtgctcgccgcgctcggcggcggctggtggtggtatcaaagcagccaggcaaaagatctcactctctacggcaatgtcgatattcgcactgtgaatatgagcttccgcgtcggcgggcggctggcaaccctgaacgtcgatgaaggcgatgaaattcgccgtgggcaaaccctcggcgaacttgaccgcgcgccatatgaaaacgcgctgcagcaggcgcaggccaacgtctccaccgcccaggcgcagtacgatttgatgatggcgggttaccgtgccgaagagattgcgcaggcggcggccgcggttaatcaggcgcaggccgcctgggtctatgcgcagaatttttatcaacgtcagctcggcctgcgcgccagcagcgcgatttccgccaacgacctcgaaaacgcccgttcttcacgcgatcaggcgcaggcgaccttaaaatcggcgcaggataaactgcgtcaatatcgcgccggtaaccgcccgcaggaaattgcccaggccaaagccagccttgaacaggcgcaggcggccctggcgcaagccaaactggacctgcatgataccgtactgaccgcgccgtccgacggcaccttgatgacccgcgccgtcgaacctggcaccatgttaaacgccggcggcacggtgctgacgctatcgttaacccatccggtttgggtacgcgcctacgttgacgagaaaaatctcggccaggcgcagccggggcgcgaagtactgctgtataccgatagccggccgaacaagccctatcacggtaaaatcggctttgtctcccccagcgccgaattcacgccaaagaccgtagaaacaccggatttgcgcaccgatctcgtctaccgcctgcgcatcgtggtgaacgacgccgacgccgcgctgcgccagggcatgccggtgaccgtctccttcagcaacggaaacgggcatgagtaa

SEQ ID NO: 89001 - DNA, 1740 bp, Enterobacter aerogenes
atgagtaaggacgcgataactttaaccggactgacacgcggttttcccggtatggaccgacccgcagtcgcgccgctgaactgtacgattcactcaggctacgtcacagggctcgtcggcccagatggcgcaggtaaaacgacgctgatgcgaatgctggccggtttacttaagcctgatgagggcagcgccagcgtaatcggcttcgatccgctgaagggcgacggcgcgctgcacgcggcgctcggctatatgccgcagaaattcggcctgtatgaagatctgacggtgatggaaaacctgaacctgtacgccgatctgcgcagcgtcaccggcgaggcgcgcaagaaaatattcgagcgcctgctggaattcacatctcttggccctttcaccgggcgattagccggcaaactctccggcggcatgaaacaaaagctggggctcgcctgtacattggtaggcgatcctaaagtgctgctgttagatgagcccggcgtcggggtcgaccctatctcgcgccgcgagctgtggcagatggtgcacgaactggccggcgacggcatgctaattttgtggagcacctcttatctcgatgaagccgagcagtgccgcgatgtgctgctgatgaacgaaggtaaattgctttaccagggcgaaccgaaggcgctgacgcaaaccatggccgggcgcagctttctggtctccagcccgcaggaaaacaaccgccgcctgttgcagcgggcgctgaaactgccgcaaattagcgatggcgtgattcagggcaaatcggtgcgtttgatcctgaaaaaggcagcccgcattgatgaggttcagcaaaacggcaacatgccgccgctacaggtggccgaaactgcgccgcgttttgaagacgcctttatcgacctgttaggcggcgccggaaccgccgagtcgccgttaggagagattattcatcacgtggacggcaacaaagacgaaacggtcattgaagcacggtcgttaacgaaaaagtttggtgatttcgccgccaccgatcacgtcgatttccaggttaagcgcggtgagattttcggcctgcttggccctaacggcgccggtaaatccacgaccttcaaaatgatgtgcggcctgctggtgccgaccgacggaaaagcgctggtgctggggatggacctcaaggttagctccggtaaagcacgtcaacatttaggctatatggcgcaaaaattctcgctgtacggcaacctcagcgtcgaacagaacctgcgttttttctccggcgtttacggcctacgcggccgggcgcaaaatgaaaaaatcgcgcgcatgagcgatgcctttggcctgaaaagtatcgccggccacgccgccgacgagctaccgctcggctacaagcagcggctggcgctggcctgctcgctgatgcatgaacccgacattctgtttctcgatgaacccacctccggcgtcgaccctctaacccgccgcgagttctggctgcatatcaacagcatggtcgataaaggggtcacggtgatggtgactacccactttatggatgaggcggaatactgcgaccgcatcgggctggtctaccacggtaagcttatcgccagcggcacgccggacgcgctgaaggcgcaggcggcgaatgacagtcaggcggatcccactatggaacaggcgtttattaccctgattaaccaatgggacaaggaaaacggtcatgagcaatag

SEQ ID NO: 89002 - DNA, 1134 bp, Enterobacter aerogenes
atgagcaatagcattctttcctggcgacgggttcgcgcgctgtgcgtcaaagagacccgacagatcgtccgcgatcccagcagttggctaattgcggtggtgatccccctgctcctgctgtttatcttcggctacggcataaacctcgactccagcaaactgcgggtcggcgtattgctggaacagcagagcgaagaggcactggatttcgtccataccatgaccggctcaccctatatcgacgccaccgtcagcgataatcgccagcagttgattgagctgatgcaggccgggcgcatccgcgcgatggtcgtcattcccgtcgactttgaccgtcagatggcccgcgccggcgccaatgcgccgattcagttaattaccgacggtagcgaaccgaataccgctaacttcgcgcagggctacgtcgaaggtatctggcagatctggcaacagcagcgggcggaagaccgcggtgagacctttgaaccgcttatcgatgtgcagatgcgctactggtttaacccggcggccatcagccagcactttattatccccggcgcaattaccatcatcatgaccgtggtcggcgcgatattgacctcgctggtggtagcgcgcgaatgggaacgcggcaccatggaagcgctgctatccactgaaatcacccgcgccgaactgctgctgtgcaagataattccctactatttcctcggcatgctggcgatgttgctgtgtatgctggtatcgatatttattctcggcgtgccctatcgcggctcgctgctgattctgtttgtcatcaccagcctgtttttgcttagtacgctgggaatggggttactgatctcgaccattacccgcaaccagtttaacgctgcgcaggtcgcgttgaacgccgcttttttaccatcgattatgttgtccgggtttattttccagatagacagtatgccggcggtgatccgcgcggtgacctacgtgatcccggcgcgttatttcgtcaacaccctgcaaagcctgtttctggcgggcaatattccggtggtgctgctggtgaacgtgctgtttttgattgcttcggcggtgatgtttatcggcctgacgtggctgaaaaccaaacggcgtctggattaa

SEQ ID NO: 89003 - DNA, 1107 bp, Enterobacter aerogenes
atgtttcatcgtttatggacattaatccgcaaagagctgcagtcgctgctgcgcgaaccgcaaacgcggatgattttaatcatgccggtgctgattcaggtattgttgtttccctttgccgccacgcttgaggtgaccaacgctaccatcgctatctataacgaagatagcggccgccacgcggtggagctcacccagcgctttgcccgcgccaaagcctttacccacgtcctgctgctgaaaagcccgcaggcgattcaaccgaccatcgatgaacaaaaagccctgctcgtggtgcgcttcccggcggatttctcgcgtaatctcgacaactatcaaaccgccccgctacagctactgctcgacgggcgtaactccaacagcgcgcaaatcgccgctaactatctacagcagattgttaaaaactatcagcaggatctgctgcaggataaagcgaaaccgaacaacagcgaactggtggtacgcaactggtacaacccgaatctcgactataaatggttcgtggtgccgtcgcttatcgccatgatcaccaccatcggggtgatgatcgtcacctcgctgtcggtggctcgcgagcgtgaacagggtaccctcgatcagctgctggtctcaccgctcgccacctggcaaatcttcgttggcaaagccgttccggcgctgatagtcgccacgatgcaggcgactatcgtgctggcgataggtatctgggcttatcagatcccgtttgccggctcgctgctgctgttctatttcaccatgctgatttacggtctatcgctggtgggctttggcttattgatttcttcgctgtgttcaacccagcagcaggcatttatcggcgtgttcgtctttatgatgccggcgattctgctatccggctacgtttcaccggtagaaaacatgccgcagtggctgcaggatttgacctggataaacccgatccggcactttaccgatatcaccaagcaaatttatctgaaaaatgcgagtctgaagattgtgtggggaagtttgtggccgctattagtcatagcggccaccaccggctcagcggcgtatgcgatgttccgaagaaagattgcgtag

SEQ ID NO: 89004 - DNA, 411 bp, Enterobacter aerogenes
atgaagtggcaacaacgtgtacgcgtcgcaacgggtcttagttgctggcagattatgttgcatctactggtcgtggcggtactggtgatgggttggctgagcggcgcgctggtgcgtgtcggattagggctgtgcgtattgtacggcgtcacgctgctggcgatgctgtttttgcagcgtcaccatgaagcgcgctggcgcgacgtgggggacttccttgaggaactcaccacgacctggtacttcggcgccgccatgatagtgctctggttgttgtcgcgcgtgctgcacaacaacctgctgctggccctcgccgggctggtcatactggcaggcccggcggtggtatcgctgctggcgaaagataaaaagctacgcaatctttcttcggaacatcgcatacgccgctga

SEQ ID NO: 89005 - DNA, 762 bp, Enterobacter aerogenes
atggctaagccaacgtcgcgaatttcggtgaacgtgctgacaattaacacccacaagggctttacgacgtttaatcggcgttttattttgcccgaattgcgcgaggccgttcgcagcgtcagcgccgacatagtttgcctacaggaagtgatgggtgcgcacgaagtgcaccctttgcatatcgaaaactggcctgataccacccattacgagtttcttgccgacaccatgtggagcgattacgcctacgggcgcaacgcggtctatccggaaggccatcacggcaatgccgtactgtcgcgctttcccattgaatactatgaaaatcgcgatatctcggtcggcaatggcgaaaaacgcggcctgctttactgtcgcatcgtacctccgcacagcggcgtgacgatccacgttatctgcgtgcatctcggtcttcgcgcgcaccagcggcaggcacagttaacgatgctggcagagtgggtcaatacgctaccggcaggcgatccggtggtggtggcaggcgacttcaacgactggcgccagcaggctaatcagcccttaaaagcgcaggcagggcttgaggagatttttacccgcgtccgcgggcggccgctacgcacctttccggtcgctttcccgctgctgcgcctcgatcgtatttacgttaagaatgcacatgccagccatccgaaggcgctggcgcttaaacactggcggcatctgtccgatcatgcgcccctgagcgtggagatacatctgtga

SEQ ID NO: 89006 - DNA, 1245 bp, Enterobacter aerogenes
gtgaaatgtcgctggcaggaaggcaatcgtattaccctactggagaatggcgaccagtattatccggcgttattcgccgccattggccgcgcgcagcgcaaggtgatccttgaatcctttatctggtttgaagacgaggtgggctggcgactgcatgcggtgctactgaaagccgcccgccggggtattcaggtggaagtgctgctcgacggctacggctcgccggacctcagcgatgagtttgtcggcgaactcaccgccgctggcgtggtcttccgctactacgatccgcgcccccggctaatgggtatgcgtaccaatttattccgccgcatgcatcgaaaaatcgtggtgattgacgacacaaccgcgtttgttggcggcattaactactctgccgagcacatgagcgattacggaccggaggcgaaacaggattatgccgtacaggttgaagggccggtggtgctcgatattctccaattcgaactggagaacctgcccaccagcgaggcagcccgccgctggtggcgacgccgtcggcatcagccggaaattaaccaaacccctggcgaagcgcaggcgctgtttatctggcgcgataaccatgaacatcgtgacgatattgaacgtcactatctgaaaatgctgaccagcgcccgccgcgaggtcatcatcgccaacgcctatttctttcccggctaccgtctgctgcacgcgatgcgcaatgccgcgcggcgcggcgtacgggtgaagctgattgtccagggcgagccggatattccgattgttaagtttggcgcccacctgctgtaccactacctgattaaaggcggcgttcaggtgtatgaataccgccgccgtccgctgcatggcaaggttgcgctggcggacgaccactgggccaccgtcggttcaagtaatctcgacccgctgagtctgtcgctgaatctggaggccaacctgattatccacgaccgagagttcaatcagaccctgcgtgataacctcaacggccttatcgccagggactgccagcagatagataaatccatgctgccaaaacgtaactggtggcggctcggcgtcagcgtgctggctttccactttctgcgccacttccccgcctgggtcggttggctgccggcgcataccccgcagttagccagggtcagcccgccggtgcagccggaaattgaaacccaggatcgggtagaaacgcaaaccagagacaatccgctatga

SEQ ID NO: 89007 - DNA, 966 bp, Enterobacter aerogenes
atgagcaaatcgcatccccgctggcggatggcgaaaagagtgctgaccgcgctcttttttatcgccgtcatcgtattgctggtaatttatgcgcaaaaggtcgactggcaggatgtatggaaggtcatccgcggctacgatcgtctggcgctatttagcgccgttgggttggttatcgtcagctacctgatttatggctgctacgatctgctcgggcgagcctggtgcggccacaagctggcaaaaaaacaggtgatgctggtgtcgtttatctgctacgcctttaacctgacgctcagcacctgggtcggcgggatcgggatgcgctatcggttgtactcgcggctggggctgaacggcggcactattacccgtattttctcgcttagcattaccaccaactggttgggctatattctactgggcggcgtcattttcaccgcgaatctggtgacgttgccgccgcactggtacatcagtcaaaccacgttgcgtattattggcggcgttctgctgcttttaaccctgatctatcttttcggttgcgccttcgccaaacgccgccacatgacgattaagggacagcggttggtgctgccctcttttcgtttcgctctactacagatagggatttcagcggcgaactggatggtgatgggggcgattatctggctgctactgggcagcgagattaactattttctggtgctgggagtgctgctggtgagcagtatcgccggcgttatcgttcatattcccgccgggattggcgtgctggaggcggtgtttatcgccatgctctccggcgagtcgatttcgaagggggcgataattgccgctctgctggcgtggcgcgcgctgtactattttctgccgctgctgctggcgaccatcgcctatctggtgctggagagtcgggcgaaaaagctgcggcagaaaaacgagcgcaagctggcccgcggatga

SEQ ID NO: 89008 - DNA, 705 bp, Enterobacter aerogenes
atggacagattccctcgttccgattccattgttcagagccgcagcggcctgcagacctacatggcgcaggtttacggctggatgacggtcgggttgttgttaaccgcgtttatcgcgtggtttgcggcgaataccccggcggtcatgatgttcgtcttttcaagcaaaatcactttcttcgggctgatcatcgcccaactggcgctggtgtttgtgctctcggggatggtgcagcgcttaagcgcgggtatggcgacgacgctgtttatgctttattcggcgttaacagggctaacgttagcgagcatctttattgtttatacctattcgtctatcgccagcacttttgtggtgaccggcgggatgttcggggcgatgagcctgtatggttacaccactaagcgcgatctgagcggcttcggcagcatgctgtttatggggctgattggtatcgtgctggcgtcgctggttaacctgtggctgaagagcgaagcgctgatgtgggcggtaacctacattggtgtgctggtgtttgttggcctgaccgcctacgacacccagaagctgaaaaacatcggcgagcagattgatacccgcgatagcgccacgctgcgtaaatactcgattctcggagccttaacgctgtatctggacttcatcaacctgttcctgatgctgctgcgtatcttcggcaaccgccgttaa

SEQ ID NO: 89009 - DNA, 453 bp, Enterobacter aerogenes
atgacgcagactcgtatcgtggtaagcccggcgcgcttttgcgtcggcgatgagtatccgtggctggccgagcgcgatgaagacggcgcggtggtcaccttcaccggcaaagtacgtaatcacaatctcggcgacagcgtgaaagcgctgaccctggagcactatccgggcatgaccgaaaaatcgctggcggaaatcgttgaacaggcgcgggaacgttggccgcttggccgggtgacggttatccatcgcattggcgaaatgtggccgggcgaagagattgtttttgttggcgtgaccagcgcccaccgcggcagcgccttcgccgccggcgagttcatcatggattacctgaaaacccgcgcgccgttctggaaacgcgaggcgacgccggaaggcgaacgctgggtcgatgcgcgcgacagcgatcatcaggcggcagagcgctggtag

SEQ ID NO: 89010 - DNA, 249 bp, Enterobacter aerogenes
atgattaacgtcctgttttttgcccaggtgcgcgaactggttggcaccgataccctgactctcgacgccagcgaattgccgaccgttgaagccgtgcgtcagcagcttgccgcgcgcggggaccgctgggcgctggcgctggaagaaggaaaattgctggcggcggtcaaccagacgctgacctcgtttgaccatccggtcgcgagcggcgacgaagtggcgtttttcccgccggtcaccgggggctaa

SEQ ID NO: 89011 - DNA, 489 bp, Enterobacter aerogenes
atgtcacaactgacccacattaacgccgcgggcgaagcccacatggttgacgtctccggcaaagcggaaacggtacgcgaggcgcgcgctgaggcttacgtcgaaatgcaggccgcaacgcttgcgatgattatcgacggcagccaccataaaggcgatgtgttcgccaccgcgcgtatcgccgggattcaggccgcgaaacgtacctgggagctgatcccgctgtgtcatccgctgatgctcagcaaagtagaagtgaacctgcaggcgcagccggagcataaccgcgtgcgcattgagtcactctgccgcctgaccggtaaaaccggcgtagaaatggaagcgctgaccgcggcctcggttgccgcgctgaccatctacgacatgtgtaaagcggtacagaaagatatggtcattggcccggtacgtctgctggcgaaaagcggcggcaagtccggcgattttaaggtggaggaagcccatgattaa

SEQ ID NO: 89012 - DNA, 513 bp, Enterobacter aerogenes
atgagccaggctaacgctgagtttatcccgacccgtattgctattcttaccgtttccaaccgccgcggcgaagaggacgatacctccggccactggctgcgcgatgcgctgcacgaagcgggacataccctcgtcgataaggctattgtgaaagagaaccgctacgcgattcgcgcccaggtttcggcgtggattgccagcgatgaggtgcaggtggtgttgatcaccggtggtaccggttttaccgatggcgatcaggcgccggaagcgctgctgccgctgtttgaccgcgaggtcgaaggttttggcgaagtgttccgtatgctctcgtttgaagagataggcacctcgacgctgcagtcccgcgccgttgctggcgttgccaaccgcacgctgattttcgcgatgccgggctcgaccaaggcctgcgccaccgcgtgggaaaatattatcgcgccacagctggatgcgcgcactcgcccgtgcaacttcattcctcatttaaagaaatag

SEQ ID NO: 89013 - DNA, 1023 bp, Enterobacter aerogenes
atgaccgcgcctcccgtacttggaaaggtgtatatggcctcacagcttactgatgcatttgcgcgtaagttttattacttgcgcctgtcgattaccgacgtgtgtaactttcgttgcacctactgcctgccggacggctacaagcccggcgccgtgaccaacaagggttttcttagcgtagacgaagtgcgccgcgtgacgcgcgctttttccgcccttggcacggaaaaagtccgcctcaccggcggcgaaccctcgttacgtcgcgactttaccgagattattgccgccgtgcgtgaaaacagcgcgattcgtcagatcgcggtgaccaccaacggttatcgcctggcgcgcgatgttgaacgctggcgcgatgccgggctgacggcgattaacgtcagcgtcgatagcctcgacgctcgccagttccatgccatcaccggtcaggataaatttcagcaggtgatggacggtattgacgccgcctttgccgccggctttgaaaaggttaaggtcaacaccgtgctgatgcgtgatgtcaaccatcaccagctcgacactttcctcgcgtggatcaaacctcgccgtattcaactgcgttttattgagttaatggaaaccggcgagggcagcgacctgttccgccgtcaccacatttccggtatggtgctgcgcgatgaactgctgcgccgcggttggatccaccagatccgtcaacgaagcgatggcccggcacaggtcttttgtcacccggattacgccggtgaaatcggcttgatcatgccgtatgaaaaagacttctgcgccacctgtaaccgtcttcgcgtctcatccgttggcaaactgcacctgtgtctgttcggcgaaggcggcgtagatctgcgcgacctgatggccgaggacgagcagcaggccgagctggaagcgcggatagccgaagccttaacccataaaaagcagacccatttcctgcatcagggcaacaccggtattacgcagaacctgtcgtatattggcggataa

SEQ ID NO: 89014 - DNA, 906 bp, Enterobacter aerogenes
atgcgcaatcgcactttcgccgatctggaccgcgtcgtcgcccttggcggaggtcacggtttggggcgggtgatgtcgtcgctctcgtcgctcggctcacgcctgaccggcatcgtgaccaccaccgataacggcggatcaacggggcgaattcgccgctcggaaggggggatcgcctggggcgatatgcgcaactgcattaatcaattaatcgccgaacccagcgtcgcttccgcgatgtttgaatatcgttttggcggtaatggcgagctttccgggcataacctcggaaatctgatgttaaaggcgctggatcacctgagtgtgcggcctttagaggcgatcaatttgatcagaaacctgcttaaagtggatgctttcctgattccgatgtcggagcaaccggtcgatctggtggcgctcgatcatgaaggccatgaagtgtatggcgaagtgaatatcgatcagctggatcacatcccgcaggaactgatgctcagcccaccggttccggcgactcgcgaagcggttgaggccatcgccgaggccgatctgatcctgattgggccagggagcttctacactagcctgctgcccattttactgctcgacgaaatggcccaggcgctgcggcggaccccggcgcccatggtgtttatcgataacctgggtaaggaacatagccctgccgccaatctaacgctggcggacagaatgactattctggaacattacgtcggcaaaaaagtgattgatgccgccatcgtcgggccgaaagccgatgttaagggtatggaagaacgactggtgattcagaccgcgctggacgccagcgatgtcacctatcgtcatgaccgcgtgctgctacgccaggcgctggagcaggctattcaggcattaggttaa

SEQ ID NO: 89015 - DNA, 1644 bp, Enterobacter aerogenes
atgtcgtttatttctttacgtcggccggtactcagccgcacggcttatttgactctctttgcctgttatatcggtatctttcttaacctggccttttatcgccaggttttcccgctactgccggtaaacaatctccataactggctggttttccttagcatgccgatcgtggcaattagcgtgatgaacatcatcaccaccctcgcctcgttcttaaagctcgaccgggtagtcatcagcctgtttattctgctgagcgcctcggcgcagtactttatctggaccttcggcgtggtgatcgaccgttcgatgatcgccaatatcttcgatacgacacctgcggaaagttttgccctgctgtcgacgcaaatggtcatcgtgctgggtctctccgggctattgatggttctggtcgcctggtggattaaagttcgcagaccggcctctttctggcgcggtgcgacgatgcgcctgctcaatatcgccgtttcagcgctgctcattgtgctggtggcggcgctgttctacaaagattacgcctcggtattccgtaacaataaggagctggtgaaatcattgagtccatccaacagcattgtggcgctgaactcgtggtatgcgcataaccggatggataacctgccgctggtgaagatcggcgaagatgccaaacagaaagcggtgatgcataacggcgcgcgtaaaaatctgaccatcgtggtgctgggcgaaacctcgcgcgccgagaatttctcgctgggcggctacgatcgcgaaactaacccgcgcctgaaacaggacgacgtggtgtacttcccgaaaaccacctcctgcggcaccgcaaccgcggtttccgtcccctgcatgttctccaatatgccgcgcgcgcattacgatgaagaactggcgcaccatcaggaaggcgttctggatattttgcagcgcgccggtattcaggtgctatggaacgacaacgatggcggctgtaaaggcgcctgtgaccgcgtaccgcaccaaaacgtcaccaacctgaacctcagcggcgagtgcattgatggcgagtgctacgatgacgtgctgttccataatcttgatagctatatcgataatttacagcaggatggcattatcgttctgcacaccattggtagtcatggcccgacctattacaatcgctacccggctgaattcaaaaaattcaccccgacctgcgataccaatgaaatccaaagttgtacgcaacaacagttgaccaatacctacgacaacaccattttgtacgtcgactatgtggttgataaagcgataaaattgctgcaatcaaaacaagatagattcaccaccagtctggtgtatttgtctgaccacggcgaatcgctgggtgaagatggcgtgtatctgcatggcctgccgtactccatagcgccggatacgcaaaaacacgtgccgatgctgctgtggttgtcgccggattatcagcaacgctatggcgtatccagccagtgtttgcaacagcaggcgaagacgaacgattattcacaagataatctgttctctaccctgcttggcctgctcggggtagacacccgcgagtatcaggcaaaagacgaccttttaacgccatgtagagagaccggcagatga

SEQ ID NO: 89016 - DNA, 672 bp, Enterobacter aerogenes
atgaaaatcttagtcattgaagacgatgcgctcctgttacaagggttaattctggccatgcaaagcgaaggctatgtctgcgatggcgtcgccaccgcgcatgaagccgcgctgtcgttagccagcaaccattacagtctggtggtgctcgacctgggcctgccggatgaagacggtctgcatttcctggcgcgtatgcgccgggagaaattcacccaaccggtgttaatcctcaccgcccgcgataccgtgggcgaccgcatcagcgggctggataccggcgctgacgattacctggtgaaacctttcgcgcttgaagagctcaacgcccgcattcgcgcgctgctgcgtcgccataataatcagggcgataatgagctgaccgtcggcaacctgcgccttaatgttacccgtcgtcaggtgtggctggccggcgaatcgctggagctgacgccaaaagagtatgctctgctctcgcgcctgatgatgaaggccggcagcccggtacatcgcgaaattctctacaatgatatctacagctgggataacgaaccggccaccaataccctcgaagtgcatatccataatctgcgcgacaagattggtaaagcgcggatccgcaccgtccgcggctttggctacatgctggtgaataatacggagtcagaataa

SEQ ID NO: 89017 - DNA, 1098 bp, Enterobacter aerogenes
atggcactgtttgcgaccgaaacctggaccatgcgccaccgtctgctgctgaccatcggcgcgattctggtggtctgccagctgattagcgtattttggctatggcatgagagcaaagagcaaatccagctgctggttgccagcgccattgagggtcataacaatcaaaggcacgtcgaacatgaggtacgcgaagcggtcgccagcctgctggtgccaagcctgctgatcatcggtctggcgctatatatcagcctggtggcggtgaagaaaatcacccgtccgctatccaatctgcagagcgagctggaaagccggacgccggataatctgcaacccattattttgcaggagtcggtgccggaagtgaccgcagtgaccatggcgattaatcaactggtgtcgcggctgaccctgacgctcgaacgcgagcgtctgtttaccgccgacgtcgcccacgaactgcgtacccctcttgccgggctgcgcttgcatctggaactgctggcgaaggtacacggcgtcagcgttgatcccttaattcaacgtctcgatcagatgaccaacagcatttcgcagctgctacaactggcgcgcgtcgggcagtcgttttccgccgggagttaccagcaggtgcatttgcacgaagatgtggtggagcctctgcaggatgagttggcaacgatgctcgaagcgcgccaacagaccctggagatagaaagcggcgcaggcgaggatctcatttccggagatgcgaccctggcgcgggtgattttacgcaatctggtggagaatgcgcaccgctatagccccgtggggtcgaagattaagatttcggtaaaaccgggaaatacgccgattctggcagtagaagatgaagggccgggcattgatgaggccaaaagcggcgagctgagtaaagcgtttgtccgcatggacagccgctatggcggaataggcctcggtttaagcattgtcacccgcatcgctcaactacacgatgcgcaattctttttacataaccgccagcccggaccgggcgtccgcgcctgggtgctattcccgcgcagcgcgcgtcagaaggttaatacccattga

SEQ ID NO: 89018 - DNA, 2016 bp, Enterobacter aerogenes
atgagcaaaccattcaagctgcactccgcattccgtccttccggcgatcagcccgaagccatccgccgtctggaagaggggctggaagatggccttgcgcatcaaaccctgcttggggtaaccggttcggggaaaaccttcaccatcgccaacgttatcgctgacttacagcgcccgacgatggtgctggcgccgaacaaaaccctggcggcgcagctgtatggcgagatgaaagagttctttcccgagaatgcggtggagtattttgtctcctactacgattattaccagcctgaagcctacgtaccgagctcggatacctttatcgaaaaagacgcctcggtgaacgaacacattgagcagatgcgtctgtcggccaccaaagcgttgctcgaacggcgcgatgtagtggtggtggcttcggtttccgccatctacggtcttggcgacccggatctgtatctgaagatgatgctgcacctgaccaccggcatgctgatcgaccagcgggcgatcctgcgtcggctggcggaactgcaatacacccgcaacgatcaggccttccagcgcggcactttccgcgtccgcggcgaggttatcgatgtcttcccggcggaatccgatgatatcgcgctgcgtattgaactgtttgacgaagaggtcgagcggctatcgctgtttgacccgctgaccggccacgtcgaatcgtccattccacgctataccatctatccgaagacccactacgttacgccgcgcgagcgtatcgtacaggcaatggaagagatcaaagacgagctggctgaccgccgcaaggtcctgctggcgaacaataaactgcttgaagagcagcggctgagccagcgcactcagttcgacctcgaaatgatgaacgagctgggctactgctcggggattgaaaactactcgcgctttctctccgggcgcgggccgggcgagccgccgccgacgctgttcgactacctgccggcggatggcctgctggttatcgatgaatcgcacgtgactatcccgcaaatcggcggtatgtaccgtggcgaccgggcgcgtaaagagacgctggtggaatatggctttcgcctgccgtcagcgctggataaccggccgatgaagttcgaagagtttgaagcgctggcaccgcagaccatctacgtttcagcgacgccgggtccctatgagctggaaaaatccggcgatgaggtggtagaccaggtcgttcgcccaacgggcctactggatccggttatcgaagtgcggccggtggcgacgcaggtcgacgatctgttatcagaaatccgtacccgtgcggcgatcaatgagcgtgtactggtgacgacgctgaccaaacgcatggcggaggatttaaccgaatacctggaagagcacggtgaacgggtgcgctatctgcactccgatatcgataccgtcgagcgtatggaaattattcgcgatctgcgtcttggcgagttcgacgtgctggtggggatcaacctgctgcgcgaagggctggatatgccggaagtatcgctggtggcgatacttgatgccgataaagagggcttcctgcgttccgagcgctcgcttatccagaccatcggccgcgcggcgcgtaacgtgaacggtaaggcgattctttacggcgataaaatcacgccatcgatggcgaaggcgatcggtgaaaccgaacgccgccgcgagaagcagcagcgttataacgaagagcacggtattgtgccgcagggtcttaataagaaagtggtcgatattctggcgctgggtcagaacatcgcgaagaccaaagccaaaggccgtggcaaagcccgttctccggtggaagccgatagcgtcgaactgacaccgaaagcgctgcagcagaaaatccacgagctggaagggcaaatgatgcagcatgcccagaaccttgagttcgaagaagccgcgcagatccgcgatcaattgcatcagctacgtgaactgtttattgcggcatcataa

SEQ ID NO: 89019 - DNA, 681 bp, Enterobacter aerogenes
gtgactaaatgtttcttcgtcaccggaaccgatactgaagtcggtaaaaccgtcgccagcagcgcgctgctgcaggcggcgaatcagctgggatttaacaccgcaggctataagccggtggcttccgggagcgacctgaccgcacaagggttacgcaatgaagatgcgctggccctgcagcgtaatagccgggtggcgctgcgctatgaacaggttaacccttatacttttgccgagccgacctcgccgcatattattagcgccgatgaagggagaccgattgccgcgacgacgctttccagcggtttacgcgaactggagcgcctggccgactgggtgctggtggaaggggcgggcggctggtttacgccgctctcggaaaccctgaccttcgccgactgggcgcagcaggagcaattgccggtgattttagtggtcggcgtcaaacttggctgtatcaatcacgcgatgctcaccgccctggcggtacgcgaagccgggctgccgctcgtgggctggatcgccaacgatatccagccaccgggtaaacgccatcgcgaatatctgcaaaccttaacgcgggtattgccagcgccgctgctgggggaaattccctggcttgccgacgcatcgcaacgtcaggatctcgcgcagtacctggatctgacccccctgcaataa

SEQ ID NO: 89020 - DNA, 756 bp, Enterobacter aerogenes
atgaccacggtgaataagctggcggtcgccgcggcgtttggtcgggcggccagcggctatacgcaacatgatgagctgcagcgccgcagcgctgaactgctgctgcgccagttggcgaggagcgatttttcccgggtgctcgatgccggctgcggccccggcagcatgagccgttactggcgcgaagcgggaagcgaagttaccgcgctggatctctccgccgggatgctggcgcaggcgcaacgcaacgacgccgcgcagcattatctgcagggagatatcgaagcgctgccgctgccggatgcctgcttcgacctggcatggagtaacctggcggtgcagtggtgtgacgatctacgggcggcaatcggcgaactgtgccgggtggtgcggcccggcggacgggtggcgttcactacgttgctcgccggatcgctaccggagctcaatcaagcgtggcgggcggtcgacgaacatccccatgccaaccgttttctcagcgaacaggcggtaagggcggcgctgagtggcctgcgcgccgaaggcgtcgtgcatcagattagcttaccgttcgccgacgcgttaagcgccatgcgctcgctaaaggggattggcgctacccacttacatcaggggcgggcgtctgcgccgcttagccgcggcaagctgcgtgaactgcagctcgcctggccgcaacagcagggccagtgcccgctgacgtatcatctttttacaggagtcattgaacgtgactaa

SEQ ID NO: 89021 - DNA, 1158 bp, Enterobacter aerogenes
atgagctggcagcaacgaatcgatcgggcgctggacgaacggcgggcggcggaggcttttcgccgccgcctgccggtaagccacggcgccggacgctggctggagcgtgaaggggagcgctggctcaacttctccagtaatgactacctgggcctgagccagcatggcgcgattatcgccgcctggcagcagggggcggaacgttatggcgtcggttccggcggatcgggccacgttagcggctatagcgaggcgcatcgcgcgctggaagaggaacttgccgactggctgggctatccgcgcgcgttgctgtttatctccggctttgccgcgaatcaggcgttgattgccgcgctggcggaaaaagacgatcgcattgtggccgatcgcctgagccatgcctccctgctggaggcggcaagcctcagcccggcgcagctgcgccgctttacccacaatgacccgcaacagcttgctcaactgctggcgaaaccgctggacggccagcagttagtcgttactgaagggattttcagcatggacggcgatagcgcgccgctggctgacattcaggcggcagcccgcagcgccggcgcattattactggttgacgatgctcacggaatcgggacgattggcgatgaagggcgcggaagctgtcatacgcaggcggttcgcccggagctgctggtggtcaccttcggcaaggcgtttggggtgagcggcgcggcggtactgtgcagtgaatcgatggccgagtatctgctgcagtttgcccgtcatctcatttacagcaccgcgatgccgccggcgcaggcggtagcgctgagcgcggccctgcgggtcattcgcagcgatgagggccagcagcggcgggaattcttgagcgcccgcatccgtcagttccgcgcaggaatgggcgatgttgcgctggggctgaccgattcccggagcgcgattcagccgctgattgtcggcgacaacgcgcgagcgctggccctggcctccagcctacgcgaggccggctgctgggctaccgccattcgtccgccgacggttcccgtcggcggcgctcgcctgcgcctgactctgactgccgctcatcaggatgatgacattgctcgtttactggaggtgctgcatgaccacggtgaataa

SEQ ID NO: 89022 - DNA, 1041 bp, Enterobacter aerogenes
atggctcaccacgcacgctggacaatgtcgcaagttactgagttatttaataaaccactcatcgatctgctctttgaagcgcagcaaatccaccgccagcattttgacccgcgtcaggtgcaggtcagtacgttgctgtcgattaaaaccggcgcttgtccggaagattgtaaatattgcccgcaaagcgcacgctacaaaaccggtcttgaatccgagcgcctgatggaagtcgagcaggtgctggaatcagcgcgtcaggcgaaaaacgccggctcgacccgcttctgcatgggcgcggcgtggaagaaccctaatgatcgcgatatgccgtatctggagcagatggtgaaaggcgtcaaggcgctggggctggagtcctgtatgacgctcggcactcttaccgatagccaggcgcagcgcctggctggcgcggggctggattactacaaccataacctcgacacctcgccggaattttacggcaacatcatcaccacccgtacctatcaggaacgtctggatacgctggataaggtacgcgatgccgggattaaagtgtgctccggtgggatcgtcgggttgggggaaagcgtgaacgatcgcgccgggctgctgctgcagctggccaatttgccaacgccgccggaaagcgtgccgatcaacatgctggtgaaggtcaaaggtacgccgctggcggataacgacgatgttgacgctttcgatttcatccgcacgatcgccattgcgcgcatcatgatgccaacctcctacgtgcgtctctccgccgggcgcgagcagatgaacgagcagacccaggcgatgtgctttatggccggggcgaactcgattttctatggctgcaaactactgacgacgccaaacccggaagaagataaagacctgcagctgttccgcaagctgggcatcaacccgcagcagacggcggtgctggaaggtgataatgagcagcagcagcgcctggagcaggccttactcaccccggacactgaggaatactacaacgcggcggcgctatga

SEQ ID NO: 89023 - DNA, 1290 bp, Enterobacter aerogenes
atgacactggacgatctcgctttcgatcggcgccacatctggcacccctacacctctatgacttcccccctgccggtctacccggtggtttccgcccacggttgcgagctgtccctcgccggcggcgaacagctggttgacggcatgtcctcctggtgggcggcgatccacggctacaatcacccgcgcctgaatgcggcgatgaaagcgcagatcgaccagatgtcgcacgtgatgttcggcgggatcacccatccgtcggcggtggcgctctgtcgccaactggtggcgatgacgccggaatcgctggagtgcgttttcctcgccgattccggttcggtggcggtagaagtggcgatgaaaatggcgctgcagtactggcaggctaagggccagccgcgccgtcgtttcctgaccttccgcaacggctatcacggcgacaccttcggcgcgatgtcggtctgcgatccgcagaattcaatgcacagcctgtggcagggctacctgccggataacctgtttgcccccgcgccgcaaagccgcttcgacggcgagtgggacgagatggatatggtgccgtttgcccgcctgatggccgcgcatcgccacgaaatcgccgcggtgatcctcgaaccggtagtccagggcgccggcgggatgcgcatgtaccatccggagtggctgaagcgagtgcgtaaaatgtgcgaccgggaagggattttgctgatcgccgatgagattgccaccggctttggccgtaccggcaaactgttcgcctgcgagcatgccggtatctccgccgatattctgtgtctgggtaaagcgctgaccggcggtaccatgaccctttccgccgccatcaccacccgaacagttgctgaaaccatcagcaatggcgaagccggctgctttatgcacggccccacctttatgggtaatccgctggcctgcgcggtggcaagcgaaagcctgcgcctgctggagagcggcgaatggcaacagcaggtagcggcgattgaagcccagctgaaggccgagctggctccggcacgagagtcagaatgggtcgccgacgtgcgcgtactcggcgcgattggcgtggttgaaacccgtcatccggtgaacatggccgctctgcagcgctttttcgttgagcaaggggtatggatccgcccgtttggccggctgatttatctgatgccaccgtacatcatcagcccacaacagctgactcgcctgacccgtgcggtcaatatggcggtacaagaagaaacattttttagcgaataa

SEQ ID NO: 89024 - DNA, 477 bp, Enterobacter aerogenes
atgaaactgaccagccacgatctgcaagacggcggcaagctgcctaatcgtcacgtattcaacggtatggggtacgatggcgataatctttcgccgcatctgatgtgggacgacgtccccgcgggaaccaaaagctttgtcgtcacctgctacgacccggatgcgccgaccggttccggctggtggcactgggtggtagccaacctgcctgccgatacccgggttttaccgcagggggccggttccggtcaggcggagctaccggaagaggccattcagacccgtaccgattttggtaaggcaggctacggcggcgcggcgccgccgaagggtgaaacccaccgctacatttttaccgtgcacgcgctggatatcgataagattgatgtcgatgccgaggcgagcggcgcgatggtcggctttaatgtccatttccattcgctcgccagcgcttccatcaccgccctgttcagttaa

SEQ ID NO: 89025 - DNA, 1383 bp, Enterobacter aerogenes
atgcaacaacaacacaaaccgcatctgctgcgcgggctgaatgcccgacacattcgttttattgcgctcggttccgctatcggcaccgggctgttctacggttcggcctccgccattaaggcggcgggtccggcggtgctgctggcctatctgatcggcggcgcggcggtctttatggtcatgcgcgcgctgggtgaaatggcggtgcgcaatccggtttccggctccttcggcagctacgctcgccagtatctcgggccgctggccggatttattaccggctggacctacacctttgaaatggtgatcgtggcgctggccgacgtcaccgcgttcggtatctatatggggttgtggtatcccgatgtgccgcgctggatctggatcctcagcatcatcttctttattggcgcgatgaacctgtgcaacgtgcgggtgttcggcgagatggagttctggctgtcgctgattaaagtggtagcgattatcgccatgatggcggcgggcgcggggattatcttctttggctttggccatagtttcccggccaccgggctggaaaatctgtggagccacggcggctttgcgccaaatggctggcaggggatcatcgcttcgcttggcatcgtgatgttcgctttcggcggtgtagagattatcggcgtcacggcggcggaagcgcagaacccgaagaaggtcatcccgcaggccatcaacaccattccgctgcgtattattctgttttacgtctgcaccctggcggtgctgatggcgatcttcccgtggaatagttttggcgagcagggcagtccgtttgtgctgatctttgatggcctcgggatcccggcggcggcgactgtactgaatatcatcgtgattagcgccagtatctcggcgattaacagcgatatttttggcgccgggcgcatgatgtacggtatgtcgaaagaggggcttgcgccgaagtgcttccagcggatcgccagcaacggcgtaccctggatgacggtcgtggtgatgggcgtggcgctgctggtggcggtggtgcttaactatctgatgccggaacaggtctttgtcctgattgcctcgctggcggcgttcgccaccgtctgggtgtggttgatgatcctgctctctcatttctcgatgcgccgcggtttgtcggccgaagagcgcagtaagatcgaattcccgatccccttctggccggttggcccgctgttgacgctactgtttatggggctggtgatcgccgtgctgggaatggtggaagagacgcgcgtggcgctgttagccgggctggtctggctggggctgctgacggtggtgtggtatgcacgcgtgcgtaaaaccgcgctgcaggtggccacggaacagtaa

SEQ ID NO: 89026 - DNA, 1536 bp, Enterobacter aerogenes
atgaaatctttaacgctaattccggggcaactgagcctgtcgcagctccgcgacgtttacagccacccgctgaacattacccttgatagcagcgcgtttgcggcaattgatgagagcgtggcctgcgttaacgccatcctcgccgaagggcggaccgcctacggtatcaacaccggttttggcctgctggcccagacccgtatctcgacggaagatctggagaacctgcagcgttcgctggtgctatcccatgcggcaggcgttggcgagccgctggatgatgacctggcgcgcctgattatggtgctgaagattaacagcctgtcccgcggtttctccgggatccgcctgagcgtgatccaggcgctgattggcctggtcaatgccggcgtgacgccgtggatcccggcgaaaggttccgtcggcgcctccggcgacctcgcgccgctggcgcatatgtcgctgacgctgcttggcgaaggcaaagcgcgggtacgcggcggcgaatggctgccggcgacggaagcgttacgtcaggcggggctggagccgattaccctggcggcgaaagaaggtctggcgctgctgaacggcacccaggcgtcgacggcttttgcgctgcgcggcctgttcgaagccgaggatctgttcgcctccgcggtcgtttgcggggcgttaaccaccgaagcggcgctgggttcgcgtcgtccgttcgatgcgcgtattcacgaggtgcgcggccagcgtggccagattgatgcggcggctctgtatcgccacctgttgaccgatgacagcgcgatttcgcagtcgcaccataactgcgccaaggtgcaggatccgtactctctgcgctgtcagccgcaggtgatgggcgcctgcctgacgcagatccgccaggcggcggaagtactgttagccgaagcgaacgcggtctccgataacccgctggtctttgccgccgaaaatgacgtcatctccggcggtaacttccatgccgaaccggtagcgatggcggcggataatatcgcactggcgatcgcggaaatcggctcgctctccgagcgtcgtatcgcgctgatgatggacagccatatgtcgcagctgccgccgttcctcgtgaaaaatggcggcgtcaactccggctttatgatagcccaggtcacggcggcggctttagccagtgaaaacaaagcgctgtcgcacccgcatagcgttgacagcctgcccacctccgcgaaccaggaagaccacgtctcgatggcaccggctgccggtcgtcgcctgtgggcgatggcggaaaacacccgcggggtgctggccgttgagtggctggcggcggcgcaggggctggatatgcgcgaagggctgaccaccagtccgctgctggaagaggcgcgtcatctgctgcgcgaacgcgtgccgcattatacccaagaccgtttcttcgctcctgatattgaaaatgccaccgagcttttggccgcacgtcacctgacgcgtctgctgcctgccgtattgcctggcctgaattaa

SEQ ID NO: 89027 - DNA, 1689 bp, Enterobacter aerogenes
atgtcgcaaagcaaatatcgccagctggacgtacgtgccccgagaggcacgacgcttaccgccaagagctggttgaccgaagcgccgctgcgtatgttaatgaacaacctcgatcccgatgtcgccgaaaacccgcatgagctggtggtctatggcggtatcggtcgcgctgcgcgcaactgggaatgctatgacgctatcgtgaaggcgctgaaaaacctggaaagcgatgagaccctgctggtgcagtccggcaaaccggtcggcgtatttaaaacgcatgaaaactcgccgcgcgtgctgatcgctaactccaacctggtcccgcactgggccacctgggaacacttcaacgaactggatgccaaagggctggcgatgtacggccagatgaccgccggcagctggatctacatcggtagccagggcatcgtgcagggcacctacgaaaccttcgtcgaagccggtcgccagcactatcagggcagcctgaaaggccgctgggtgttaaccgccggtctgggcggcatgggcggcgcacagccgctggctgcgacgctggcaggcgcctgctcgctgaacattgaatgccagcagagccgcatcgatttccgtctgcgtacccgctacgtggatgaacaggccacttctctggatgacgccctggcgcgcatcaaaaaatacaccgccgaaggccgcgccatctctatcgcgctgtgcggcaacgccgcggatatcgttccggaactggtgaaacgcggcgtacgcccggatatggtcaccgaccagaccagcgcccacgacccgctgcacggctatctgccgaaaggctggagctgggaggagtatcagcagaaagccgaatccgatccgcaaggcactatcctggcggcgaaacgctcgatggccgaccacgttcaggcgatgctggcctttaatgaaatgggcgtaccgaccttcgactacggcaacaacatccgccagatggcgcaggaaatgggcgtcagcaacgccttcgatttcccgggcttcgtgccggcgtatatccgtccgctgttctgccgcggtatcggcccgttccgttgggtagcgctgtccggcgatccgcaggatatctacaaaaccgacgcgaaagtgaaagagatcattaaagatgataagcatctgcaccactggctggatatggcgcgcgagcgcatcagcttccagggactgccggcgcgtatctgctgggtaggtctggagtggcggcagaagctggggctggcctttaacgaaatggtgcgtagcggcgaagtctccgcgccgatcgtgattggccgcgatcaccttgattccggttccgtcgccagcccgaaccgcgaaaccgaagccatgcgcgacggctcggatgcggtatctgactggccgttgctcaacgcactgcttaacaccgccagcggcgcgacctgggtgtcgctgcaccacggcggcggcgtaggcatgggcttctcgcagcactccgggatggttatcgtctgtgatggtaccgatgaagcggcggcgcgtatcgctcgcgtcctgcataacgacccggcgaccggcgtaatgcgtcatgccgacgcgggttacgatatcgccattgaatgtgcggcggaacagggtctgaatcttccgatggttgcggcaacgcaggggaacgctaaatga

SEQ ID NO: 89028 - DNA, 726 bp, Enterobacter aerogenes
atgtttgcacaacaacctcgttccgcgcccgcgcctttctatgaaaaggtgaagcaggcgatcagcgaaaagatccaccgcggcgagtggcgcccgcacgaccgaattccctcggaggctgaactggtcgcccagttcggcttcagccgaatgaccatcaaccgcgcgctgcgcgagctgacggatgaaggcttgctggtgaggctacagggcgtcggtaccttcgtcgccgagccgaaagggcagtcggcgctatttgaagtgcgcagcattgccgatgagattgcctcccgccgtcaccagcaccgctgcgaggtgctgcttttagaggagaccgaagcggatgttatccaggcggaggcgctcaacgtcgccgaaggcacgcgtatctttcattcgctgatggtgcattttgaaaatgatgtcccggtacaaattgaagaccgctgcgtcaatgccgcggtggtgccagactatctattacaggattacaccgccaccacgccgcatgattatctgtcgctgattgcgccgttaaccgaaggcgaacatatcgtcgaggcggtgcaggcgacgtcagaagagtgcgcgctgctgcgcattctgccgcacgatccctgcctgcttattcgccgccgcacctggtcgacgacgcatattgtctcacacgctcgcctgctgtttcccggcgcgcgctaccgtctgcagggccatttcagctcgtaa

SEQ ID NO: 89029 - DNA, 957 bp, Enterobacter aerogenes
atgatgctgtggcaagctacccccgcgaacctttggcaggggcgtgatgatagcgcggaggcgcccaatgcgctgcgcctgttccagaccatcgcccgcgcggaacgcttcgcgccgcaggagatgcctggcgatatcgcgctgctcggcttcgcctgcgacgaaggcgtacggcgtaataaagggcgcaccggcgccggagatggcccggaaacgttacgccgggccttagccaatatggccagtcatcagggccatgaccgctgcgtggatatgggcacgattagcgtcgatggcgaacagttagaagccgcgcaccaggcgctgcgcgaggcggtggccgcctgtcaacgcgccggcaaacgcacgctggtgctgggcggcggtcacgagacggccttcggccacggcgctggggtactggacgccttcccgggcgaaaaagtgggcattattaatctcgatgcacatctggatttacgctttgccgaatgcgccagttccgggacgccgttccgccagttggcgctggagtgtgaagcgcagcagcgaggttttcactatacctgcatcggggttagccgggcggcgaacacccaggcgctatgggatgaagcggcgcgccgccaggtggctatcgttgaggatctggaggtgctggcagccttcgaaacacgcgtgttgccggagcttgagcgcaatatcgcgcaattcgaccgtctgtatctgactatcgatctcgacgtgctgccggcgcgcgaaatgccggcggtttccgcgccggcggcgctgggcgtgccgctggcgaccctgctgcggatcgttgagccgttgtgccgcagcggtaagctacaggcggtggatttggtcgagtttaatccgcaatttgacatcgacggacagggcgcccgcgcggcggcccgtctggcatggcaaatcgcccattggtggcgctag

SEQ ID NO: 89030 - DNA, 1260 bp, Enterobacter aerogenes
atgaaaataaatgtctatacaacccatgacaagttgaatgctatgactgaagccacctctgaactcgttatctggcgaaacgcgcgtctcgccactttgaatcctgattcttctcaaccatacggcctgctggagcgccatgcgctgctggtgcgtaacggccgtatcgaggcgatcgtcgacgacgctgacgccccggcggggcgtcgtatcgacctcgaaggccggctgctgacgccgggtctcattgactgccacacgcacctgatttttggcggcagccgggcgcaggagtgggagcagcggctgaacggcgtgtcgtatcaaaccatcagcgccaacggcggcggcattaactccaccgtgcgcgccacgcgcgaaagcagcgaagctgaactactggcgctggcgcagccgcgtctggagcgccttctgcgtgaaggggtgacaacactggagattaaatcaggctacggtctcgatctgcaaaacgaacgtaaaatgctgcgggtcgcccgacaactggctgacgacaatggcgtggaactgtcggcgacgctgctctccgcccacgccacgccgccggaatatcatggcgacgccgatggctatatctcgctggtctgcgagaccatactgccgacgctgtggcaagaggggctgtttgaaagcgttgacgtcttctgtgaaaacgtcggcttcagtccacagcaaaccgagcgcgtatttcaggccgcgcaggcgctgggcattccggtaaaaggccacgttgagcagctctcgtcactgggcggcgcacaactggtgagccgctatcatgggctttccgccgaccatatcgagtatctgacggaagagggcgtggctgcgatgcgcgaaagcggcaccgtggcagccctgctccccggcgcgttctacttcctcaatgaaacccgcaaaccgccggtggaactgctgcgcaagtaccaggtgccgatggcggtggcgaccgatttcaacccgggcaccagccccttcgctagcctgcatctggcgatgaacatggcctgcgtcaagtttggtttaacgccggaagaggcctgggccggggtgactcgccatgccgcgcgggcgctggggcgacaggagagccatggtcagctggcggcgggctttgtcgcaaacttcgctatctgggatgccgagcatccggtcgagatggtgtatgagccggggcgcgcgccgctctgggggcgcgtggtacgaggagaactgcaatga

SEQ ID NO: 89031 - DNA, 1284 bp, Enterobacter aerogenes
atgaacacatattccgtttcccgtctggcgctggcgctggccttcggcgtgacgctgtccgcctgtagctcgacgcctgccgatcaaaagccctcaacgcagactgcaccgggcaataccgcacggccgattcttagcgccgatgaagcgaaaaacttcactcaagcggcctattttcagtcgctgacgccgaatgccgccgcgtggacgccatccgctatcagcctgccggcgcagcctgatttcatcgtcggcccggcgggtgctcagggcgtgacccacacgactattcaggccgcggtcgatgcggcgattgcccgtcactctgcccgtcgcctgttcatcgccgttatgccaggcgaatatgcgggcactgtctacgtgcctgccgcgccgggcgcgctgacgatttatggtaccggtgaaaaccctgccgacgtcaaaatcagcgaagcgattgattccgaaatggaccgcaatagctggcgtcatctggtcaatccgggcggcaaatacatgccaggcaagcccgcgtggtatatgttcgacagctgccagagcaaatccgccgccactgtcggcgtgatgtgttccgcggtcttctggtcgcagaataatggcctgcagctgcagaacctgaccatcgccaacaatctcggcgacagcgtcgatgccggtacccatcaggcagtggccttgcgcagcgatggcgaccaggtgcagatcaacaaggtcaacattcttggccgccagaacaccttctttgtgaccaatagcggcgtgcagaaccgtctgcaggataaccgtcagacccgcacgctggtgaccaatagctatattgaaggcgatgtggatatcgtttccggtcgcggcgcggtggtattcgataataccgatttccgcgtcgtgaactcgcgtacgcagaaagaagcctacgttttcgccccggcaacgctgaaaagcgtaacctacggcttcctggcgaccaatagccgcttcaccgcttccggcgataacgtcgcgcagctgggccgcgcgctggacgtcgacggcaacagcaatggccaggtggtgattcgcgatagcgtcatcaatgaaggctttaacattgctcaaccgtgggcggcggcggtcggttctaatcgcgccttcagcggtaatgttggcgcgcaggatgacaaaggcaacccgcagcgtaaccttaacgacaacggcttcaaccgcatgtgggaatataacaaccgcggcgtaggcagttttgtggttgccgctccgaaacagtaa

SEQ ID NO: 89032 - DNA, 540 bp, Enterobacter aerogenes
atgaacgcacgaatttctcccatcaggcgcttagtcgttccggcgctgctatttttgttatataccccggcggcgttggccatgggcgataacagcccgagcaaacaaaccccggattgcccgagcggtcaggcctacgacagcgtgagccaaaaatgcgtcccgcagaaaaccagtagccttagcgatgaggataaaaccaattatgcctggcatctggcgaaaaaaggcgaatatcaggccgcacttaacctgctggatacgctgcacaacgccaatacgcctgaggcgtggaactatcgcggctacgccacccgtaagctcggcagaaccgatgaaggaattggctattatcagcgggcgctggcgctgaaaccggactacgcgaaagcccgcgaataccttggcgaggcgtggatggtcaaaggacgccccgatttggccaaacagcagctggcggccatcgccggcatttgcggccaaagctgcgaagagtaccgcgatcttcagtcggcaataaacggacatccggaatcctga

SEQ ID NO: 89033 - DNA, 414 bp, Enterobacter aerogenes
gtgcaggccacctgccttcgcgcgctcgaaaagagcgcgcagtttacccccggcacccgcatcgacaggtggctattcgccattttgcactcaatctggatttcagagctgcgcgcccgccaggttcgcctcggccaggggtttgtcgagtgtgaggagctggccgcccccgagccgggcgaacaggacgatacgcggtggcgctatcggcaacttatgctgcgggttaatcaactgcccgaggcgcagcgtaatgccgtctttttggtgtatgtcgaggggtttagttatcaggaagccgccgagacgctatcggtacctattggcaccattatgagtcggctggccgccgcgcgggaaacactggccaaaacgccggcgatttcgcccccggcgcaggagaaacgctcatga

SEQ ID NO: 89034 - DNA, 795 bp, Enterobacter aerogenes
atgaaccctattcgcttttccccaccctggcaggacgaggccattgtcgcctggcttgatggcgaaatgtgcgcggaggacgcccgccgttttagcgaaacctttgcccgcgacccgcagctcgccagccgcaccgccaggttaatgaataatcatcagccttatcaacatgctttcgccgccctgattgatgaagcgcccgtggcgcggatgcaggcgaaactggcgccctacctcaccgggccgaaaagtaaagcgcaaaatcaggcgcgcttcagccgtcgcgcgctgattgccgcctcattgggcctgttggttatcggtagcgcagcaagttatttctggcggcctgagccgcaggaagacgatgacgagaatattcgccgtcttgaagcccagtacatgtcgctatatagcgcggaaaccgtggccgatgttgataattcacccgcgatgctcgaccgtggcctgcgtcgttcggcgcaggatacaggactgttgctagaacgacgccagctcgccttgcctgaggcggagctgaaaatggtccgtatgctgcgctacgaaagtacctcgatcacgcaaatcctctggctgcataccggttacggcccggtcgcgctttgtatttcacccgccgcccggcaatccgcctcaccgccgcaaaatgagcagcgtcagggcatgaacctgcgctggtggcgccacggcggctaccagtttgcgctgatcggccgtatgccggcgcccgtgctcaacgatgcggcgcacaccctgcggcaagcgatagtttaa

SEQ ID NO: 89035 - DNA, 534 bp, Enterobacter aerogenes
atgaaactatggccaattttgaccggggtagcggtatcgctggcgttggtcgcctgtaaaaccccaacgccgcctcgcggggtaaaaccgataaaccattttgacgccagccgttatctggggcgctggtatgaagtcgcgcgtctggaaaaccgttttgaacgaggtctggagcaggtgacggctacctacagtatgcgtgacgacggcggcattcgcgtactcaaccgaggatttgacccgcgcaacaaacgctggcgcgagagcgagggcaaagcctatttcaccggcgcttccaccacggcagcgctgaaagtctctttcttcggccccttctatggcggatataacgtgatcgcgctcgacgaggattatcaatacgcgctggtgagcggtccaaaccgcgactatttatggctgctttcgcgcaccccggatattccgtcccacattcgacagcagtaccttgccctggccgctgagctcggttttgcggttaacaaactggtgtgggtgccgcaggcgaaggcttaa

SEQ ID NO: 89036 - DNA, 213 bp, Enterobacter aerogenes
atgcatatcaaaaatacgatccctgtgcagtttatagctaactgcgcattgctgaaaaacatagaaaatagcttattacaggaaaataaaaccgttgacgatcttcaattaattagtgagattaatcaacggttacaaatagaaagtaatgaaatacttgctgatatctatttacaggcgctggatattctgcgctgtggtattcgtcattaa

SEQ ID NO: 89037 - DNA, 555 bp, Enterobacter aerogenes
atgttcagtaaacacacgcacatttgttccgaacgctatgacctgtggattgacaaccactttctgatgagtggtatcagccttattctgcgcacgctgccagaaagttgctttcgcaaaaagcatgttttctttaccagcgatagctatttctcggtgttgcaacacaaatacaatcgtcgggaaacgatttttattttattaaccgaaggcaacgatcttaatttccttagcgaactgccaatgttacgcattcccgccagatcgacccctgctgaattaaaaacatttctcaatcaaccgacccgttattataaatcgcatacttctcctggcgaactgatacagtttaccgagcgagaaaagaaggtcattcagctcatcagtaatggcgaagccattgccagcattggtcgctcgctaaacttgcatattaagacaatttatcaaatccgtttgaatctgataaaaaaactgggctgcagcggcaggaccgatttctttaatatcagccgtagcgaaacatttaagtcctggagtcaaatccatctgtga

SEQ ID NO: 89038 - DNA, 735 bp, Enterobacter aerogenes
atggctttttacagtatcggtgaagtagccgagcgttgcggaatcaatccggtcacccttcgagcctggcagcggcgttacggtttgctgaaaccgcagcgtagcgaaggcgggcaccgtcagtttgatgaagaagatattcagcgaatcgaagaaattaagcgctggatagaacgtggcgtttcagtgggcaaggttaaagcgctgctggaaggccagctacctgccgcccgtgacgaatccgcacagttgcaggaagagatgatgagtatcctgcgctatatgcagccggcaaaaatccgcgccaaaatcaccgcattaagccatcagcatcccgtcgacaccctgcttgatagcctgttcgcgccggtgcgccagcggctgaagctcgatcaaaacacttcaatggtcatcagcagcatgttggatggcatattgattgattgcgtggcgctgtttttagcggaatcgcgtaaaaaaaatggcaaggagacgctgctggtggggtgggggaatgaagaccgcaccggcctatggctggaagcctggcgtctttcgcaacgcggttggcatgttaacgtgctggcggaaccgttagaatctccccgcccggagctgtttcctggacaacatattttcgtctggaccgggcgccccgcctcgccgctgcaactggagctgctgggccactggcaggaacagggctttagtattcacttccacggtaacgaataa

SEQ ID NO: 89039 - DNA, 1212 bp, Enterobacter aerogenes
atgctcaccaccatcatttatcgcagccatatctgcgacgatgtctcattcaaatcgctcgagtcgatggttgctgcggctaacgagagaaatggtcaggcggatgtcaccggtattttactttttaacggtacgcattttttccaactcattgaaggaccggaagaaaacgtacagcaaatctatcgacatatttgcgccgacccgcgtcattacaatctggtggagcttctgtgcgattacgctccggctcgccgctttggtaaggtcggcatggagctgtttgatttaagggaacacgatcgcgacgcggtactacagaacgtgctggataaggggacgacaaaatatcagctgacttacgacgaccgggcgctgcattttttccgtacctttgtcgaagcgacggaaaaagagaactattatgaaattccgtcagctgatagctgggattttactgctgatgagagctcgttttatccggccgtaccctgtatcgacggcgctgaatcatgctgttttgcttttcagccggtggttgacccctttgcctgcgaaataatctcctgggaagcgctgctgcgtaccgttgacggagaaccgcccgcagcctattttgccggtttgtcaggcgatgagatttacgtcgcggatctgcaaagtaaacgggttgcgctggccattgccggtaagttaggcctgcgtgaacgtacgctgaccatcaatctactgccgatgacgctggtgaaagtggcggatgcggtgccattcctgctaacggaaattcagcgcaacgatttgattccggaacaaattattgttgaattcaccgagcgtgaagtgatttcgcgaatggatgagtttaccgatgccgtacgcaaattgaagggggcgggaatacgcgtcgctatcgatcactttggcgccggttttgccgggctatcgctgctggcgcaatatcaaccggatcgaattaaaattgaccaacagctgatccgcaacatccatcgtgacgggccgcgtcaggctatcgtgcaggcgattattaaatgctgccactcgctggaaattgccgtatcggtggttggcgttgagcaggcggaggagtggatgtggctggaggcggcgggtatttctcatttccagggaaatctgtttgccagcccgcgactgggtggtctgccggctatcgcctggccggggaaaatatga

SEQ ID NO: 89040 - DNA, 246 bp, Enterobacter aerogenes
atgcagcagaatggttacattccagatacagcgaacgcgatagcccagtatttcaacaaagcatcgttaccttctcagcaggagacgctgggcgaaatcgtgatggacattctcaccgaagggcggcatttaaaccgcaaagcgctttgcaccaagttactgagccgtcttgacgtcgcacgagccccggaagaagaaaatcattatcaaacgttgattggcctgctgtttgagcgtcaggagtaa

SEQ ID NO: 89041 - DNA, 303 bp, Enterobacter aerogenes
atgaaaagcagtcaatcagatcgggttagcgatgagattattggcgaggcagttttatctcttcttaaaacaaaccggccaattaatattccgacgctgctagtcaaacttcggttaatgcaggcagcggaaacgaaccgccagcgaaggaatgcaattattgccgttatcgatgaaattagcgtcagactcacgacgcgcggtaatcacgcgccggtcattaaaaagattaacggccagtgggaaaacagagccgttgttgtggatagtaacgtcgaaccgacgggcaaaaaaatacactga

SEQ ID NO: 89042 - DNA, 279 bp, Enterobacter aerogenes
atgagacagactatgcatcagcaatcagatatttacgcaggactgcaggatacagcgctctcagaatatttccgcagcgccggagataaattagtcgatgaatctgcggtaatgtcgctggcaatcgacagtatcctcagctcagatggacatctgagcaataaggcgcttattttatggttgatcaatgcgctggaaaccaccgataacgtggttaccgcggatgtgattcgcaagacgctggaaattgtcgtcggctatacgatggatgatatttaa

SEQ ID NO: 89043 - DNA, 996 bp, Enterobacter aerogenes
atgaaacaaaccgtatataccgccagcccggagagccatcagattcacgtctggagcctcaatgctgagggaaatctgacattggttcaggttgttgatgccccgggccaggtgcagccgatggtggtaagcccgaacaaagagtatctctatgtcggcgtgcgtccggagtttcgcgtcctggcttaccgcattgcgccagataatggcgcgctgactttcgccggcgaagccgcgctgccggggagcccgacgcatatctccaccgaccatcagggccgttttgttttcagcgcatcctacaatcagggctgcgtgagcgtgacgccattgattgacggcctgccgggcgaaacggtcaccgtcgtcgaggggctggagggctgccactcggccaatatttcaccggacaaccgcacgctatgggtaccggcgctgaagcaggatcgtatttgcctgtttaatctgagcgatgacggctatctggccgcgcaggagccggcggaagttactaccgtggaaggcgccggtccgcggcatatggtgttccatccgaaccagcagtatggctactgtgtgaacgagctgaacagctccgttgacgtgtgggagcttaaagatccgcacgggaaaattgagtgcgtacagacgctggatatgatgccgccagattttaccggcgtgcgttgggctgcggatatccatattacgccggatggccgtcatctttatgcctgcgatcgtaccgccagcattatcaccatctttagcgtttctgaagacggtagcgtactgtctattgaaagctaccagccgaccgaagcgcagccgcgcggctttaatctcgatcacagcggtaagtatctgattgccgcggggcagaaatcgcatcatatcgcggtttatgaaattgccggcgagcaggggctgttaaaagagaaagggcgttatgctgttggtcagggccctatgtgggtagtggttaacgcgcattaa

SEQ ID NO: 89044 - DNA, 819 bp, Enterobacter aerogenes
atgacctcacgcgtgatcgccctcgatttagacggcaccctactgacctcgaaaaaaacgattcttccggcgtcgctcgatgcgctggctcgcgcccgggaggctggatatcaggtgatcgtcgtaaccggccgacatcacgtcgctatccatcctttttatcaggcactggctctcgatacacctgcaatttgttgtaatggtacctatttgtatgattatcatgcaaaaaaggttctcgaagccgatccgatgccggtggataaggccctcagcctcaccagcctgctcgccgaacacgatattcacggtctgatgtacgtcgatgacgccatgctttatgaacgtccgaccggccatgtgatccgcaccactaactgggcgcagtcgctgccggttgaacagcgcccggttttcacccaggtggattctctggcgcaggcggcgcgtgaagtacaagcggtatggaaattcgccctcaccgatgaaaatatcccgaaactgcaggccttcgcgcagaccgtcggccagaatctgggcctggaatgcgaatggtcgtggcacgatcaggttgatatcgcccgcgccggcaacagcaaaggcaaacgcctggcgcagtgggtcgccgcgcaaggattatccatgcaggacgtcatcgcttttggcgataactacaacgacctcagcatgctggaagccgccgggaccggcgtggcgatgggtaacgcggttgaggaagtcaaagcacgggccaacgtggtgatcggcgaaaacgaaacaaccagcatcgccgactttatcaatcgtaacctgctgtaa

SEQ ID NO: 89045 - DNA, 1059 bp, Enterobacter aerogenes
atgctggagctcgattttagccagacgttgggcaaccactgcctcgaagtgcatgaaaccctgcccgccagcggcattaccgctattttcggcgtctcgggcgcgggcaaaacctcgctgattaatgcgatcagcgggctgacgcagccgcagcaggggcgaattgtgctcaatggccgggtgctcaatgacgcgcgacagcgcatctgcctggcgccggagaagcggcgtatcggttatgtgtttcaggacgcgcggctgtttccgcactataaagtgcgcggcaacctgaaatatgggatggccaaaagcatggccgcgcaatttgacaagctggtggcgttattgggcattgagcacctgctcgaacggctgcccggtagtttgtccggcggggaaaaacagcgggtggcgattggccgcgccctgttgaccgcgccggaattgctgctgctggatgagccgctggcctcgctggatattccgcgcaagcgcgaattactcccctatttacagcggctggcgcgcgagatccatatcccgatgctgtatgtcagccactcgctggatgaaattcagcacctggccgataacgtgctggtgctggaagcgggaaaagtgaaggcgtttggcgatctcgaaacggtgtggagcagcagcgtgatgcatccgtggctgccgcaggagcagcagagcacgattcttaacgtctcggtgatcgcgcagcatccgcaatatgcaatgactgcgctggcgctgggcgatcagcaactatgggttaatcagctggcgcgggagccgggcgaagcggcgcgtattcgtattcaggcgtcggatgtgtcgctggtgctggagcacccgcgacagaccagtatccgtaatatcctgcgcgcgcaggtcgttggctgcgtggaaaccaacggccagatcgaggtacagcttacggtcagcggcaaaacgctatgggcgcgaattagcccatgggcgcgggatgacctgggcatcaccccaggtcagtggctgtatgcgcaaattaagagcgtatcgatcgcggcctga

SEQ ID NO: 89046 - DNA, 690 bp, Enterobacter aerogenes
atgattttaagcgatcccgaatggcaggcggtactgctgagcctgaaagtttcatccctggcggtggtttgcagcttaccttttgggatctttttcgcctggctgctggtgcgccgccattttcccggcaaagcgttactcgatagcattatacatttaccgctggtgctgccgccggtggtggttggctatctgttgctgatttccatggggcggcgcggctttatcggtagttggttatacgactggtttggtctgaccttcgccttcagctggcggggggcggtgctggcggcggcggtgatgtcatttccgctgatggtgcgggcgatacgcctcgcgcttgaaggggtggacgtgaagcttgaacaggcggcgcgcaccctcggggctaatcgctggcgggtatttttcaccatcacgctgccgttgaccctgccgggcattattgtcggtacggtgctggctttcgcccgttcgctgggagagtttggcgcgacgatcacctttgtctcaaacattcctggcgaaacgcgcaccattccttccgcgatgtataccctgattcaaacgcccggcagcgaaggcgccgccgcgcggttatgcatcatctctattgtcctggcgctggtatcgctgctggtgtctgaatggctggcgcgccttagccgtaagcggatgggaaaataa

SEQ ID NO: 89047 - DNA, 777 bp, Enterobacter aerogenes
atggcaggtcaatggtcgcgttttctgaccggagcggctttaacgctctgcgtttctggtcatgcgctggcgcaggacggcaaagttaccgtctttgccgcggcgtcgttaaccaacgctatgcaggatattgcgcaagcctataaaaaagagcaccgcgttgaagtggtctcttcctttgcttcttcctccacgctggcgcggcagattgaagccggcgcccccgccgatctgtttatttctgcggaccagaaatggatggactatgccgtagacaaaaaatcaatcgatacggcaacccgcaccacgctgctgggtaatagcctggtggtggtcgcgccgaaagccagcgatcgcagcgatatcaccattaatgataaaaccgactgggccagcctgctgcaaggcgggcgtctggcggtcggcgatccggatcacgtaccggcggggatctacgcgaaagaagcgctgcagaaactgggggcctgggagacgctgtcgccgaagctcgcgccggcagaagacgtgcgcggcgcgctggcgctggtggagcgcaacgaagcgccgctgggcatcgtctacggctctgatgccgtcgccagcaagggggtcaaagtggtgggcaccttcccggaggattcgcacaaaaaagtcgagtatccgctggctatcgttgatgggcataaaaatgctaccgtaaccgcgttttatgactacctcaaaggcccggaagcctcggctatctttaaacgttacggattcaccacacagcaatga

SEQ ID NO: 89048 - DNA, 213 bp, Enterobacter aerogenes
atggggcgtgtttttccggctgaaatggttacaatgaagtattcgtactatctggagccaaccatgttagagctgttgaaaagtctggtatttgctgtcgtcatggtacctgtggtgatggcggtcatcctcggtctgatttacggtctcggcgaagtgttcaacattttctccggcgtcggtcataaagacagcagccagcaaaatcactga

SEQ ID NO: 89049 - DNA, 789 bp, Enterobacter aerogenes
atgcaggccgaaatcctacttacgcttaagcttcagcagcgcctgttcgccgatccccgccggatcgccttactcaagcagattgacctgaccggttctattagccagggggcgaagaatgccggtatcagctataaaagcgcatgggatgcgatcaacgaaatgaaccagcttagcgaacagtcgctggtcgaccgcgccaccggcggtaaaggcggcggcggcgcggtgctgacccgctatggacagcggttgattcagttatacgatctgttggcgcagattcaacaaaaagccttcgacgtactaagcgacgatgacgccctgcccctcgacagcttgctggcggcgatttcccgcttctcgttacaaaccagcgcccgcaaccagtggttcggcaccatcaccggtcgcgaccaccagcaggtacagcaacatgtcgacgtgctgctggcggacggccagacccgttttaaagtcgccattaccgctcaaagcgccgaccgcctcgggctcactgaaggccaggaagtgctggtgttgctgaaagcgccgtgggtcggcatcacgcttgaccacgccgtggcgcagcaggcggacaaccagcttaccgggcgcatcagccacattgaacgcgggccggatcggtgcgaagtcatcatggcgttgccggatgggcaaaacctgtgcgccacgctgtcaacggcgcaaaccgacggtttgcaggaaggcgcgcaggcgatcgcttacttcaatgccgatcgcatcattctggcaaccttatgctaa

SEQ ID NO: 89050 - DNA, 1476 bp, Enterobacter aerogenes
atgtcatcattgcaaatttcgcaaggtacgtttcgccttagcgatataaaaaccttacatatcgatcgcctcacgctacgcgctggcgaaagctgggctttcgtcggcagtaacggtagcggtaaatcggcgctggccagagcgctggccggtgaactgactctgttaaacgggcagcgcgaaagcgcatttcagcgtatcactcgcctctccttcgaacagctgcagaaactggtcagcgacgagtggcaacgtaacaacaccgatatgctcagtcccggcgaagaagataccggtcgcaccaccgcggaaatcatcgaagatgaaagacgcgacccggaacgctgtacccggctggcggagcagtttggtattagccacctgctgacgcggcgctttaaatatctgtcgacgggcgaaacccgcaaaacgctcctctgccaggcgctgatgagcgacccagacctgctgattctcgacgagccgtttgatggcctggacgtcgcttcgcgccaacagttggccgacctgctggccagcctgcatcaggcaggcatcaccctggtactggtactcaaccgcttcgatgagatcccggaattcattgaatatgccggggtgctggcggattgcacgctgagcgaaaccggcgagaaacaggcgttattacaacaggcgctggttgcccaactggcgcatagcgaaaaacttgccggtatgacgctaccagaaccggatgcccccgccgcccggcacgacttagcggcgaacgctccgcttatcgtccttaacgacggcacggtgtcgtataacgataaagcgatcattaaccagctaagctggacggtgaaccccggcgaacactggcagattgtcggccccaacggcgcgggcaaatccacattgctgagcctgatcaccggcgaccatccacagggttacagcaacgacctgacgctattcggccgccgtcgcggtagcggtgagactatttgggatatcaaaaaacatattggctatgtcagcagcagcctgcatctggaataccgcgtcagcactaacgtgcgtaacgtgatcctttccggctactttgattcgataggcatttatcaggcggtctctgataagcagcacaagctggtccagcgctggctggatattctcggcattgataaacgcaccgccgacgcgccgttccatagtctgtcgtgggggcagcagcggttggcgctgatcgttcgcgcgctggtcaaacacccgaccctgctgatactcgatgaaccgttacagggactggatccgctgaatcgtcaactggtacgtcgttttgttgatgttttaattggcgaaggggccacgcagctgctgtttgtatcgcatcatgccgaagatgcccctgactgcattacccaccgtctggagttcattcgcagtggagacggttacacttaccgcctcggtccgctggcagaatag

SEQ ID NO: 89051 - DNA, 1017 bp, Enterobacter aerogenes
atgaaagtactggtcacaggtggtagcggttacattggaagtcatacttgcgtacagctgctgctgcagggacatgatgtgattattctcgacaatctctgcaacagtaaacgcagcgtattgccggtcattgaacgtctcggcggcaagaaagccacctttgtcgaaggcgatattcgtaatgaagcgctgatgacggaaattctgcacgatcacgctatcgaagccgtgatccattttgccggcctgaaagccgtcggcgagtccgtcgccaagccgctggaatattacgacaataacgtcaccggtacacttaaattagtttccgctatgcgcgcagccggcgttaaaaactttattttcagctcctccgcgaccgtctacggcgaccagccgaagatcccttatgttgaaagcttcccgaccggtaccccgcaaagcccctacggtaaaagcaaactgatggttgagcagatcctcgccgacctgcagaaagcccagccagactggagcatcgcgctgctgcgctacttcaacccggtcggcgcgcatccatcaggcgatatgggcgaagatccgcagggcattccaaacaacctgatgccgtatatcgcgcaggttgccgttggccgtcgcgaatcactggcggtattcggtaacgactatccgaccgaagacggcaccggcgtgcgcgactacatccacgtgatggacctcgccgacggtcacgtcgccgccatggaaaaactggcgaacaaagctggcgtacatatctacaacctcggcgcaggcgtcggcagcagcgtgctggacgtggtcaacgccttcagcaaagcctgcggtaaaccgattaattatcacttcgcgccgcgccgcgatggcgatctcccggcctactgggctgatgccgccaaagccgaccgcgagctgaactggcgcgtgacgcgcaaccttgacgaaatggcgcaggacacctggcactggcagtcccgtcatccgcagggttatccggactaa

SEQ ID NO: 89052 - DNA, 1050 bp, Enterobacter aerogenes
atgacgcaatttaaccccgtcgaccatccgcaccgtcgttataacccgttaaccgggcagtggattctggtttcaccgcatcgcgccaagcgcccctggcaaggggcgcaggagacgccggcaaaacaaacgttgcccgcgcacgatgcggattgtttcttgtgcccgggcaatacccgcgtcaccggcgacactaacccgaattacaccggcacctacgtgtttaccaacgactttgccgcattgatgaccgatacgccggacgctccggagagcgacgatccgctgatgcgctgccaaagcgcccgcggcaccagtcgggttatctgcttctcgccagaccacagcaaaacgctgccggaactgagcattgaagcactggaaggcgtggttaaaacgtggcaagagcagaccgcggaccttgggaaaagttatccctgggtccaggtcttcgaaaataaaggcgcggcgatgggctgctccaacccgcatcctcacggccaggtatgggccaacagtttcctgcccaatgaggcggaacgtgaagaccgtctgcaaaagaaatatttcgctgagcagggttcaccgatgctggtggattatgtgcaacgcgaactggccgacggcagccgtaccgttgtagaaaccgaacactggctggccgtggtcccgtattgggcggcctggccatttgagacgctgctgctgccaaaaacgcacatccagcgtctgaccgatttaaccgcagcccagcgccacgacctggcgctggcgctgaaaaagctgaccagccgttacgacaacctgttccagacctccttcccctactccatgggctggcacggcgcgccgtttaataatgaagataatcaacactggcagctgcacgctcacttttacccgccgctgttgcgctccgccacggtgcgcaaatttatggtcggctacgaaatgctagccgaaacccagcgcgatctcacggcggagcaagccgccgaaaagttacgtgccgttagcgatatccattttcgtgaatcaggagttgaataa

SEQ ID NO: 89053 - DNA, 1149 bp, Enterobacter aerogenes
atgagtctgaaagagaacacccaggcgctgtttgctgaacagtttggctaccctgccagtcacgtcattcaggcgccgggccgcgtcaacctgattggcgaacataccgattacaacgatggtttcgtgctgccgtgcgccattgactatcaaaccgttgtcagctgcgcgccgcgttccgaccgtatcgtgcgggtcattgccgccgattacgataatcagcgcgacgagttttccctcgatgcgcctatcgttagccacgatacccaacagtggtcaaactacgtacgcggcgtggtcaaacacctgcagaagcgcaataaccacttcggcggcgccgatctggtcatcagcggcaacgtaccgcagggcgcgggtttaagctcctcggcttcgctggaagtcgccgtcggcaccgtgttccagcagctatatcatctgccgctcgacggcgcgcaaatcgcccttaacggccaggaagcggaaaaccagttcgtcggctgtaattgcggcattatggaccagcttatttcggcgctgggtaaaaaagatcatgcgctgctgattgactgccgcacccttggcaccaaagcggtgtcaatgccgaaaggcgtcgcggtggtgattatcaacagcaactttaaacgcacgctggtcggcagcgaatacaacacccgccgcgaacagtgtgaaaccggcgcgcgtttcttccagcagcccgctctgcgtgacgttgagcttgcgcaatttaatgccgtggcccacgagctggacccgattgtggcaaaacgcgtgcgccatgtgttaaccgaaaacgcccgtaccgtcgaagcggcgagcgcgctggcaaacggcgacctgcagcgcatgggccaactgatggcagagtctcacgcctccatgcgcgatgattttgaaatcaccgtaccgcaaattgatacgctggttgagattgtcaaagcggttatcggcgaccagggcggcgtgcgtatgaccggcggcggctttggcggctgcatcgttgccctgataccggaagcactggttgaaaaagtacagcaggcggtagccgctcagtatgaagcgaaaaccggcattaaagagacgttttacgtctgcaaaccatcccagggagccggccaatgctaa

SEQ ID NO: 89054 - DNA, 1044 bp, Enterobacter aerogenes
atgctaacgccaacccacgaactcgcgcccgacggacagccgtggaacgtgataacgctgcgtaatgacgccgggatgagcgtaacggtgatggactggggcgcgacgctactctccgcgcaagtgcctcttgccgatggcagcctgcgcgaagcgttgcttggctgcgccacgccgcagcaatatcgccagcaggcggcatttctgggcgcatccgtcggccgctacgctaaccgtatcgccaacagccgcttcacgctcgatggcgaagtcgtgaacttaaccccgtcgaacgaggccggccaccagctccacggcgggccggacggcttcgacaaacgtcgctggcaaattgtcagccacgacgacagccaggtgctgtttgcgctcgactccgccgatggcgatcagggcttcccgggtcatcttcaggcaaccgcgcgctatcgcctgactgacgataatcgtatcgccattgagtaccgcgccaccgttgataagccctgcccggtcaatatgactaaccatgtctattttaacctcgacggcgcgcagggcgacgtgcgccaccaccgcctgcagatcctggccgaccagtatctgccggtggagagcgacggtattccgtatggcgatttgcgcgacgtggagtacaccagctttgatttccgcgcgccgaaggtgcttgctggagagtttcttgccgatgctgaccagcaaaaagtgaaaggttacgatcacgcctttctgctgcaggccaaaggcgacgcccgccagccggcggcgcatgtctggtcgcaggatgaaaagctacagctgacggtgtacacctcggccccggcgctgcagttttattccggtaactatctcggcggcacgccatcgcgcggcagtcaaccttacggcgactggcaagggctggcgctggaaagcgagttcctgccggactcccccaatcatccgcactggccgcagccagattgcgtattacggcccggcgccgaatacgttagcctgacggaatatcagtttatcgccggataa

SEQ ID NO: 89055 - DNA, 753 bp, Enterobacter aerogenes
atggctgtaactaagctggtactagttcgtcacggcgagagccaatggaacaacgaaaaccgtttcaccggttggtacgacgttgacctgtctgaaaaaggcgttagcgaagcgaaagcggcgggtaaactgctgaaggaagaaggcttcagctttgattttgcttatacctccgtgctgaaacgtgccatccacaccctgtggaacgtgctggacgaactggatcaggcctggctgccggttgagaaatcctggaaactgaacgaacgtcactacggcgcgctgcagggcctgaacaaagccgaaaccgctgaaaagtatggcgacgagcaagttaaacagtggcgtcgcggctttgccgtcaccccgccggaactgaccaaagatgacgaacgttatccgggccacgatccgcgttacgcgaagctgaccgatgcggaactgccgaccaccgagagcctggcgctgaccattgaccgcgtcgtaccttactggaacgaaaccattctgccgcgcctgaaaagcggcgagcgcgtcattatcgccgctcacggtaactccctgcgtgcgctggtgaaatacctcgacaacatgggcgaagacgagatcctcgaactgaacatcccgaccggcgtaccgctggtgtatgagttcgatgaaaacttcaagccgatcaaacactactacctgggcaatgctgacgaaatcgctgcgaaggccgcggctgtcgctaaccagggtaaagcgaagtaa

SEQ ID NO: 89056 - DNA, 1053 bp, Enterobacter aerogenes
atgaattatcagaacgacgatttacgcattaaagagatcaacgaattattacctcccgttgcgctcctggaaaaattccccgctaccgaaaatgctgctaataccgttgcacatgctcgcaaagcgattcacaacatcctcaaaggcaacgacgatcgtctgctggtggtaattggtccgtgctctattcacgaccctgccgcggcgaaagagtatgccagccgtctgctgacactgcgtgaagcgcttaaaggcgagctggaaatcgttatgcgcgtctattttgaaaaaccgcgcaccaccgtcggttggaaggggctaattaacgatccgcacatggataacagcttccgcattaacgacgggctgcgtatcgcgcgtaagctgctgctggaaatcaacgacagcggtttgccagcggctggcgagttccttgacatgatcaccccgcaatatgtggcggacctgatgagctggggggcaatcggcgcgcgtaccactgaatcccaggtgcatcgtgaactctcttccggcctctcatgcccggttggcttcaaaaatggcaccgatggcaccatcaaggtcgctatcgatgcgatcaacgctgctggcgcgccgcactgtttcttatcggtaacgaagtggggccattccgctattgtgaacaccagcggcaacagcgattgccatatcattctgcgcggcggcaaagagccgaactacagcgctcagcacgttgccgaagtgaaagtgggtctggcaaaagccggtctgccggcgcaaatcatgatcgacttcagccatgctaactccagcaagcagtttaaaaagcagatggaagtcggcgccgacgtgtgccagcagattgccggcggtgaaaacgcgattatgggcgtgatgattgaaagccaccttgtggaaggcaatcagagcctggaaagcggcgaaccgctgacctacggcaagagcgtgaccgacgcctgcatcggctgggaagataccgagaccatcctgcgccagctggcggatgcggttaaagcgcgccgcggctag

SEQ ID NO: 89057 - DNA, 372 bp, Enterobacter aerogenes
atgaatataaataaactcacagccctacttctcaccgccaccttaagcttagccagcggcgccgcgctggccgccgatagcggcgcgcaatcgaacaacggtcaggccaattccgccgctgatgccggacaggttgcgcccgatgcccgtgaaaacgtggcgccaaataatgtcgataacgacaaaattaactccggcggcaccatgcttcatcctgatggttcgacgatgaatcatgacgggatgtcgagcgacgaggtccataaaaacagcatgtgcaaagatggacgctgtccggatacggataaaaaaatggaaagcggcaatggcatgaacaacgatgccagcaaaacggatggcacctcgcagtaa

SEQ ID NO: 89058 - DNA, 939 bp, Enterobacter aerogenes
atggcgcatgcacattcaccgacccctgctggcgaaaacagtaacgccaaccggctgctttgggcttttatcgtaaccgccggttttatgattattgaggccatcggcggcgtcatttccggttccctggccctgctcgccgatgccggacatatgctcaccgactccgccgccctcctgttcgctctgctggcggtgcgcttcgccagccggccgccaaatagccgccacacttttggttggctgcgtttaactactctcgccgccttcgtcaacgccatcgccctggtggtcattaccattttcatcttctgggaagcggtacagcgttttaaccatccgcagccggtggcgggaaaaaccatgatggtcatcgccgtcgccggactgctggccaatatcctcgccttctggatcctgcaccgcggcagcgccgaaagtaatcttaacgtccgcgcggcggcactgcatgtgctgggagatctattgggttccgtcggcgctatcgtggccgctatcgtcattctgatgaccggctggacgccgattgacccgatcctctcggtgctggtgtcgtgtttagtgctgcgtagcgcctggcggctgttgcaggagagtatgaatgagctgctggaaggggcgccgcgctcgctggatgtcgaagcattaggccgcgatctacgccgctcgatacctgaagtccgcgacgttcaccacgttcacgtctggctggtgggggaaaaaccggtgatgacgctgcacgtacaggtcgtgccgccgcacgatcacgatgcgctacttgatagcatccagcattttattgagcataaatatgaaattgagcatgtgacggtacagatggagtaccgcccctgcagcggcccggaatgccacctgaatctggcgcattccggacatgagcatcatcatcaccattaa

SEQ ID NO: 89059 - DNA, 720 bp, Enterobacter aerogenes
atggattttttcagtacgcagaatattttagtgcatataccgatcggcgccggcggctacgatctgtcgtggattgaggcggtggggaccatcgccggcctgttatgcatctggcttgcgagcctggaaaagatcagcaactatgccttcggcctggtgaacgtgacgctttttgcgatcatcttcttccagatccagctgtacgccagcctgctgctgcagctgtttttcttcgcggcgaacgtttacggttggtacgcgtggtcaaggcagaccagcgataacgaagcggaactgaaaattcgctggctgccgttgccaaaagcgctggcctggctggcgggctgcgtggtggctatcggtctgatgacggtgtttattaacccggtgtttgccttcctgacccgtatcgccgtcaacctgatgcaaatgctcgggctgcaggtggcgatgccgacgctggaacccgatgctttcccattctgggattcctgcatgatggtgctgtcgattgccgcgatggtattgatgacgcgtaaatacgttgagaactggctgctgtgggtgatcatcaacgtcattagcgtagtgatattcgcacttcagggcgtgtatgcgatgtcgctggaatatttgctgctgacgatcattgccctgaatggcagccggatgtggattaacagcgcgcgtgagcggggttctcacgcgctttcacgttaa

SEQ ID NO: 89060 - DNA, 1044 bp, Enterobacter aerogenes
atgagcgtaatgtttgatcctgaaacggcgatttatcctttcccgccaaaaccacaaccgttgaaccgtgacgaaaaagtgttttaccgcgagaaaattaaacgcctgctgcgtgaacgcgacgccgtgatggtggcgcattactacaccgatcctgaaattcagcaactggccgaagagaccggcggctgtattgccgactcgctggaaatggcgcgttttggcgcgcgtcacccggcctccacgctgctggttgccggagtgcgttttatgggcgaaacggccaaaattcttagtccggaaaagaccattctgatgccaacgctgaatgcggagtgttctctggatctcggctgtcccattgatgactttaacgcgttttgcgatgctcatccggatcgcaccgtggtggtctatgccaatacgtcagcggcggtaaaagcgcgcgccgactgggtagtgacttccagcatcgccgtggaattgattgaacatctcgatagcctcggacaaaagatactttgggcgccggaccgccatcttggccgctatgtacagcgccagaccggggccgacgtgctgtgctggcagggcgcctgcatcgtccatgatgaatttaaaacccaggcgctggcgcgcatgaaggggctctaccccgacgcggcgatcctggtgcatccggaatcaccgcaggcgattgtcgacatggcggatgcggtaggatcaaccagccaattaattgctgcggcgaaaagcctgccgcagcgccagcttatcgtggccaccgatcgcgggatcttctataaaatgcagcaggcggtaccggaaaaagatctgctggaagcgcctacggcaggtgagggcgcaacctgtcgtagctgcgcccattgtccgtggatggcgatgaacggcctgaaagcgatagcggaagggttagagcagggcggcgttgaacacgaaattcacgttgacgccaaactgcgtgccggggcattaattccgcttaaccgtatgctggaatttgcggctacactacggggataa

SEQ ID NO: 89061 - DNA, 843 bp, Enterobacter aerogenes
atgcattcattacaacgtaaagtactacgcaccatttgccctgatcagaaaggcctcatcgcgcgtatcacgaatatttgttacaaacacgagctgaacattgtacagaacaatgagtttgtcgatcatcgtaccggccgcttctttatgcgtaccgagctcgaaggtatctttaatgacgccaccctgctcgccgatctcgatagcgcgctgccggaaggctcaatccgtgaactcaatcccgcgggccgtcgccgagtggtgattctcgtcaccaaagaagctcactgtctcggcgatctgctgatgaaagccaactatggcggtctggatgtcgacatcgccgcggttatcggcaaccatgaaacgctgcgcacgctggtagaacgttttgatattccttttgagctggtgagccatgaaggattgagccgcgaagagcacgaccagcggatgggtgatgcgatagccgcccacgatccggattacgtggtactggcaaaatacatgcgcgtacttaccccggagtttgtcgcccgcttcccgaacaaaatcattaatatccaccattcattcctgccagcgtttatcggcgcgcgtccgtatcatcaggcctatgagcgcggcgtgaagatcattggcgccaccgcccactacgtgaatgataatctggatgaaggcccaatcatcatgcaggacgtgattcatgtcgatcatacctataccgccgaagatatgatgcgcgcgggccgcgacgtggaaaaaaacgtcttaagccgtgcgctgtatcaggtgctggcgcaacgcgtctttgtttacggtaatcggacgattattctttaa

SEQ ID NO: 89062 - DNA, 507 bp, Enterobacter aerogenes
atgcactttggcgctctggcgccgtcattcttttccatggaggcgattttgtcgcaattatgcccctgtggcagcgctctggagtatagctcatgttgccagcgatatctgactggcggtcagcttgcgccgagcccgtcacagctgatgcgttcccgctatagcgcattcgtgatgaaagatgtcgattatttaatcaaaacctggcatccacactgtgaggcgccacgctttcgcgccgatatcgaaaaaggctttgccaatacgcagtggcttggtttaaccgttttcgcaaccgataacggccgtagttccgatgaaggctttgtcagctttatcgcacgctttactgaagataaccgtcccggcgcgattattgaacgttccagattcttaaaagaaaacggacagtggtactatattgacggcacccgaccattaattggtcgtaatgacccctgcccttgcggctcaggtaaaaaatttaaaaaatgctgcggccagtaa

SEQ ID NO: 89063 - DNA, 900 bp, Enterobacter aerogenes
atgagaaagctaaagattggtttagcgctaggggctggcgccgcgcgcggttggtcgcatatcggcgtgatcaaagcgctgcatcgggcgggagttgatgtcgatgtggtagcgggatgttcgattggtgccttagtcggtgcggcctacgcctgcaatcgcctccctgcgctggaaaagtgggttagctcctttagcaactgggacgtgctgcgattgatggatctctcctggcggcgcggcggactgttacgcggcgagcgggtgttcaatcaataccggcaaattatgcccgtcgcgcaaattgaagcgtgcgaacgccgttttgccgccgtggcgactaatctgagtaccgggcgcgaattatggtttacggaaggcgatctgcacatggcggtccgcgcttcttgtagtatgcctggcctgatgtcgccggtgatgcataacggctactggctggtggatggcgcggtggttaatccggtcccggtctcactgacgcgagctttgggggcggatattgtgattgccgtcgatctccagcatgacgcccatcttatgcaacaggatttattatcaatagagtcgcctcgtccggagccgatagaggagctcagttggcattcccgtctgcgatcccggttggggagaatgagctctcgccgtgcgacaataacccccacggcgatggagattatgtcaacctcgatacaggtgctggaaaatcgccttaaacgtaatcgtatggcaggcgatccgccggatatcctgctccagccgttttgtccgcaaatctccactctcgattttcatcgtgctggcgaagcgatggccgcaggacagctggccgttgagaaaaaaatggatgaattattacccttggtgcgcacttccgcgtag

SEQ ID NO: 89064 - DNA, 1014 bp, Enterobacter aerogenes
atgacgcagccattggcgggaaaacagattctgatagttgaagacgaacccgttttccgctctctccttgatagctggctaacttccctgggggcgactacccgccaggcggaagacggcattgaagcgctacagcaaatcgcgatttcgaaaccggatctgatgatttgcgatatctcgatgccgaggatgaacggccttgaactggttgagcaggttcgcaaccagggtgaacagctcccgattctgatgatttcagcaaccgaaaacatggcggatattgctaaagcattacgtcttggcgtgcaggatgtcttactgaagccggtaaaagattttaatcgcctgcgtgaaacggtgtatgcatgtctctacccgacaatgtttagttcacgagttgaagaggaagagagattatttgaagactgggacgcgttagttagcgatcccctggcggcgtcaaggttattacaggaacttcagccgccggtgcagcaggagatttcccattgtcgtatcaattatcgtcagcttatctcagcggataagccggggttggtgctggatattgcgccgttatcagaaaacgatctggcgttttattgcctggatgtcacccgcgctggcgataatggcgttctggcggcattattattacgcgctttgtttaatggtttgctgcaagaacaacttgctcatcagggacagcgcctgccggaaatgggcgcattgttaaaacaagttaaccaattactgcgccaggccaatttaccgggtcaattcccattgctggttggttattatcacagcggattaaaaaatttgattctggtttctgccggtcttaacggtacgttgaataccggagagcataaaattcaaattagtaacggcgttccattaggaacgttgggcaacgcatacctcaaccaaattagtcagcgctgcgcatcctggcagtgccaaatttggggagcagggggacgtttacgcttgatgttgtctgcagattga

SEQ ID NO: 89065 - DNA, 903 bp, Enterobacter aerogenes
atggctgcccttaattctaaagtaagaaaagctgttatcccggtagcgggattaggcaccaggatgctacccgccaccaaggctattccgaaagaaatgctgccactggtagataaaccattaatccaatatgttgttaacgaatgtatcgccgctgggattactgaaattgttctggtgacacactcttcgaaaaattctattgaaaaccatttcgataccagcttcgaactcgaagcgatgctggaaaaacgtgtaaaacgtcagcttctggaagaagttcagtctatctgtccgccgcacgtcaccattatgcaggtacgtcaggggctggctaaaggtctgggccacgcggtgctgtgcgcgcatccggttgtcggcgatgagccggttgcggttattctgcccgacgtgattctggacgaatatgagtccgatctgacccgtgataacctggcggagatgattgttcgctttgacgaaacgggcgccagccagatcatggttgagccggttgaagacgtcaccgcttatggtgttgttgactgcaaaggcgaaagcctgcagcctggcgaaagcgtgccgatggttggcgttgttgagaaaccaaaagcagacgtcgcgccgtctaatctggcggtagtcggtcgttatgtgctgagcgccgatatttggccgctgctggcgaaaacccctccgggagccggtgatgaaattcagctgacagatgctatcgatatgctgatcgagaaagaaaccgtagaagcttaccacatgaaaggcaaaagccatgactgcggtaataagctcggctatatgcaggccttcgtagaatatggcgttcgccataaaactctgggcgaagactttaaagcctggcttgcgcaagcggtcgcgaagtaa

SEQ ID NO: 89066 - DNA, 408 bp, Enterobacter aerogenes
atgagcgaagcacttaaaattttgaacaacatccgtactcttcgtgcgcaggcaagagaatgcacccttgaaacgcttgaagagatgctggaaaaattagaagttgtcgttaacgaacgtcgtgaagaagaaagcgccgctgctgctgaaattgaagagcgcactcgtaaactgcaacagtaccgcgaaatgctgatcgctgacggtattgatccgaatgaactgctgagcactatggcagctgttaaagctggcaccaaaactaaacgtgcagcacgtccggcaaaatacagctacgttgatgaaaacggcgaaactaaaacctggactggccagggtcgtactccggcagtcatcaagaaagcaatggacgagcaaggtaaaacactggacgatttcctgctctaa

SEQ ID NO: 89067 - DNA, 531 bp, Enterobacter aerogenes
atgcgtaccgtcgtttataccgctgaaatcgacgaccgctttggttctggcaaagtgagctcacgaatcgggctttcttcaccagcgcggctgtataatcctcagacgtcgttatatgccgatatagcgtcagaacatgcccgccagcccatccattgcgtactggtggacgaaagccagttcctgacccgtgaacaggttcatgagctctcagaagtcgtggatgagctggatatccctgtattgtgctacggcttgcgtacagacttccgcggtgagttattcagcggtagccagtatttgttagcatggtcggataaactggttgagttaaaaacgatttgcttctgtggccgtaaggcaagcatggtgttacgccttgatcaggaagggcggccatacaatgaaggagaacaggtagtgattggcggtaatgagcggtacgtttccgtatgccgtaagcattataaagaggcgttaagcaccggttcattaactcaggtgcaaagtaagctgcgccacggcgaataa

SEQ ID NO: 89068 - DNA, 2679 bp, Enterobacter aerogenes
atggctgttactaatgtcgctgaacttaacgcacttgtagagcgcgtaaaaaaagcccagcgtgaatatgccagtttcactcaagaacaagttgataagatcttccgtgccgccgctctggccgctgcagatgctcgaatccctctcgctaaaatggctgttgccgaatccggcatgggtattattgaagataaagtgatcaaaaaccacttcgcttccgaatatatctacaacgcctataaagatgaaaagacctgtggcgtcctgtctgaagacgacactttcggtaccatcaccattgctgagccaatcggtattatttgcggtatcgtcccgactaccaacccgacttctactgctatcttcaaatcgctgatcagcctgaagacgcgtaacgccatcatcttctctccgcacccgcgtgctaaagacgcgactaacaaagcggcggacatcgtattgcaggcggcgattgccgcaggcgcgccgaaagatctgatcggttggatcgaccagccttccgtagaactgtctaacgcactaatgcatcatcctgacatcaacctgatcctcgccaccggcggcccaggtatggttaaggccgcttatagctccggtaaaccagctatcggcgttggcgcgggcaacacgccggttgttattgatgaaacggctgatatcaaacgcgcagtggcgtctgtactgatgtcgaaaaccttcgataacggcgttatctgtgcttctgaacaatccgtggtggttgtcgactccgtctacgacgccgtccgcgagcgttttgccagccatggcggctacctgctgcagggtaaagagctgaaagccgttcaggacatcatcctgaaaaatggcgcactgaatgcggcgatcgttggtcaaccagcggcaaaaatcgctgaactggcaggcttcactgtgccagctaccactaagattctgatcggcgaagttaccgacgttgacgaaagcgaaccgttcgctcacgaaaaactgtctccgacgctggcaatgtaccgtgcgaaagatttcgaagacgcggtcaataaagcagaaaaactggtcgccatgggcggtatcggtcacacctcttgcctgtacaccgaccaggacaaccagccggctcgcgtggcctacttcggccagatgatgaaaaccgcgcgtatcctgatcaacaccccggcttcccagggtggtatcggcgacctgtataacttcaaactcgcaccttccctgactctgggttgtggttcctggggtggtaactccatctctgaaaacgttggtccgaaacacctgatcaacaagaaaaccgttgctaagcgagctgaaaacatgttgtggcataaacttccgaaatctatctacttccgtcgtggctcactgccaatcgcactggatgaagtgattactgatggtcacaaacgcgcgctgattgtgactgaccgcttcctgttcaacaacggttacgcggaccagatcacttccgtactgaaagcggctggcgtagaaaccgaagtgttctttgaagttgaagctgacccaacgctgactatcgtgcgtaaaggcgcggatctggccaactccttcaaaccagacgtaatcatcgccctgggcggcggttccccgatggatgcggcaaaaatcatgtgggtcatgtacgagcacccggaaacccacttcgaagaactggcgctgcgctttatggatatccgtaaacgtatctacaagttcccgaaaatgggcgtcaaagccaagatggttgccattaccaccacctccggtaccggttctgaagttaccccgttcgccgtagtaaccgacgatgcaactggacagaaatatccgctggccgactacgcgctgactccggatatggcgattgtcgatgccaacctggtcatggatatgccgaagtctctctgtgccttcggtggtctggatgccgtgactcacgctctggaagcttacgtctccgtactggcttctgagttctccgatggtcaggctctgcaggcgctgaaactgctgaaagagtatctgccggcctcttaccatgaaggttctaagaacccggtagcccgcgaacgtgtgcacagcgccgccactatcgccggtatcgcgtttgctaacgccttcctcggcgtgtgccactcaatggcgcacaaactgggctcgcagttccacattcctcacggtctggcaaacgccctgctgatcagcaacgttatccgctataacgcgaatgacaacccgaccaagcagaccgcattcagccagtatgaccgtccgcaggcgcgccgtcgctacgctgagatcgcagaccacctgggcctgagcgctccgggcgaccgcactgcggcgaaaatcgagaaactgctggcatggctggaaagcctcaaagctgaactgggtattccgaaatctattcgcgaagccggcgttcaggaagctgatttcctggctcacgttgataagctgtctgaagacgccttcgatgaccagtgcaccggcgctaacccgcgctacccgctgatcgccgagctgaaacagattctgctggatacctactacggtcgtgactttgtagaaggtgaagcggcggctgtgaaaaaagaagcggctccggccaaagctgagaaaaaagcgaaaaaatccgcttaa

SEQ ID NO: 89069 - DNA, 648 bp, Enterobacter aerogenes
gtgaccctaccgttgtttgatttcgctatttattttaaattttttatcggcctgttcgcgctggtcaatccggttggcatcattccggttttcattagtatgaccagttaccagacggcgctggtacgtaataagacgaatctgacggctaacctgtcggtgggtatcatcctgcttacctcgctctttcttggcgatggcatcttacaaattttcggcatctcaattgattccttccgtattgccggcgggatcctggtggtgacgatcgccatgtcgatgatcagcggcaaactcggcgaagataaacaaaataaacaagagaagtcggagacggccattcgtgaaagcattggtgtcgtaccgttggcattacctttaatggcggggccgggggcaattagttccacgatcgtgtggggcacgcgttatcactcgattgcccatctgattggtttttcaatcgctattgcgttgtttgccgcctgttgttggggaattttccgcatggcgccatggttagtcagattgctggggcagaccggtattaacgtcattacacgtatcatgggtctgttactgatggctttaggcatcgagtttattgttaccgggattaaagcgttgtttcctggattgacagcatag

SEQ ID NO: 89070 - DNA, 1632 bp, Enterobacter aerogenes
atgaccatcatcactaaaaaaagtctggtagcggcgggaattttatctgcgctaatcaccgcaaatgttgctatggcagcggatgttcctgccggggtgcaactggcggataaacaaacgctggtgcgtaataacggggcagaggtgcaatctctggatccgcataaaattgaaggtgtaccggagtccaacgttaaccgcgatctgtttgaagggttagtgattggcgatcttaacggccatcctgtgcctggcgttgccgaatcgtgggataacaaagattttaaagtctggactttccatattcgcaaagatgccaaatggtctgatggttcgccggttaccgcgcaagatttcgtttatagctggcagcgtctggccgacccgaaaacagcatcaccgtacgccagctatctccagtacggccatgtcgccaacgtcgatgagattattgccggcaaaaaaccagcaaccgatctcggcgtcaaagcgatcgacgacaaaacctttgaagtcaccctgagcgagccggtcccttatttctataaactccttgtccatccatccgtttccccagtaccaaaagccgccatcgaaaaatatggtgaaaaatggactcagccggcgaatatcgtcaccaacggcgcctataaactaaaagattgggtggtgaacgaacgtattgtgctcgagcgtaatacgaattactgggacaacgctaaaacggttattaaccaggtaacttacctgccaatttcttctgaagttaccgatgtgaaccgctaccgcagcggcgaaatcgacatgacctataacaacatgccgattgaactgttccagaagctgaaaaaagagatcccgaaagaagttcacgtcgatccttatctgtgtacttattattacgaaatcaataaccagaaagcgccatttaccgacgtacgcgtccgtaccgcgcttaagctggcgctggatcgcgatattatcgtcaataaagtgaaaaaccagggcgatctgccggcttacagttacaccccgccatacaccgacggcatgaaactcgttgaacctgagtggttcaaatggtctcaggaaaagcgtaatgaagaagcgaaaaaattactggcggaagccggttataccgctgataagccgctgacctttaacctgctgtataacacttccgacttacataaaaaactggctattgccgtggcgtccatctggaagaaaaaccttggcgctaacgttaagctggaaaatcaggagtggaaaaccttcctcgacagccgccatcaaggcacctttgacgtcgcccgcgccggctggtgtgctgattacaatgagccgacatcgttcctgaacaccatgctcagcgacagttctaacaacacggcgcattataagagcccggcatttgataagatcatcggcgataccctgcaggtcaccgatgaagcgaaacgcgcagagctgtacgcgcagtcggagcaacagttggataaagattccgcgattgttccggtttactactatgtgaacgcgcgcctggttaaaccgtgggttggcggttataccggtaaagacccgttggataatatttacgtgaagaacctttatattatcaaacattaa

SEQ ID NO: 89071 - DNA, 921 bp, Enterobacter aerogenes
atgttaaaattcatattacgtcgctgtctggaagcgattccgacgctattcatccttattactatctctttcttcatgatgcgtctcgcgccgggcagtccttttaccggtgaacgtacgctgccgccggaagtcatggcgaacattgaagcgaaatatcatttaaacgaccccatcatgacccagtacttcaattatctgaagcagctggcgcacggtgattttggtccttcctttaaatataaagattattcggtgaacgatctggtggcatcaagcttcccggtttccgccaaattgggccttgccgcctttttattagcggtaatcctgggcgtcagcgccggggttattgccgcgttaaaacaaaataccaaatgggactacgcggtgatgggggtggcaatgaccggcgtcgtcataccgagttttgtggtggcgccgctattggtgatgattttcgccatcacgttgcattggctgcctggcggcggttggaacggcggggcgctgaaatttatgatcctgccgatggtggcgttatcgctggcatatattgcaagtatcgcccgtatcacccgtggatcgatgattgaagttttgcactccaacttcatccgtaccgcacgggcgaaaggcctgccgatgcgccgaattatcttccgccacgcgctgaagcctgcgttgctgccggtgctttcctatatggggccggcattcgtcggtattatcaccggctcaatggttatcgaaacgatttacggcctgccgggtattggccagttattcgtcaacggggcacttaaccgcgactactcgctggtgcttagcctgacgattctggtcggcgcgctgaccattctgtttaacgcgatcgtcgacgtactgtacgccgttatcgatccgaaaattcgctactga

SEQ ID NO: 89072 - DNA, 909 bp, Enterobacter aerogenes
atgatgttaagtaagaaaaacagcgaggcgctggagcacttcagtgagaagctggaagttgagggccgtagcctgtggcaggatgcgcgtcgtcgctttatgcataaccgcgcggcggtggccagcctgattgtgctggtgattattgcactgtttgtgactatcgctccaatgctgtcgcagttctcctatttcgataccgactgggggatgatgtccaatgccccggatatggagtctggtcactattttggtaccgattcatccggccgcgacctgctggtgcgcgtggcgattggcgggcgcatatcgctgatggttggcgttgccgcggcgctggtggcggtgatcctcggtactctctatggttcgctttccggctatctcggcggcaaagtggactcggtgatgatgcgtttactggaaatcctcaactccttcccgtttatgttcttcgtgatcctgctggttaccttctttggccagaacatcctgctcatctttgtggcgatcgggatggtgtcgtggctggatatggcgcgtatcgtacgcggtcagaccctgagtctgaaacgtaaagagttcattgaagccgcgcaggtcggcggagtctctaccgcgaatatcgttattcgtcatatcgtgccgaacgtgctgggtgtagttgtggtttacgcatcattgttggtacctagcatgattctgttcgaatccttcctgagcttcctcggccttgggacccaggagccgctgagcagttggggcgcattactcagtgatggcgccaactcaatggaggtatcgccgtggctgttgctgttccctgccgggttcctggtggtaacgctgttttgttttaactttatcggcgatggcctgcgtgatgccctcgacccgaaagaccgctaa

SEQ ID NO: 89073 - DNA, 1014 bp, Enterobacter aerogenes
atgagcacaattgaaatgactaaagcgccgcaggccgcgcagcaaagcggtctgctgctggatgtgaaggatcttcgggtgacgtttaaaacgccagacggcgatgtcaccgcggttaacgatctgaattttaacctgagggccggcgaaaccttaggcatcgtcggtgagtcaggttccggtaaatcgcaaacggcgttcgcgctaatggggcttttggccgcgaatggccatattagcggttccgccacttttaacggtcgcgaaatccttaatttgcccgagcgcgatctgaataagctgcgtgccgaacagatttcgatgattttccaggacccgatgacctcgttgaacccttatatgcgggtcggcgagcagttgatggaagtgctgatgctgcataaagggctgagcaaagccgcggcttttgaagagtcggtaaggatgctcgatgcggtgaagatgccggaagcgcgtaagcgcatgaagatgtttccgcacgagttctccggcgggatgcgccagcgcgtgatgatcgccatggcgctgttatgtcggccaaaactgctgatcgcggatgaaccgaccaccgcgttggacgtcacggtgcaggcgcagatcatgaccttgctcaacgagctgaagcgcgaattcaacaccgcgattattatgattacccacgacctcggcgtggtcgcggggatctgcgataaggtactggtgatgtacgccgggcgcaccatggaatacggtcaggcgcgcgacgtcttctatcaaccgtcgcacccgtactcgatcggtttactcaatgcggtaccgcgtctcgatggcgaaggcgattccttgctaacgattccaggcaacccgccgaacctgctgcgtctgccgaaagggtgtcctttccagccgcgctgcccgcatgccatggaaatctgtaatagcgctccgcctctggagtcgtttgcgccaggccgcctgcgtgcctgctttaaaccggtgggggacctgctatga

SEQ ID NO: 89074 - DNA, 1005 bp, Enterobacter aerogenes
atgaacgccgtgatcgaacaaagaaaagtgctgctcgaaattgccgatctgaaagtgcattttgatattaaagatggcaagcaatggttctggcagccatcaaaaacgctcaaagcggtcgatggcgtcactctgcgcctgtatgaaggcgaaacgctgggggtggttggcgaatccggctgcggtaaatcgaccttcgcccgcgccattatcggcctggtgaaagccaccgacggtaaagtcgcctggctgggtaaagacctgctgggcatgaaacctgaagagtggcgcgatgtgcgtagtgatatccagatgatcttccaggatccgctggcctcactgaatccgcgtatgaccattggcgaaatcatcgctgaaccgctgcggacctatcacccgaagatgcctcgtcaggaagtgcgcgatcgcgtgaaggcgatgatgatgaaggtcggactgctgccgaacctgattaaccgctatccgcacgaattctccggcggccagtgtcagcgcattggtatcgcgcgtgcgctgatccttgagcctaagttgattatttgcgatgagccggtttcggcgctggacgtttccattcaggcgcaggtggtgaacttactacagcaactgcaacgggagatggggctatcattgatttttatcgcccatgatctggcggtagtaaaacatatttccgaccgtgtgctggtgatgtatttaggccacgcggtggagttggggacctatgatgaggtgtaccataatccgctgcacccttataccaaagcgctgatgtcggcggtgccggtgccggatcccgatctggagaaaaacaaaaccatccaactgctggaaggggagttgccttcgccgattaatccgccatcgggttgtgtattccgcacccgatgcccattggccgggcccgaatgcgccaaaacgcggccggtgctggagggcagtttccgccatgcggtttcctgcctgaaggtagacccgttataa

SEQ ID NO: 89075 - DNA, 837 bp, Enterobacter aerogenes
gtggcagtttcgctttccgccgcccgtttgcggctttaccatctactcttcgatcaaactcgtcgctccggccgccgttttgaagggctttgcggtttatttgccctgttgagcgtggttattatttttgttgagtccggactcggttcgcagtatcacctgtcgctagatgaatggcatgtttttgtctggctggaattaggaattaccgcggtcttcaccgcggaatatattttacgcgtaataagctggccgaatccgctgcgctatatcttcagcttctggggatttatcgatctggcgaccgttcttccgctgtatgtaatgtggttatggccggaaatgagccttgagtatgtctttgcctggcgggccatgcgggttatccgcgcgctgcgtattcttaaactgctgcgctttatgccgtcgctgaatattttttggcgggctatcgtcagcgcccgtcaccagctcattctgttctactcgtttattgctattgtgatggtgatttttggctcgctgatgtatttaattgaagggccgcaatatgggtttaccaccttaaatgcctcggtctactgggcaatcgtcacgattactacggtgggatacggcgacattacgccgcatacgccattagggcggatactcgcctcggtgcttattctcatcggttattctatcatcgccatcccgaccgggctgattacgacgcatatgacgacggcgctgcaaaaccgacgtgctcgccgcgtttgcccaaactgcagtaacgccgagcatgataaaaatgcccgtttctgccacgcctgcggaacagaattaccgcaataa

SEQ ID NO: 89076 - DNA, 330 bp, Enterobacter aerogenes
atggatatggatttaaacaatcgcctgaccgaagacgaaacgctcgaacaggcctacgatatctttcttgagctggcggcggataacctcgacccggcggatatcattcttttcaatctgcagtttgaagagcgcggcggcgccgaactgtttgacccggcggaagactggcaagagcatgtcgattacgacctcaatccagatttcttcgccgaagtcgttattggcctggccgataccgatggcggcgagatcaacgatattttcgctcgcgttctgctatgccgggaaaaagatcacaagctgtgccacattctgtggcgcgaataa

SEQ ID NO: 89077 - DNA, 1461 bp, Enterobacter aerogenes
atgacaaccttttacacggtcgtaaactggctggtcattctggggtactggctgctgattgccggcgtgacattacgcattctaatgaaacgccgtgcagtaccttccgccatggcgtggttactgattatttacatcctgccgctggtgggaattatcgcctatctttccttcggcgaattgcatcttggaaaacggcgcgccgagcgcgcgcgcgccatgtggccctctaccgccaaatggctaacggacctgaaaagctgcaagcatatctttgcgcaagaaaatagcccggttgccgaatcgctgttcaaactctgtgaacgtcgccaggggatcgccggcgttaagggtaaccaactacagttgctaaccgaatccgatgacgtgatgcaggcgttgattcgcgatattcagctctcacgacacaatattgagatggtgttctatatctggcagcccggcggaatggccgatcaggtcgccgagtcgctgatggccgccgcgcgccgcggcgtgcattgtcggctaatgctcgattcagccggcagcgtcgccttcttccgcagcccgtgggcggccatgatgcgtaacgccggtatcgaggtggttgaagcgcttaaagttaatctgatgcgcgtgttcttacgccgcatggatctacgtcagcatcgtaaaatggtgatgatcgacaactatatcgcctacaccggcagcatgaatatggtcgatccacgctacttcaaacaagattccggcgtcggccagtgggtcgatctgatggcgcgaatggaaggcccggtggctacggccatggggattgtctactcctgtgactgggaaattgaaactggcaagcgaattttacccccgccgccggacgtcaatatcatgccgtttgaagaggctaacgggcataccattcatactattgcttccggccccggcttcccggaagatttgattcatcaggcgttgttaactgcggcttatgcggcgaaagaacatctgatcatgaccaccccctacttcgtccccagtgatgatctgctgcacgccatctgtaccgcagcccagcgcggcgtcgaggtcagtattattatgccgcgcaaaaacgactctctgctggtaggctgggccagccgcgccttcttcactgaactgcttgctgctggggtgaaaatttatcaattcgaaggcggcctgctacataccaaaagcgtgctggtagatggcgaactgagcctggtcggtaccgttaatcttgatatgcgcagcctgtggctcaatttcgagatcacgctggcgatcgacgacgtgggctttggcggcgacctggcggcggtgcaggacgattacatctcccgctcgcgcctgctggatgcaaaactgtgggccaaacgaccgctatggcagcggatcgcagagcgactgttttacttcttcagcccgttgctgtaa

SEQ ID NO: 89078 - DNA, 297 bp, Enterobacter aerogenes
gtgctttacgtcatctacgcagaagatatcgccgattctctggaaaaacgccaggcggtgcgccctgcccatctggcgcgcctacaactattacatgatgaaggccgtttactgaccgcaggcccgatgcccgcggtggatagcaatgaacctggcgcggcaggatttagcggctcaacggttatcgcagaatttgaatcgctggaagcggcgcagtcctgggccaacgatgacccctatatcgccgcgggcgtctatcagcacgtctcggtgaaaccttacaagaaagtattttaa

SEQ ID NO: 89079 - DNA, 732 bp, Enterobacter aerogenes
atgacccttgatttacctcgccgctttccgtggccaacgctgctgtccgtggctatccacggtgccgttgtggcggggttgctttatacctcggtacatcaggttattgaaaagccttcgccttcacagccaatcgaaatcacgatggtggcgccggcggatttagagcctccgcaggcggcgcagccggtcgttgaacccgttgttgaaccggagccggaaccggagcctgaagtggtgcctgagccgccaaaagaggtgccagtggttatccacaaaccggagccgaagcccaaacccaagccgaaaccaaagcctaagccggagaaaaaagtcgagccgaaacgcgaggtgaagcccgctgagccgcgcccggtctcgccgtttgagaataacaatacggcgcctgcgcgtactgccccgagtaccacggcggcaacggcaaaaccgatgaccaccgcgccgagcggtcctaaagcgttgaaacgcggcgacccgtcttacccgcaacgtgcgcaggcgctgcgtattgaaggtgacgtgcgcgtgaaatttgatgtcaccgccgatggtcgggtggagaatatccagatactctctgcgaagccggccaatatgtttgagcgtgatgtcaaaaccgcgatgcgcaaatggcgctacgaggcaggcaggccgggaacgggtttgacgatgaacatcaaattccgcttaaacggcgtaaaaatggattaa

SEQ ID NO: 89080 - DNA, 861 bp, Enterobacter aerogenes
atgtggcaagctattagcaatttgttaagcgagcagcacactgacggcgctgaaatcgaactgcgcaacgagctacccggcggagagatccatgccgcctggcatttacgttttggcggaaaagattatttcgtcaaatgcgatgaacgcgaactgctccccatttttaccgcggaggcggaccagctggagctgctctcgcgctgtaaaaccgtcagcgttccacaggtttttgccgtcggcagcgaccgggattacagttttctggtgatggaatatttgccgccgcgaccgctggacgcgcataacgcgtttctgcttggtcagcaaatcgcccatttacatcagtggagcgaccagccgcagtttggccttgattttgacaacgatctgtcgacgaccccgcagccgaatgcctggcagcgccgctggtcaacgtttttcgctgaacaacgcattggctggcagctggagctagcggcggaaaaaggactgcacttcggcgatatcgacaacattgtcgaaagtgtacagcagcggctcagcagccatcagccgcagccttctttattacatggcgacttgtggtccgggaactgcgcgctagggcccaatgggccgtatattttcgatccggcatgttattggggcgatcgcgaatgcgatctggcaatgctgcctctgcatccggaacaaccgccgcagatttacgatggctatcagtcggtctcgccgctgcccgctggtttccttgaacggcaaccgatttaccagctatacactttacttaatcgggcaattctgttcggcggccagcacctggtcaccgcgcaaaaagcgctcgatgaagccctgcaatag

SEQ ID NO: 89081 - DNA, 285 bp, Enterobacter aerogenes
atgagcaacgatattaccgcgcacgtgatcaccgttaagttccaggaacaagcgctgactgagattaacgagctcagcaatcatttcattcgcgcaggtttcgtcctgacgctcaacgacgatgatggcaaaacccatgatttaggtactaacacatttggcctgctgagcgcacaaagccccgaagacgttcgggcattaagcgcaggtctcgcggaagccgctttaggcaggccggcagagatcgccatcaccacatttagcgaatggttaaaagctcaataa

SEQ ID NO: 89082 - DNA, 933 bp, Enterobacter aerogenes
atgaccaaaatttatacgctcacgctggccccatcactcgacagcgcaacgctgacgccgcaaatttaccccgaaggcaaattacgctgtagcgcaccggtattcgaacctggaggcggcgggatcaacgtcgcccgggccattacctttctgggtggtaaagcgacggcgattttcccggttgggggcgccaccggcgagcatcttaccgccctgatggcagacgagcaggtcccggtcgaaacaatagaaactcgcgactggacgcggcagaacttacatgtgcatgtcgatgccagcggtgaacaatatcgctttgtcatgcccggcgcggcgctaaccgaggatgagttccgccgcctggaagagaaagtgctggcgattgagcccggctctctgctggttatcagcggcagcctgcctcccggaatcagcgtcgagcatctgactcaactggtaaaaaacgcgcagcagcacgggctacgttgcatcatcgacagctccggcgatgcgctggccgccgcgctggatgtcggcaacatcgagctggtcaaaccgaaccagaaagagcttagcgcgctggtacagcgcgacctcagccagcctgacgacgtgcgtaatgccgcgctggaactgatccgctccggaaaagtacgccgggttgtggtttcgctgggtccgcagggggcgctgggagttgatgccaccggcagcgtacaggtggtgccgccaccgatgaaaagccagagcaccgttggcgcgggtgacagtatggtcggcgcaatgacgctacgtctggcggaacatgcctcgcttgaggatatggtccgctttggcgttgccgctggtagcgccgccacgattaaccacggcacccgcctgtgttcattaaccaacacgcagaaaatctacgattacctgtgtggccgctag

SEQ ID NO: 89083 - DNA, 759 bp, Enterobacter aerogenes
atgaagcttttgaagacagtacccgcagcggcattgctggcgggggggctttttgcgtctgtaaacgcactggccgatgattccgtttttaccgtcatggatgacccttccactgccaaaaaacctttcgaaggtgctgtgaatgcgggttatctcgctcagtccggcaacacgaaaagctcctcaatgaccgctgactccacgttgacctggtacggcgataccacggcctggtcactgtggggcaatgcgagcaacacgtcctctaacgatcaacgctcttcggagaaatatgccgttggcggccgtagtcgttataacctgaccgatatgaactatgtatttggccaggccagctggctgaccgatcgctacaacggctatcaacagcgcgacgtgctgactgccggttatggtcgccagatcctcaacggcccggttcacagcctgcgttttgaatttggtccgggcgtgcgttacgacgagtataccgatggcgataacgaaactcagccgctggggtacgcctccggcacctgggcatggcagatgaccgataacgccaaatttactcaaggtgtttcggtattcggcgctgaagacacgacgctgaactcggaaagcgcattaaatgtggcaatcaacgcccactttgcgctgcgtgtcgcctataacctgacgtggaactcgcagccgccggcttcggcgccggagcataccgaccgccgcaccaccttgtcgctcggttataaaatgtaa

SEQ ID NO: 89084 - DNA, 1929 bp, Enterobacter aerogenes
atgcctgtaattacgcttcctgatggcagccaacgccatttcgaccacgcagttagcccgatggatgtcgctctggatatcggtccaggcctggcgaaagccaccatcgccggacgtgtaaacggtgagctggttgacgcctgcgacccgatcgaaactgactccacgctttctattatcaccgcaaaagatgaagacggtctggagatcattcgtcactcctgcgctcacctgttaggtcatgcgatcaaacagctgtggccgaacactaaaatggccattggcccggttgtcgacaacggtttttactatgatgtcgatctggaccacaccctgactcaggaagacatcgacgcgctcgaaaaacgtatgcatgagctcgccgagaaaaactacgatgtcatcaagaagaaagtcagctggcacgaagcgcgtgaaaccttcgtgaagcgcggcgaaccctataaagtttctattcttgacgaaaacatcggccatgatgacaagccaggtttgtatcatcacgaagaatatatcgatatgtgccgcggtccgcacgtaccgaatatgcgtttctgccatcacttcaaactgatgaaaaccgctggcgcgtactggcgtggagacagcaacaataaaatgttgcagcgtatctacggtaccgcctgggcagataaaaaagcgctgaacgcctacctgcagcgtctggaagaagccgctaagcgtgaccaccgtaaaattggtaaacagcttgacctgtatcatatgcaggaagaagcgccgggtatggtgttctggcacaatgatggctggactatcttccgtgaactggaaactttcgttcgttcgaaactgaaagagtatcagtatcaggaagtcaaaggcccgttcatgatggaccgtgtgctgtgggaaaaaaccggccactgggacaactacaaagatgcgatgttcaccacctcttccgagaaccgtgaatactgcattaagcctatgaactgcccgggtcacgtgcagatcttcaaccaggggttgaaatcttaccgcgatctgccgctgcgtatggctgaattcggtagctgccaccgtaacgaaccgtcgggcgcgctgcatggcctgatgcgcgttcgtggctttactcaggatgacgcgcatatcttctgtactgaagatcaggttcgcgatgaagtgaacgcctgtattcgtatggtttatgatatgtacagcacctttggcttcgagaaaatcgtcgtcaagctgtctactcgcccggaaaaacgtatcggtagcgatgagacctgggatcgcgcggaagcggatctggcggtggcgctggaagaaaacaacatcccatttgaatatcaattgggcgaaggggcgttctacggcccgaaaattgaatttaccctgtatgactgcctcgatcgtgcatggcagtgcggtactgtacagctggacttctccctgccgcagcgtttaagcgcctcttatgttggcgaaaacaacgagcgtcaggtaccagtaatgattcaccgcgcgattctcggctcgctggagcgcttcatcggcatcctgaccgaagagttcgctggcttcttcccaacctggcttgcgccagtgcaggtagtggtcatgaatattactgattctcagtctgaatacgttaacgaattgacgcgtaaactacaaaatgcgggcattcgcgtaaaagcggacttgagaaatgagaagattggctttaaaatccgcgagcacactttacgtcgtgtcccgtatatgttggtctgtggcgacaaagaagtcgaagccggcaaagtggccgtgcgtacccgtcgcggtaaagacctcggcagcatggacgtaaatgaagtgatcgagaagctgcaacaagagattcgcagccgcagtcttcaacaactggaggaataa

SEQ ID NO: 89085 - DNA, 435 bp, Enterobacter aerogenes
gtgagtctgagagaagctatcgaaaaggctgaagaggctggagtagatttagttgaaatcagccctaacgccgaaccgccagtttgtcgtatcatggactacggcaagttcctttatgaaaagagtaagtcttctaaggaacagaagaagaagcagaaagttatccaggttaaggaaattaaattccgccctggtactgatgaaggtgactatcaggtaaaactccgcagcctgattcgctttctcgaagatggcgataaggccaagatcacgctgcgtttccgcggtcgtgagatggcccaccaacagatcggtatggaagtgcttaatcgcgtgaaagacgatctggttgaactggcagtagtcgaatccttcccaacgaagatcgaaggccgccagatgatcatggtgctcgctccgaagaagaaacagtaa

SEQ ID NO: 89086 - DNA, 198 bp, Enterobacter aerogenes
atgccaaaaattaagaccgtacgcggtgctgcaaagcgcttcaaaaaaaccggtaaaggtggttttaagcacaagcacgctaacctgcgtcacattctgaccaaaaaagctaccaagcgtaaacgtcacctgcgtccgaaagccatggtttccaaaggcgatctgggcctggtaatcgcgtgcctgccgtacgcataa

SEQ ID NO: 89087 - DNA, 357 bp, Enterobacter aerogenes
atggctcgcgtaaaacgtggtgtagttgcccgtgcacgtcacaagaaaattttgaaacaagctaaaggttactacggtgcgcgttctcgcgtataccgcgttgccttccaggctgttatcaaagctggtcagtacgcttatcgtgaccgtcgtcagaaaaagcgtcagttccgccaactgtggattgcgcgtatcaacgcagcagcacgtcagaacggtatttcttacagcaaattcatcaacggcctgaaaaaagcctctgttgaaatcgaccgtaagatcctggctgacatcgccgtattcgacaaattagcgttcaccgctctggtcgaaaaagcgaaagcagctctggcataa

SEQ ID NO: 89088 - DNA, 984 bp, Enterobacter aerogenes
atgtcacatctcgcagagctggttgccagtgccaaggcagccattaacgaggcatcagatgttgccgcgctggacaacgtccgcgttgaatatctgggtaaaaaagggcatctgaccctgcaaatgaccaccctgcgtgagttgccgccggaagagcgcccggcagcgggtgcggtcattaacgaagcgaaagagcaggtgcagcaggcgctgaacgcgcgtaaggctgagctggaaggcgccgcgctcaatgcccgtctggcggcagagaccatcgacgtctcgctgccggggcgccgcatcgaaaacggcggtttacatccggttacccgcaccatcgatcgtatcgaaaacttcttcggcgaactcggcttcaccgtggcgactggcccggaaatcgaagatgactatcataacttcgatgcgcttaacattccgggtcaccatccggctcgcgccgaccatgataccttctggttcgatgcgacccgtctgctgcgtactcagacttctggcgtgcagatccgcaccatggaaaaccagcagccgccaattcgtattatcgcgccgggccgcgtctatcgtaacgattacgatcagacccacaccccgatgttccatcagatggaaggtctgattgttgataagaacatcagcttcaccaatctgaaaggtaccctgcacgatttcctgaataacttcttcgaagaagatctgcaggtacgcttccgtccgtcctacttcccgttcaccgaaccgtctgcagaagttgacgtgatgggtaaaaacggaaaatggctggaagtgctgggctgcggcatggtgcacccgaacgtactgcgtaacgtcggtatcgatccggaagtatactccggcttcgctttcggcatgggcatggagcgtctgaccatgctgcgttatggcgtgaccgatttgcgcgcattcttcgaaaacgatctgcgtttcctcaaacagtttaaataa

SEQ ID NO: 89089 - DNA, 2388 bp, Enterobacter aerogenes
atgaaattcagtgaactgtggttacgcgaatgggttaacccggcgatcgacagcgaagcgctgtccgatcagattaccatggcgggcctggaagttgacggcgttgagccggtggccggtagcttcaacggcgtggtcgtcggtgaagtggtcgagtgcggccagcatccgaatgctgacaaactgcgcgttactaaagtcaatgtcggcggcgagcgtctgctggacatcgtctgcggcgcgccaaactgccgtcagggcctgaaggtggccgtcgcgaccattggcgccgtactgccgggcgattttaaaattaaagcggcgaaactgcgcggtgaaccgtcagaagggatgctgtgctctttctccgagctgggtatttccgacgatcatagcggtatcatcgaactgccggccgatgcgccgattggtaccgacattcgcgaatacctcaagcttgacgacaacaccatcgaaatcagcgttacgccaaaccgcgccgactgcctgggtatcatcggcgtggcgcgcgatgtcgctgtgctgaacaaagcgccgctgaacgcgccggaaatcactccggttgccgcgaccattgacgacgtgctgccgattcaggttgaggcgccgcaggcgtgcccgcgttatctgggccgcgtggtgaaaggcatcaacgtcaaagcgccgaccccgctgtggatgaaagaaaaactgcgccgctgcggtatccgttccatcgatgcggtggttgacgtgaccaactacgtgctgcttgaactgggccagccgatgcacgcctttgaccgcgaccgcattgaaggcggtatcgtggtgcggatggcgaaagagggcgaaacgctggtgctgctggacggctctgaagctaagctcgatagcgatacgctggttattgctgaccataagaaagcgctggcgatgggtggtatcttcggcggcgaacactccggcgttaacgatgaaacccagaacgtgctgttggaatgcgcgttcttcagcccgctgtctatcaccggtcgcgcgcgccgtcatggcctgcacaccgatgcatcccatcgctacgagcgcggcgtcgatccagccctgcagtataaagcgctggagcgtgcgacccgtctgctgatcgacctgtgcggcggtgaagctggcccgattatcgatgtaaccaacgaagagacgctgccaaaacgcgccaccatcaccctgcgccgcagcaagctggatcgcctgattggccatcatatcgatgacgcgcaggttagcgacattctgcagcgcctgggttgcgaagtgaccgttggtcaggaccagtggcaggccgttgcgccaagctggcgtttcgatatggagatcgaagaagatctggttgaagaagtggcccgcgtctacggctacaacaacattcctgacgagccggtacaggcgggtctcatcatgggaacccaccgtgaagcggacctgtcgctgaagcgcgtgaaaacgctgctgaacgacaaaggttatcaggaggtcattacctacagcttcgttgacccgaaagtacagcagctaatccacgccggtgaagaggcgctgattctgccaagcccgatctccagcgaaatgtcggcgatgcgcctgtcgctgtggaccggcctgttgggcaccgtcgtctacaaccagaaccgtcaacagagccgcgtgcgcatctttgagagcggtctgcgcttcgtgccggatactcaggcgccgctgggcattcgtcaggatgtgatgctggctggggtgattagcggtaaccgctacgaagaacactggaacctggcaaaagaaaccgtcgatttctatgatttaaaaggcgatctggaatctgttcttgatctgaccggtaaattagccgatatcgaattccgcgcagaagcggctaccgcactgcatccgggacaatccgcggcgatttatctgaaaggtgaacgcattggtttcattggggttgttcatccggaactggaacgtaaactggatctcaacggccgcactctggtgttcgaaatcgagtggaacaagcttgcagaccgcgtggtgcctcaggcgcgcgaaatttctcgcttcccggcaaaccgtcgcgatatcgcggtactggtcgcggaaaacgtccctgcagccgatgttttggccgaatgtaagaaagttggcgtaaatcaggtagttggcgtaaacttatttgacgtgtaccgtggtaagggtgtggcggaaggctttaagagccttgcgattagcctgatccttcaggataccagccgtacactcgaagaagaggagattgccgctaccgttgccaaatgtgtagaggcattaagagagcgattccaggcatcattgagggattga

SEQ ID NO: 89090 - DNA, 300 bp, Enterobacter aerogenes
atggcgcttacaaaagctgaaatgtcagaatatctgtttgataagcttgggcttagcaagcgggatgccaaagaactggtagagttgtttttcgaagagatccgtcgtgctctggaaaacggagaacaggtaaaactctccgggtttggcaacttcgatttgcgtgataagaaccaacgcccgggacgtaacccgaaaacgggggaagatattcccattacagcccggcgtgtggtgaccttcagacccggacagaagttaaaaagccgtgtcgaaaacgcttcacccagagagaaataa

SEQ ID NO: 89091 - DNA, 354 bp, Enterobacter aerogenes
atgacaattattcgtaataacccgcaaccccgactttccgccagcgtcgagtacggcaacctggtgtttctctccggccaaacgccgaaaagcagcgctgatgatattgcgctgcaaacccgcgaagtactggagaagatcgacgccctgctggtcgccgtcggtagcgacaagcagcacatcctttccgcacaaatctggcttaaagatatctcacgcgattttgccgcgtttaatgaggtctgggtggcgtggatgccggaaggccatagcccggcgcgggcagccgttcaggccgagatggcgcggccagatattctggtggagatcatggtcaccgccgtaaaagcgtaa

SEQ ID NO: 89092 - DNA, 1254 bp, Enterobacter aerogenes
atgaaaaaacgcattgtgattatcggcggcggcgtggtagggctggccaccgcctgggtattaattaagagcggacaccaggtgcagctactggagcgcaacgccgagccgggcagcgccacaagtttcgccaacggcgggcaattaagctaccgctacgtggcgccgcttgccgaccgtggcgtccccctgcaggggattaaatggatgggcaaagccgattcgccgctgaatatgcgcctgcaaatgtctttccagcagtggcgctggctgttgcagttcctgcgcgcctgcaatagccaaagcaacaaaattaacggcgatcatattttacgcttatccctgctcagccgtcaggttatgcagtcgtggcttgatgaagataatcttgctgattttcactggcggcgtagcggtaaactcattatccatcgccgggagtacgactttcataaagcggcgaaagggattaatccccagtatcagcatgccctgagcgccgaagcctgcctgcagctggaaccggcgctgaaacacatcagccattcgctacaaggcgggatttattcaccgggagatgaaacggcagactgccataaattctgcctcgccctgctcgacaaactcaatgccagcagcaacttcagcctgctcacccactgcgaggtgctgcgactcaataagcgcgacgggcgcatcagttcgcttgagaccagccgcggtacaataaccggcgatgattatgtcgtcgccgccggcaacggtagcggcccactgctgggtcatctgggcgtgcgcgtgccgctgtgcgcgctgaagggatacagcctgacccttccctaccctaaagaggccgggatcgcgccggatatcagcgtgactgactacggacacaaaatcgtttacgcccgcctgggcgatcggttacgcatcgcggcgatggtggatatcggctacgacggtgaagaaatacgggatagccgcgttcaggcgctgaaaaatatcgtcgcgaacagcttccccgatctgcaggggctggatgaggctgaagcctggaccggtacgcgcccgtcgacgccagcgggcccaccgatgctggggcgcgccggataccagaatctgtggatgaatctcggccagggtagccttggttttacgctcgcggccggcagcgccgtgatactgggggcactcctcgatggcgaagcgccggcaatttctttagatggtctgacatggaaacaatccgcatga

SEQ ID NO: 89093 - DNA, 915 bp, Enterobacter aerogenes
atgaaactgcgccatctggaaatcttctacgccgtgatgacttgcggctctctttcacgtgcggcggaatcgctgaatatctcccagccggccgccagtaaagcgttaaaaaacgccgagcttaagctcggttttaagctgtttcagcgggtacggggtaagctgctgccaagtagcgaagcgctcacactttttgaaaaagcgcagagcatttatcaggatctcgataacctgcgcctgctggcggataatctggcccgcgatccgcgcgccaaaatcaccttaggctgtttaccaagccttggattaagcctggtgccggagctggtgaccgatttttatcagcaaaacagtaatctggtgatgaccttaaccaccgagcatactgagacgctggtcaaaaaattggatctgcgcgaaatagatttagcgctgacgctgcagccggttcagcagggggaaataatcactaccctgattgccgaagtaccgctggtctatatcgaccgcgactaccgacaaggcgcggtggacatcaaagagatcgatcagcagcgctggatatcgccagggccgcattcgctctctgccgccatcgccacccgccgtgatttttccactacccggcttaatgtacagacctactacatggccaccgagttcgtgaagcgcggtatcggctgcagcatcaccgatatcttctcggcgcggcataatctgtcgccggagatgattcacccgattacgccgccgatgaaaatcaacctatgcctgctgcgtcgcgccgatgtttcgctcagcccaatcacacagaaatttgtcgattttctgtgtaaacagctgcgtcaacagctcaaagaaattaacctgcagttataccctgaccataaaaagtcaattgcgccgctggggtaa

SEQ ID NO: 89094 - DNA, 1434 bp, Enterobacter aerogenes
atgagtgactcaacgctcgctggcaatacgctcgccagacgaaatatcacaagaaaaaacgttattattggcctgttattggtgctgtttgtgttgaccgcgtggtggtgccatggccgcccgagtaatgaactcggcctgttgggctttacgccattagtggcgttagcggtgctgtctctggtcggtgtcgatattgtgctggcggtgatttcttcaattattatcgccatgattatgacctccaccgggttgccggaaatgggcaccatgctggcgaaatccaccggttcatttatcgccaccgtcgggctgattattatgctcggcgccggggtgggcgaagtcgccacccgtaccggcgccgcggttgagttagtgaaatttgtggttcaccgcattggcctttccagccagacccgagtgaagtttggcattgtggtgtcctcgattttaatctgcggttcgctggggacgatggctggtggtaacgcgattattgtcgcggtgatcatcccggtggcggcagcggtacgcctgactccgccgacggtggccgcgctgatgatgaccgccggatccgtgggattgtttaccgggccgtttacccccagcaccgtgactatcctgagcctcggcggattaagctatccggattatctgctgtacgtggggctgccgatgagtgcggtgacgctgctggccggctgggtgatggcggggcggatccagaagatgaccgaaggaaaactgcgctatgaagtcgatctcacggagaagccaacagaagcactgagcgccgcgcagctgcgtcggcgtaagcttagcgcgctggccttcgcggcaacgattattgtaatggcagtcattggcgtggtgatcaaagccggatttagctttgcgattatcgtgatgctgctggtggccttgattaccgggctggtgggcggcctgcgcccgacgcagatcctgcaggcgctgtaccacggttgtggccgtctggtgtggatgtttatcctctactggctgtataacccgatcctggagctgatggatggccttcatgcctatcaggggctgctcgactatacccagccgctgctggaaggtatttcgcctgcctggctgtgcttttgcatcttcgctttcaatattattggccacgtaccgggggcggcggtggcgcagatgaccttcacccacaaaattttcggcccgatgctaatggccgccggcgtgccgccgcaggggactaccgcggtgttactggcctcttcgcaggtcgactggtttggcccattcccctcttcggatatgtttggtcaaatggggctggcgcagtctacccacctgaaatacatgctgtataacggctgggcgattgtggtggcgaatatcattctcttcgcgttactgttccaggtattggtgtaa

SEQ ID NO: 89095 - DNA, 987 bp, Enterobacter aerogenes
atgcagaccttcgccgatattcaacagcgccataaccgtcgttggctaaccgccttaacgctgatcctgctcgtcacattgactattagcctgtgcgccggcgaccaatggatcccgccgcaggagtggtttagcgccaaaggcgagctgtttatctggcaaatccgtctgccccgcacgctggcggtgctgttagtgggggcggcgctggcgctttccggcgcgatcatgcaggcgctgtttgaaaacccgctggcggaaccgggactgttgggcgtctctaacggcgcgggcgttgggctgattgccgccgtgctgttaggccacggcgtgttacccatgtgggcgctggggctgtgtgccattgccggcgcgctgctgattacctttattctgctccgtttcgcccggcgtcacctgtctaccagccgtctgctgctggcgggcgtcgcgctcggtattatttgtagcgcgttgatgacctgggcggtctatttctcaacctcttttgacctgcgccagctgatgtactggatgatgggcggttttggcggtgtcgactggcagcagctgtggctgatgctggcgctgctaccggtgctgctgtgggtatgctggcagtcgcagccgctgaatttattggcgttgggcgaagtctcggcgcgtcagctcggcctgccgctgtggctatggcggaaattactggtggtggccaccggctggctggtcggcgtcagcgtggcgctggcgggggcgattggctttattggtctggtgatcccgcatattttgcgcctgtgcggcctgagcgatcatcgggtgctgcttcccgcctgcctgttagctggcgccagcgcgctgctcggcgccgatatcatcgcccggttggcgttatcggcggcggaattaccgatcggcgtggtgacggcgacgctgggggcgccggtgttcatctggttgctgctgcgttcagggcgacgggggtag

SEQ ID NO: 89096 - DNA, 801 bp, Enterobacter aerogenes
atgaagaagttgttaagctcggtgttaatcgccacatcggtggcgctgttatccgcctgctctccggacgataacaataaggttaaagtcgcgatcaataccggcccggatgaagctatctggaaagtcgtagagcaggtagcaaaagacaaatataacctcgacgttgaggttatctctttcaatgattacgtcctgccgaatgaagcgttaaataataaggatgtcgacgctaacgctttccagacgctgccctatctcgaagcgcagtcgaaagagcgcggctataaattcgccatcgtcggtaaaacattcgtcttcccgattgccgcctattcgcgcaaaatcaaaaatatcagcgaactgcctgacggcgcgaccgtctctatctctaacgaaaccaccacgcttggccgcagcctgctgctgttacaggcgcaaggattaatcaagttgaaagacggcgtaggctatctgcccactacgctggatatcattgataacccgaaaaatctgaagattgtcgaagtcgatactccgcagctgacccgtacgctcgacgacccgaacgtaacgctggccatcatcaacactaatttctcggcgcaggtcggtttatccgccgcccgcgatggtctgtttatggaaggcccggattcaccttatgtcaatgcgattgtggcgcgcgaagataataaagacagcaagaaaattcaggagctgaaagaggccttccagaccagggaagtcgccgataaagcgcaggaagtctataaaggcgatgccatcaaaggctggtaa

SEQ ID NO: 89097 - DNA, 552 bp, Enterobacter aerogenes
atgcaacacgacattcttaataccgaagtgacgaccatcgatggcgaaaaaaccaccctggcggcgtatgccggaaaggtgctgctgatcgtcaacgtggcctcaaaatgcggcctcacgccgcagtatgagcaactggaagcgctgcaagaagagtttgccccgcagggattcagcgtccttggcttcccttgtaatcagtttctcggccaggagccgggcagcgaagaagagattaaaacgttctgcagcgtgacctacggcatcaccttcccgctgttcagtaaaattgacgtcaacggcgaacatcgcgcgccgctgtatcaaaaattgattgccgccgccccgaaggccgtcgcaccggaagggagcgggttttatgagcggatggccagtaaagggcgcgcaccgctgtacgttgatgacatcctgtggaactttgaaaaattcctcgttggccgcgatggccaggtcattcagcgtttctcgccggatatgacgccggacgatccgcaactgctggctgcggtaaaaggagcgctggcgcaataa

SEQ ID NO: 89098 - DNA, 750 bp, Enterobacter aerogenes
atgccgtttttgatgcagctacaggatgtagcggaagcggggcggttgtcgccgtttaccgctgacgtgcggcccggtgagataatccatctcgtggggccgaatggcgccggcaaaagtaccctgctggcgcgcatggccgggctgaccagcggtcccggtttgattacgcttaaccagcgggcgctggctcagtggcccgcagcggagcttgcccgccatcgcgcctatctgagccagcagcagctcccgcccttcgcgatgccggtgtggcactatctgtcgttacatatgcaggatagcgccgcgcaggagttgctcaacgagattgccgggcaactgggcttaagcgataagctggggcgccaggtcaaccagatctccggcggcgagtggcagcgggtgcgtctggcggcggtgatcctgcagattcaccggcgcgcgaatccagccgggcaactgttgttattggatgaaccaatgaacagccttgatgtggcgcagcaggcggcgctggataacgtgctggcgtcgctgtgcgcgctggggatcgctatcgtgatgagcagccacgatctcaaccatacattgcgtcatgcgcagagggcgtggctcatttgtaaggggcagatgattgcctgcggggaaacgtatgaggtgttaagtgaagagaatttgaccgccgcttatcatatcgctttccagcgggtggaagtcgcgggtcatcttatgctcgtggcgtcacagtag

SEQ ID NO: 89099 - DNA, 465 bp, Enterobacter aerogenes
atgcgtgtgtggttcattcttattgcggcgatggtgctggcaggctgtagcagccaccgcgcgccgccgccgaatccacggctggctgattccattaccgtggtagccaatctcaatgagcaattgcgcaactggcgcggcgcgccgtaccgctatggcggcatgacgccacgcggcgtcgactgctcgggctttgtggtacgcacgttccgtgacaaattcgccatgcagctgccgcgggaaactcgcgagcaggcggaaatcggcacccgtattgataaaagcgatctgttgcccggcgacctggtgttcttcaaaaccggctccggcgaaagcggcctgcacgtcggtatctatgataccgacaatcaatttattcacgcctccaccagccagggcgttacccgctcgtcactggacaacgtctactggaataagaaattctggcaggcgaggcgtatttaa

SEQ ID NO: 89100 - DNA, 1443 bp, Enterobacter aerogenes
atgaccctgtcttttactactcactggcgcgatcggctgccgggtttttacacttctctggcgcccacgccgctggataacgcgcgtctcatctggcgcaacaccgcgctggcgcaaacgctgggcgtcccggagacgttatttaatccgcaacatggggcgggcgtctggggcggcgaagcggtgctgccgggaatgtcgccgctggcgcaggtctatagcggccatcaatttggcgtctgggccggccagcttggcgacgggcgcggaattctgcttggcgagcagcagttgccggatggtcaacgttttgactggcatcttaaaggcgccggtctgacgccctattcgcgaatgggcgatggccgggccgtactgcgctcgactatccgcgaaagccttgccagcgaagcaatgcatgcgctggggatcccaactacccgcgcgctggcgatggtgaccagcgacacgccggtttaccgcgaacgcgaagaacgcggcacgatgctgatgcgcatcgccgaaagccacgtccgctttggccatttcgaacatttttactatcgacgcgaagcggaaaaagtgcagcagctggcagattatgtgattgaacaccactggccgcagctgcagcaggaggcggataagtatattctttggttccgtgacgttgtcacgcgtaccgcggaaatgatcgccagctggcagaccgttggctttgcccacggggtgatgaataccgacaatatgtcgattcttggcctgaccatggattatggtccatatggcttcctcgatgatttccagcccgggtttatctgcaaccactctgattatcaggggcgttatagctttgataatcaaccggcggtagggttgtggaacctgcagcgtctggcccagtcgctctcgccgtttatcagcgccgacgcgctgaacgcggcgctggatgactatcagcctgcattattgactgcctacggccaccgcatgcgcgacaaactcggcttctatactcagcaaaccggtgataacactctgcttgatggactgttcagcctgatggagcgtgaagggagtgactacactcgtaccttccggatgctgagccaaagcgagcagcacagcgcggcatcgccgctgcgcgatgaatttatcgaccgcgcggcctttgatagctggtttgccgactaccgggcgcggctgcgcgatgaacagatcgacgatagcgaacgccagcagcggatgcagggcgtcaacccggcggtggtgctacgcaactggctggcgcagcgggcgatagaaaaagccgaagatggcgacatgggcgagttggaacgtctgcatgaagccctcgcgcagccgtttgccgatcgtacagatgattatgccagccgcccgcctgattggggtaaacatctggaagtgagctgctccagctaa

SEQ ID NO: 89101 - DNA, 249 bp, Enterobacter aerogenes
gtgaaaattaacattactgataatgattatcattgttgcttttatttttattttggtgctatgacgcgtatggataacactgccacagctgagaaaacgaaagacaatgctccctatccccttgccagcgatcgccaaatcagcagccggacgctgttgggtgcggaaggtcgcgtggtgatcgaacatgacggtcagcgctatctgctgcgccagacccacgccggtaagctaattttgaccaaataa

SEQ ID NO: 89102 - DNA, 1047 bp, Enterobacter aerogenes
atgaataaaacagacgaattgcgtaccgcgcgcattgaaagcctggtaacgcccgcggaactggcgcagcgccatcccgtgacggccgaggttgccgcccacgtctccgcctcccgccggcggattgaaaaaatcctcaacggcgaagaccgccgcctgctggtaattatcggcccctgctccattcacgaccctgaagcggcgctggaatatgcgcgccgcctgcagggcatgcgcgaacgttaccagccgcagctggaaattgtcatgcgcacctatttcgaaaaaccgcgcaccgtcgtgggctggaaaggtcttatttccgaccccgatctcaacggcagctaccgggtcaatcacggtatcgaactggcgcgtcgtctgctgctgcagatcaacgagctgggtatcccaaccgccaccgaattcctggatatggtgaccgggcagtttatcgccgatctgattagctggggcgccatcggcgcgcgcaccaccgaaagccaaatccaccgcgagatggcctcggcgctctcctgcccggttggttttaaaaacggaaccgacggcaacacccgtatcgcggtcgacgcgatacgcgcctcgcgcgccagccatatgttcctgtcaccggataaacagggccagatgaccatctaccagaccagcggtaacccgtacggccatatcattatgcgcggcggtaaacggccaaattatcatgctgcggatatcgccgccgccggcgaagcgctacgcgaattcgatctccctgagcaactggtcgtcgactttagccacggcaactgtcagaagcagcatcgccgtcaactggaagtgtgcgccaatatctgccagcagatccgcgagggctccaccgccattgccgggatcatggcggagagcttcctcgccgaagggacgcaaaaagtgatccccggtcagccgctgatctggggccagtcgattaccgacccgtgcctgagctgggaagatagcgaaaaaatgctcgctgaactggctgcagccaccgctacacggttgtaa

SEQ ID NO: 89103 - DNA, 834 bp, Enterobacter aerogenes
atggacagtgctgtagatcgccacgtattttatatttctgacggtaccgctattacggcggaagttttaggccatgcggtaatgtcgcaattcccggtggctatcagtagcgtaaccctgccgttcgtcgaaaacgtcagccgcgcccgggcggttaaagagcaaatcgatgccatttttcaacaaaccggcatccggccgctggtcttctattccatcgttatccccgaaattcgcgacattattttgcaaagcgaggggttttgtcaggatatcgtgcaggcgctggtagccccgctgcaacaagagttacatctggatcccacgccggtggctcaccgcacccacggcctgaatcccggtaacctgattaaatacgatgcgcgtatcgccgccatcgattacacgcttgcccacgatgatggcatctcgctgcgcaatctcgatcaggcgcaggtgatcctgctcggcgtttcgcgctgcggcaaaacgccgaccagcctgtatctggccatgcaatacggtattcgcgccgctaactacccttttatcgccgacgatatggacaatctggttctcccggcctcgttaaagccgctgcagcacaagatgttcggcctgacgattaacccggagcgactggcggcaatccgcgaagagcgccgggaaaatagccgctacgcctcgttgcgccagtgccgcatggaagtgaccgaagtcgaagcgttgtaccgcaaaaacaagatcccctgcctcaacagcaccaactattcggtagaggaaattgccaccaaaatcatggatatcatggggctgaatcgcaggatgtactaa

SEQ ID NO: 89104 - DNA, 2379 bp, Enterobacter aerogenes
atgtccaacaatggctcgtcaccgctggtgctttggtataaccaactcggcatgaatgatgtagacagagttgggggcaaaaatgcctcccttggtgaaatgattactaacctgtccggtatgggtgtctccgtaccaaacgggttcgccaccaccgctgatgctttcgatcagttcctggaccaaagcggtgttaaccagcgcatttatgcactgctggatgaaaccgacattgacgacgtttccgcattagcgaaagcgggcgcgcagatccgtcagtggatcatcgacacccccttccagagcgaactggaaaacgcgattcgcgaagcttatgacctgctgtccgccgatgacgccgaggcctcgtttgccgtgcgctcttccgcgacggcggaagatatgccggatgcttccttcgccggtcagcaagagacattcctcaacgtgcagggctttgacgccgtgctcgttgccgtgaagcacgtattcgcttcactgtttaacgatcgcgcgatctcctatcgcgtgcatcagggttacgatcaccgcggcgtggcgctatccgccggggtgcagaggatggtgcgctccgacctggcctcctccggtgtgatgttctccatcgataccgagtccggtttcgaccaggtggtgtttatcacctcggcgtgggggcttggcgagatggtggtgcagggcgcggtgaacccggacgaattttacgtccataaaccgaccctggcggctaatcgtccggctatcgtgcgccgtaccatggggtcgaaaaaaatccgtatggtttacgcgccgactcaggaacacggcaagcaggtgcgcatcgaagatgtgccgcaggcgcagcgcgatgttttctcgttaaccaacgaggaagtggaagagctggcgaagcaggcggtgcagatcgagaagcactacggtcgcccgatggatatcgagtgggcgaaagatggccataccggtaagctgtttatcgtccaggcgcgcccggaaacggtccgttcgcgcggtcaggtgatggagcgttatacgctgcatgcccaggggcagatcatcgccgaaggtcgagctatcggccaccgtatcggcgccggcccggtcaaggttatccacgatatcagtgagatgaaccgcatcgagcctggcgacgtgctggtcaccgacatgactgacccggattgggaaccgatcatgaagaaagcctcggcaatcgtcaccaaccgcggcgggcgtacctgccacgcggcgattatcgcccgtgagctgggcatcccggcggtggtcggctgcggcgatgcgaccgatcgcatccaggaaaaccagaacgtcaccgtttcctgcgctgaaggcgacaccggctatgtctacgcggagctactggacttcagcgtgaagagctcaagcgttggcgagatgccgaatctgccgctgaaagtgatgatgaacgtcggcaacccggatcgcgcctttgacttcgcctgcctgccgaatgaaggcgtgggcctggcgcgtctggaattcatcatcaaccgcatgattggcgttcacccgcgtgcgctgctggagtttgacgaccaggagccgggcctgcagaacgaaatccgcgagctgatgaaaggctacgactcaccgagagagttctacgttggccgcctgaccgaagggatcgctacccttggcgccgccttctacccgaaacgggtgatcgtgcgtttgtccgacttcaaatctaacgagtacgccaacctggtgggcggcgagcgttacgagccggaagaagagaacccgatgctcggattccgcggcgccggacgctacgtttcagaaagcttccgcgattgcttcgcgctggagtgtgaagccatgaaacgcgtgcgtaacgacatgggcctgaccaacgtggaagtgatggtgccattcgtacgtaccgtggcgcaggcgaaagcggtggttgaagagctggaacgtcagggactgaagcgcggcgagaacgggctgaagatcatcatgatgtgcgaaatcccgtcgaacgcgctgctggcggagcagttcctcgagtacttcgatggcttctcgattggctcgaacgacatgacgcagctggcgctgggcctcgatcgcgactccggcgtcgtgtctgagctgtttgatgaacgcaacgacgcagtgaaagcgctgctgtcgatggccatccgcgcggcgaaaaaacagggcaaatacgtgggcatctgcggccaggggccgtccgaccacgaagactttgccgcctggctgatggaagaggggatcgatagcctgtccctgaacccggataccgtggtgcaaacctggttaggtctggctgaactgaataaataa

SEQ ID NO: 89105 - DNA, 1125 bp, Enterobacter aerogenes
atgattaaccaacatcagccccgggacataccgcaaattctgctgtcggtgctgtttttgtccctgataattatttcctgcctgtgggttgtgcaaccatttattctctcttttgcctgggccggtaccgtggtcatcgccacctggccggtgctgctgcgtctgcaaaagctgctgtttggcaagcgctcgctggcggtgctggtgatgacgctgctgctgtttttgctgttcgttattcctatcgccttattggtgaatagcctggtcgataatagcgccccgctgatcaaaatcgtcagcaccggccaggtaacgctgccggatttcgcctggctgaactcgattccgctgatcggcgataaactctattccgcctggcatagcctgctggagatgggcggcgcggcgattatggctaaggttcgcccttatattggcgccaccaccacctggtttgtcggccaggcggcgcacattggtaaacttctggtttactgcggactgatgctgttgttcagcgccctgctttactggcgcggcgagcgcgtcgcctatggtttccgctacttcgcgacccgtctggcctcaaagcgtggcgatgctgcggtggtcctcgccggacaggcggtacgcgccgtagcgctgggcgtggttgtcaccgcgctggcgcaggcggtgctcggcggtatcgggctggcgataagcggcgtgccttacgccgcgctgttgaccgtggtgatgattttcacctgtctggtacagctggggccgcttatcgtgctggtcccctcaattatctggctatactggaccggcgatacgacctggggcacggtgctgctggtgtggagctgcgtggtgggtacgatggataacgtgattcgcccggtactgattcgcatgggcgccgacctgccgatgattctgatcctctccggcgttatcggcggcctgatcgccttcgggatgattggcctgtttatcggtccggtgctgctggccgtctcctggcgtctttacgacgcctgggtgcaggaagtgccgccaccgccgctagacccggatctggttctggcggagctcgccgagcttaatgccagccataacaaaagcgaaaagtaa

SEQ ID NO: 89106 - DNA, 3057 bp, Enterobacter aerogenes
atgatcccacagatttctcaagcgccgggcgtcgttcagctggtgctgaattttttgcaagtactggagcaacaaggtttcaccggcgataccgccaccagctatgccgaccggctcaccatggcgaccgataacagcgtctatcagctgttgccggacgccattctgtttccccgttccaccgcagacgtcgctttactggcgcggctggcggcggagccacgctttaaatcgctgatttttaccccacgcggcggtggtaccggcaccaatggtcaagcgctgaacgcggggattatcgtcgatatgtcgcgctatatgaaccgtattatcgaaatcaaccccgaagagggatgggtgcgggtcgaagccggggtaatcaaagaccagcttaaccagtttcttaagccctacggctatttctttgcccctgaactgtcgaccagtaaccgcgcgacgctcggcggtatgatcaataccgatgcctccggacaggggtcattggtctacggtaaaacctccgatcatgtgcttggggtgcgctcggtgctcatgggtggcgatatccttgataccttacccattcccgccgcgctggcggaaacgctggggcgcgagcagtcagcgattggccgcatctaccgtaccgtctatcagcgctgcaaagcgcagcgtcagctgatcatcgataaattcccaaaactgaaccgcttcctgaccggctacgatttgcgtcacgtgttcaatgatgagatgagcgagttcgacctgacgcgcattctgaccggctccgaaggcacgttggcatttattaccgaagcgcggctcgatattacgcgtctgccgaaggtacgccggttggtcaacgtcaagtatgactcttttgattcggcgctgcgtaacgcccccttcatggttgaggcaaaggcgctgtcggtggagaccgtcgattcgaaggtccttaatctggcgcgcgaagatatcgtctggcactcggtgagcgaactgatcgccgatgtgccggaaaaagagatgctggggctcaatatcgttgagtttgccggtgatgatgctgaattaatagatggccaggtaaccaccctgtgtcagcgtcttgatgagctgatggcgcagggcgccgccggggtgattggctggcaggtctgtcatgaactggatggcgtcgagcgcatctatgccatgcgtaaaaaggcggtaggtctactgggcaatgctaaaggcgccgctaaaccgattccttttgctgaagatacctgcgtaccgccagagcatctggcggattacatcaccgagtttcgtgctttactcgacggacatggtctgagctacggcatgtttggacacgtcgacgccggcgtgctgcacgttcgtccggcgttggacatgtgcgatccgcaacaggaggtgctgatgaagcagatctccgacgaggtggtggcgttgacggccaaatatggcggtctgctgtggggcgaacacggtaaaggtttccgcgccgagtacagtccggccttctttggcgaggagttatatagcgaactgcgtaaagtgaaagccgcttttgatccggataaccgattgaatccggggaaaatttgcccgcctgaaggcgttgacgctccgatgatgaaagtcgatgcggtgaaacgcggcacctacgatcgccaaattcccatcgccgtgcgtagcgcctggcgcggcgcgatggagtgtaacggcaacggtctgtgctttaacttcgatgtaaaaagcccgatgtgtccgtcaatgaaggtcagcaatcagcgcatccattcgccgaaaggccgcgcgacgctggtgcgcgaatggttacgcctgctggccgaccgcgggatagacccgaacaaactggagcaagaactcccggagaaaggtgtaagcctgcgcgccctgatcgagcgtacccgcaacagctggcatgcgcgtaaaggcgaatatgatttctcacatgaagtgaaagaggccatgtccggctgtctggcctgtaaggcctgttcaacccagtgtccgattaagattgacgtgccggaattccgctcccgcttcctgcagctttatcacagccgctacctgcgtccggtacgcgaccatctggtcgcgacggtcgagtcctacgcgccgctgatggcccaggcgccgaaaacattcaacttctttatcaatcagccgtggatgcgcaagctgtcggaaaaacatatcggtatggtcgatctaccgttgctctccgtgccgtcgctcaagcagcagctggcaggccatcgttccgccaataccacgcttgaggatctggaagcgatgagcgtcgaacagcgtgcgaagagggtgctggtggtacaggatccgtttaccagctattacgaagcgcaggtggtggctgactttgtccgcctgattgaaaaaattggctatcagccggtgctgttgccgttctcgccgaacggtaaagcgcagcatatcaaggggttcctgacgcgctttgcgcgtaccgcgcagaaaaccgctgattttctcaaccgcgtagcgcggctggatataccgatggttggcgtcgaccctgcgctggtgctctgctatcgcgatgaatataaccagacgctgggcgagaaacgcggcgattttcgcgtgatgctggcgcatgagtggctgacccaggcgatagcgccatcggccggtcaggacaatagcggcgaaccctggtatctgtttggccactgtacggaagtgacggcgctaccggccgcgcccaaacagtgggcggagatatttgcccgttttggggcgaaaatggagtacatcagtacgggttgctgcggtatggccggtacctatggtcatgaagtgaaaaaccatgccaactcgttggcgatttacgcgctttcctggcagcaggcgatggcgcgtttaccgcgcagccgctgtctggctaccggttattcctgccgcagtcaggtgaagcgtatcgaaggcagcggagtgcgtcacccgctgcaggctctgctggagattatcggatga

SEQ ID NO: 89107 - DNA, 411 bp, Enterobacter aerogenes
atgatttggaaacgtcaggcttcgctagcgcagcttaacgcgatgggcgaggggaacatggttggcctgctggatattcactttgtggccatcagcgataacgccattgaagcgacgatgccggtggatcaccgcacacatcagccatttggcctgctccacggcggcgcatcggtggttcttgctgaaacgctgggttcggtcgcgggctatctgtgtaccgaaggggaacagaaagtggtcggcctggaagtgaatgccaaccatattcgttcggtacgcagcgggcgggtgcgtggggtttgtaccgcgctacatgtggggtcgcgccatcaggtgtggcaaatcgatatctccgatgagcaggggcgtttgtgctgctcatcacgactgaccaccgccgtggtgtaa

SEQ ID NO: 89108 - DNA, 189 bp, Enterobacter aerogenes
atggggtattacgtactgaaaaagtctgataagagcgtcccacagccatggtattttctgctgaaggctgacaaccatgagaccatcgccaccagtgagatgtattcatcgaaagatgcggccaaaaagggcatcgcctcggtgcagagaaacggtgccagcgaggtcattaaggacgaaacgcaataa

SEQ ID NO: 89109 - DNA, 249 bp, Enterobacter aerogenes
atgggtatcatttcctggatcatttttggtctgatcgctggtattttggctaagtggattatgccgggcaaagacggcggtggatttattgtcaccgtgatcctcggtattatcggtgcggtagtcggtggctggatcagtacgttattcggctttggcaaggttgacggttttaacttcggcagctttgttgtggcggtgattggcgcaatcgttgtgctgtttatctaccgtaaagtgaagagttaa

SEQ ID NO: 89110 - DNA, 597 bp, Enterobacter aerogenes
atgcgcaaatttacagcactactattaatggggttacttaccggctgctcggttaacgcgccgcaaagcgcgcaatacaatgccgagtactcccagcgccaggatatacgcacgcagaacgtatatcgatttaagatcaaaccgctgcaacccagcggcggaaaatattggggtgcggataatttaacgcaggttttttacgtcagtgataaaaatgccgcaaccattgaattacgtttcaatttccccaccgccacgctgcaggcttcatcgttagacgagcaagggaaagtagtaagtactcaaacgttcgccttgttagccgaatccgcgacgccgccatcgggttcggatacgaagtatttatatctgacgaaaagtggcgagttacttagcaaatggaaaaactgtactccggatatgagcgtgggttgtagttgggggggacatcaaatatttatcacccacagcgccgatctggcagtgcagtatgcaaccggtggcgcgggtttagcttttctgctgattccattttacaactccgaagcccggttgcagattttcgccaaagcgccaatcggcgcagctggcgactaa

SEQ ID NO: 89111 - DNA, 798 bp, Enterobacter aerogenes
atgacgattacgctatgcaaagcttgtggtacctcatatgaatttagcgaaaaccctccgcaacattgcccgatatgcgaagacgaacggcaatttgttccggtgggcggccagcagtggattgcattaaataagctcaccgcatcgcacagcaataagtggcaacagcataacagcgcgctttttagcattcgcactattcctggctttgccattaatcagcgggcatttctgctgcgtacgtcgcagggcaatattctatgggactgcatcgccaaccttgatgaggcgacaaaaacgctggtttccgcgctgggtgggctgaaagccatcgctatctcacatccgcattactacagttgtatgcaggattgggcggcggagttcaaggcgccaatctatctgcacggggatgaccgccagtgggtcatgcgcgacagcccgtggattaccttttgggagggcgatagcctgcaactgaccgccgatgccagtctgattcgcctgggtgggcattttgctggtggctgcgtcctgcactgggcgcagggcgacggcctgctattatccggcgatattgtccaggtggcgcccggagcaaacgccgtttctttcatgtggagctatcccaatatgctaccgctgccgtcgtcaacggttacggatatcattcatcggctggcggacgtgaaattcagccaaatctacggcgcgttcgaggggcgggagattctgaataacgccggggagatcgtccgtcgcagcggggaaaagtatgttgcttgtttgcgaaagtaa

SEQ ID NO: 89112 - DNA, 402 bp, Enterobacter aerogenes
atgacgaaggtcaccaaatttagttcgctcgcggttttggctgtcgtgttgtgcgggatatataaaaccgcgtcgattgccatggcggctagcgccgattactcgcgcgcggactggctcaccttctatctgattgcaccgagcgaagttaaacatgcccccctcatcaatgacagcacgccgattcacttcagggctgctgatggcgcctccccccagatagacgagattgaatacgccagggatacggacgaaaacatcttgtctgaatacctacgcgctttaggttatcgccaggaaaaagatccggtattcggcacccgctggtctttgcaaggcaccgataaaagcgcctatattgctgcgactgaaaattcaatcaggctgacgtttacggattga

SEQ ID NO: 89113 - DNA, 378 bp, Enterobacter aerogenes
atggaactacaaacaaacacctttaatcctgacgatttcaactggcaggggctaacgatgacccccgctgcggcggcccatattcgcgatctgatgcacaaacagccggacaaacagggactgcgcctggggattaaaaccagcggctgcgccggttttggctacgtgctggaaatgattgccgagccggcggacgatgatctgctgtttgaacgcgacggtgccaagctgtttgcgccgctgcaggcgatgccgttcattgacggtaccgaactggattatgttcgcgaaggcttaaatgaaatattcaagtttcataacccgaaagcgcagcacgaatgcggctgcggcgagagcttcggggttcaggcggagtaa

SEQ ID NO: 89114 - DNA, 1488 bp, Enterobacter aerogenes
atgtctcgaaatactgaagcaactgacgatgtcaaaagctggaccggcggcccgctcaactataaagaaggcttttttacccagctacaaaccgatgagctggccaaaggcattaatgaagaggtggtacgcgcgatttccgctcgtcgtaatgaaccggagtggatgctcgaatttcgtctcaacgcctttaaggcctggcaggagatggaggagccgcactggctgaaagcgcattacgataagcttaattatcaggattacagctactactcggcgccatcctgcggcaactgcgacgagacctgcgcctcggagcccggcgcggtgcaacagaccggggcaaacaccttcctgacaaatgaagtcgaggaggcctttaacctgctcggggtaccggtacgcgaaggcaaagaagtggcggtggacgccattttcgactcggtatcggtggcaaccacctatcgcgagaagctggcggagcaggggatcatcttctgctcctttggcgaagcgattcacgatcatccggaactggtgaaaaagtacctcggtaccgtggtgccgggcaacgacaacttcttcgctgcgctgaacgccgcggtcgcttccgatggcacctttatctacgtgccgaaaggtgtgcgctgtccgatggagctgtcgacctatttccgtatcaacgccgagaaaaccggccagtttgaacgtacgattctggtcgccgacgagggtagctatgtgagctatatcgaaggctgctcggcgccggtacgcgacagctatcagctgcatgcggcggtggttgaagtcatcattcataaagatgcggaagtgaagtactccaccgtgcagaactggttccccggcgacaacaataccggcggcatccttaatttcgtcaccaagcgcgcgctgtgcgaaggcgaaaacagcaagatgtcgtggacccagtcggaaaccggttcggctataacatggaaatacccgagctgcattctgcgcggcgataactcgatcggcgaattcttctcggtggcgttgaccagcggccatcagcaggcggataccgggaccaaaatgattcatatcggcaagaacacccgttcgaccattatctcgaaagggatctccgccggccacagccagaatagctaccgcgggctggtcaaaattatgccgaccgcgacgaacgcccggaacttcacccagtgcgattcgatgctgataggcccggactgcggagcgcataccttcccgtacgtcgaatgccgcaataacagcgctcagctggaacacgaagccaccacctcgcggattggcgaagatcagctgttttactgcctgcagcggggtattagcgaagatgatgcgatctcaatgatcgtcaatggattctgtaaagacgtgttctcagaattgccgctggagttcgccgtcgaagcgcaaaaattgctggctattagccttgaacatagcgtcggctga

SEQ ID NO: 89115 - DNA, 747 bp, Enterobacter aerogenes
atgttaagtattaaagatttgcaagtcgccgtagaagacaaagagatcctgcgcgggctgaaccttgaggtgcgccccggcgaagtccacgcgatcatgggccctaacggctctgggaaaagtacgctctcggctaccctcgccggacgggaggattacgaagtcaccggcggcagcgtcgagtttaagggcaaagacctgctcgaactcgccccggaggatcgcgccggggagggcatttttatggcttttcagtatccggtggaaatcccaggcgtcagtaatcagtttttcctgcaaaccgcgctcaacgccgtacgcgcctatcgcggcctggaggcgctggatcgtttcgatttccaggatttaatggaagagaaaatcaaactgctgaagatgccggaagatctgctaactcgttcggtgaacgtcggtttctccggcggcgagaaaaaacgcaacgatattctgcaaatggcggtgcttgagcccgagctgtgtatcctcgatgaatcggattccgggctggatattgatgccctgaagattgtctcggagggggttaactcactgcgtgacggcaaacgcgcctttattatcgtcacccactatcagcgtatccttgattacatcaaaccggattatgtccatgtgctgtatcaggggcgaatcgtcaagtcgggcgatttcactctggttaaacaactggaggagcagggctatggctggcttaccgaacagcagtaa

SEQ ID NO: 89116 - DNA, 1272 bp, Enterobacter aerogenes
atggctggcttaccgaacagcagtaacgcactgcagcagtggcatcatctgtttgaagcacagggcgaagaacgcacgccgcaggccaatcagcatttgcaacagctgttgcgcctggggttgccgacgcgcaaacatgaaaactggaaatacacaccgctggacgcgctgcttagcggcacgtttgttgcgactccagctacactcagcgtggcgcagcgcgacgcgctggcgctcaacctcgacgcctggcggatggtgtttattgatggccgcttcagcccggcgctcagcgacgatctcaccgctagcggttttgacgttagcgttgataaccagcgccagcatctgccggatgcggtacagccggaagtgtttcttcatctcaccgaaagtctggcgcagacggtaacccgcatcgatgtgaagcgcaatcagcgcccggagaaaccgctgctgctgatgcatattaccagcggactggccggcgacgagcttaataccgctcactatcgccatcatctggcgctggagagcggggcgcaggcgaccatcattgagcactatattagccttgatgagcagcggcatttcaccggcggacgcctgaccatggcagtggcggataacgcccatctgcagcatatcaagctggcgtttgaaaatgggcaaagctaccacttcgcccataacgatctgctgcttggccgcgatgcttcggcattcagcagcagcttcctgctgggcggcgcggtgttacgacaccataccagcacccgtctggccggtgaaaacagcaatctgcgcattaactcgctggcgatgccggtgaaaaacgaggtctgcgacagccgtacctggctcgatcaccgcgttggctactgcaacagccgtcaactacacaaaaccatcgtcagcgataaggggcgggcggtatttaatggcctgattaacgtcgcgaaacacgcgctgaaaaccgatggtcagatgaccaataacaatctgttgttgggaaggctggcggaagtcgataccaaaccgcagctggaaatttacgctgacgacgtcaaatgcagccacggcgccaccgtcggtcgtattgatgacgaacagctgttctatctgcgctcgcgcggcatcgaacaacaggcggcgcagcagatgatcctttacgccttcgccgccgaacttactgaagccattagcgatgacgcgctgaaacaacaggtgttggcgcgcattggcaagcgcctgccgggaggggatgcatga

SEQ ID NO: 89117 - DNA, 1221 bp, Enterobacter aerogenes
atgacattttcagtagaacgcctgcgcgccgatttcccggtgttgagccgcgaggttaacggccaaccattggtttatctcgatagcgccgccagcgcgcagaaaccggaagcggtgattaacgccgaagccgagttttatcgccatggttacgctgccgtccatcgtggtatccataccctgagcgccgaagcgacgtcgcggatggagcaggtacgccagcaggcggcagttttccttaatgcccgttcgccggaagagctggtgttcgtgcgcggtaccaccgaaggcatcaatctggtggccaatagttggggcggggctaacgtcggggctggcgataatattatcgtcagcgagatggaacaccacgccaatatcgtgccgtggcagatgctctgcgcccgcgtcggcgccgagctaagagtgatccccctcaaccgggatggcaccctacagctcgacgttatccccggcctgtttgacgaccgtacccggctgctggcgataacccaggtgtcgaacgtgctggggacggaaaacccgctatcggcgctgatcccgctggcgcatcagcatggcgcgaaggtgctggtggatggcgcgcaggcggtgatgcattacccggtggatgtgcaggcgctggattgcgatttttacgtcttctcggcgcataagctgtacgggccgaccggtatcggcgtgctgtacgccaaagaatcgttgctacaggagatgccgccgtgggaaggcggtgggtcgatgattgccaccgtcagcctgagggagggcaccacctgggcgaaagcgccgtggcgctttgaagccggcacgccgaataccggtggaattattggcctcggcgccgcgttggactacgtcagcgagattgggcttgagcagatcggcgaatatgagcagacgctgatgcgctatgccttgcaggagctgaaaaaggtgccggatttgacgctttacggcccgcaacatcgtttgggcgtcatcgcttttaacctcgggaaacatcatgcctacgatgtcggcagttttctcgataactacggtatcgcggtgcgtaccggacaccattgcgcgatgccgctgatggcgttctatcaggttccggcgatgtgccgggcgtcgctggcgatgtacaatacgatggaagaggtggatcggctggtggccgggctgcagcggatccacaaattactgggttaa

SEQ ID NO: 89118 - DNA, 417 bp, Enterobacter aerogenes
atggcggcattaccagacaaagacaaattgctgcgcaacttttctcgctgcgctaactgggaagagaagtatctctacatcattgaactcggccaacgcctggcgccgctcagcgcggaagaacacatcgcgcagaatattattcagggctgccaaagccaggtgtggatcgtgatggagcaggagccatccggcgtgattaccctacgcggcgatagcgatgcggccatcgtcaaagggctgattgcggtagtattcatcctttatgaccgcatgaccgcgcaggatattagcgaattcgatgtacgcccgtggtttgaaaaaatggcgttgacccaacatcttaccccctcccgctcgcagggccttgaagcgatgatccgcgcaattcgcgcgaaagccgcaaatcttagctag

SEQ ID NO: 89119 - DNA, 987 bp, Enterobacter aerogenes
atgaaacgcgcgtctctcatcgcaatgacccttctcgcagctctgagcgcgcagcacggcgcctgggctgtcgattatccgcttcccccagccaacagccgtttgattggccaaaaccaatactggacggtacaggaaggggatcgcaacctgcaggctatcgcccgccatttcgacacggcggcgatgctgattcttgaagccaacgatacgattgcgccggtgcagccgaagccgggcacacgggtcttaatcccatcgcagatgctgctgccggatgtcccgcgtgaaggcattgtcgtcaacctggccgagctgcggctgtactatttcccgccggggcaaaatcaggtgcaggtttatccgctcggcattggccagttggggctggaaacgccggagatgaccacccgcgtcgggcagaaaatccctaacccgacctggacgccgactgccggtattcgcgcgcgctcgctggagaagggcattaagttgccgccggtgatccccgccgggcccaataacccattaggccgctacgcgctgcgactggcctacggtaacggcgagtatctgatccacggcactaatgcgcctgatagcgtcgggctacgggtgagttccggctgtatgcgaatgaacgctgacgacatcaaggcgctgttcagccaggtgcgcgccggcacgccggtacggattatcaatcagccggtgaagttcgcggtagaacccgatggtaaacgctatgtagaggtccacaggccgctttcgcaaactgaaggggaaaatacccggacaatctcttacacgcttcctgccgcgtttcacgccttttctgacgataaagcggtggatgacctgcaactgaaaaaagcgctgtcgcgaagagcgggctatccggtggtggtttctgaaggggcgggcagcgcgacgaccgagctgtcggcacagaacagccagcagaatgacactaaactgacgcagtag

SEQ ID NO: 89120 - DNA, 237 bp, Enterobacter aerogenes
atgaatcgtactaaactggtactgggcgcggtaatcctgggttctactctgctggctggttgctccagcaatgctaaaatcgatcagctgtcttctgacgttcagactctgaacgctaaagttgaccagctgagcaacgacgtgaacgcaatgcgttctgacgttcaggctgctaaagacgacgcagctcgcgctaaccagcgtctggacaaccaggctcactcttaccgtaagtaa

SEQ ID NO: 89121 - DNA, 1413 bp, Enterobacter aerogenes
atgaaaaagaccaaaattgtttgcaccatcggtccgaaaaccgaatccgaagagatgttgaccaaaatgctggacgcgggcatgaacgtcatgcgtctgaacttctctcacggcgactatgcggaacacggtcagcgcatccagaacctgcgcaatgtgatgaacaaaaccggtaagaaagccgcaatcctgctggacaccaaagggccggaaatccgcaccatcaagctggaaggcggtaacgacgtctccctgaaagcgggccagacctttacctttaccactgacaagtccgtggtcggcaacaatgaaatcgttgcggtgacctacgaaggcttcaccaccgacctgagcgtcggcaacaccgtactggtcgacgatggtctgatcggcatggaagtgaccgcgatcgaaggtaacaaagttatctgtaaagtgctgaacaacggcgacctcggcgagaacaaaggcgttaacctgccgggcgtctctatcgctctgccggcgctggctgaaaaagacaagcaggacctgatcttcggttgtgagcaaggcgttgatttcgtagccgcttcctttatccgtaagcgttctgacgtggttgaaatccgcgagcacctgaaggcgcacggcggcgaaaacatccagatcatctctaaaatcgaaaaccaggaaggcctgaacaacttcgacgaaatcctcgaagcttccgacggcatcatggttgcgcgtggtgatatgggcgttgaaatcccggtagaagaagttatcttcgcgcagaagatgatcatcgaaaaatgtatccgcgcgcgcaaagtcgttatcaccgcgacccagatgctggattccatgatcaaaaacccgcgtccgacccgcgctgaagcaggcgacgtcgctaacgccatcctcgacggcaccgacgccgtaatgctgtccggcgaatccgcgaaaggtaaatacccgctggaagccgttaccattatggcgaccatctgcgagcgtaccgaccgcgtgatgaccagccgtctggattacaacaacgacaaccgtaaactgcgcatcaccgaagcggtttgccgcggcgcagttgaaaccgctgagaaactggaagcgccgctgatcgtcgttgccacccagggcggtaaatccgcacgcgccgtgcgtaaatacttcccggacgccactatccttgcgttgaccaccaacgaaaccaccgcccgtcagttagtcctgagcaaaggcgtagtaccgcagctggtgaaagagatcgcctctactgatgatttctaccacctgggtaaagagctggcgctgcagagcggtctggcgcgtaaaggcgacgtggttgtgatggtttccggcgcgctggttccaagcggcaccactaacacagcctccgtgcacgtgctgtaa

SEQ ID NO: 89122 - DNA, 213 bp, Enterobacter aerogenes
atgggaaataaagcgaaagacgacgaactctatcaggaaatgtgccgcgtagtgggtaaggtggtattggaaatgcgcgatcttggtcaggagccgaaacatattgttattgccggtgtcgtacgcaccgcgctggcaaatagcaaaattgaacgttcagcgctcacccgcgaggcgatggaaagggtgattcacgcgttgtcggggcactaa

SEQ ID NO: 89123 - DNA, 639 bp, Enterobacter aerogenes
atgtccctcgttgctcatgatgaagcacaatccctgaaagagcgcatctttgccgccgccatcaccgtgtttgccgaatatggcctccccggcgcgcgtatggagcagatcgccatcgaggcgcaaaccaccaagcgcatggtggtctactacttcaagagcaaagagcagctgtaccaggcggtactgcaacatgtgtatgcgcggatccgtgaaacggaacaacagctggggctggagcacctgccgccggtcgaggcgctggtgcaattggtgaaatggagcgtgcgctatcacgccactcacgccgactacatgcgagttatctgtatggaaaacatgcagcgcggcaagtggttgaagggttccggggagctgaaaccgctgaaccgtaccgcgctgtcgattatcgaagatattctgcaacgcggccagcaacaggggattttccaggccggtctgcaggcgcgcgacgtgcatcggctgatcagtagttttagcttctatcaggtatcgaatttttatacttttagcagcctgtatctcgacgatccgctgcctgaaatcgacgacgaagcaatggtttcacaccactgcgagattgcggtaaaagcggtgattcggttcgttatctcttaa

SEQ ID NO: 89124 - DNA, 1851 bp, Enterobacter aerogenes
atgttgcgttccatcgctaccgtctcgatatccggaactttacccgaaaagctgcacgctatcgccgcggccggttatcagggcgttgaaatctttgaaaacgatctgctctattatacgggcacgccgcgcgatattcgcaaccttgccgctgaattagggctaaaaatcaccctttttcaaccctttcgcgatttcgagggcgccagccgcgcgcagtttgccgctaacctgcagcgggcgaagcggaaattcgccctgatgcatgaactgggttgcgacaccatgctgctctgtagcaacgtccagccggactgttcggccgatatcgaactgcaggtcgccgacctgcgcgcgctggccgatctcgccgagcaggagggggttgtcattggctacgaagcgctggggtggggtactcacgttaaccgctggcgtcaggcatgggaacgggtgcagcgggttaacagcccggcgatgggcatcgttcttgatagtttccatattctgtcgctcggtgatgatctacaaggccttgccgaggtgccggttgagaaaatcaccttcctgcagctggccgacgcgccgttgatgaagatggatgtcctcgaatggagccgtcatttccgctgcttcccgggccaggggcaactgccgctggtggatttcgcctgtgaactgacccgctgcggctatcgcggaccctggtcgctggagattttcaatgacggctttcgcgcctcgcccaccggcgccacggcgaaagatggctaccgttcgttgctgtggctcgaagagcagacccgtcggcagcttgcggatagcgacgcggcgttattttcgccacctgcgctaccgcactatgacggtctggagtttattgagttcgccgccagtccggcggagtctgtcgcgcttggccagcgcctgacgcagttgggctttaagcttcagggcaagcatcgttccaagcaggttgcgctctggcgtaatggcgaggcgcgggtgattgttaacgcgcagccgcacagctgggccgaccattttcatcagcgccacggcatctcgttgtgcgcaatggcgctgcgggtgagccacagcgcaccggttgtggagcgcgcccgcgcctacggttatgccacctggcagggggatgccggtcctaatgagagttcgatcccggcggtttgcgccccggatggcagcctgatctacctggttgaaaccggtgacgacatctacgcccgcgattttcatttgcaggcagacgcgccgcgcgacgactactgcggtattgaccatctggcgttaggcatggaggccgatagccgcgacaactggattatctttttccgtacggttttcggcttcagtctcgaacacgaacagacgttgcccgacccatacggcctggtgcgcagcctggcggttcatagcccgcagggcaatatccgtctggcgctgaatatttcgcaaagtcgagccacgcagatagcgcgttcggtcgcctgttatcagggcgccgggctacagcacgccgcttttgcctgccgcgatttacccgcaacgctcgaaaatctgccgcaggccgcgctgaacgcgctaccgatcccggcgaattactatgaggatctgctggcgcgcttcggtggagagtcgcaggtagagacgctgcaacgcctgcaaattctctacgaccgtgatacccgcggcggcgaattcctccacctttatacccgtccattcgcggcggggcgtttcttcttcgaattgaccgaacggcgcgacggttacgcccagtacggcgcggtaaatgccgccgtccgcctttcggcgatgcagtacagttaa

SEQ ID NO: 89125 - DNA, 1323 bp, Enterobacter aerogenes
atgaactcttatagccataaccaggcgacggcggcggataccgcgaccaccgcgcctcgctcccggcggcgtatcgggatcctggcgctgctggccgtcggcacgatgattaactatctcgaccgcacggtgctcggtattgccgcgccgaaactgaccgccgagctcggcattgatgccgccatcatgggaattgtcttttcggcctttgcctggacctacgcgctggcgcaaatccccggcggtattttcctcgatcgtttcggcaataaggtgacctatttcctctcattggcgctgtggtcgctgttcaccttatttcacggtatggcgattggcttgaaaacgctgttgctgtgtcgcttcgggcttggcgtcagtgaagcgccctgttttccggtcaacagcagggtagtgagtacctggtttccacagcaggagcgcgcgaaggccacggcggtctacaccgtcggtgaatatctcgggctggcctgtttctcgccgctgctgttctggattatgggcagcttcggctggcgtgcgctgtttatcagcgtcggggttgttggcatcctgttcgcgctggtctggtggcgttgctaccgcgaaccccatcaggacagccgcctgagcgacagtgaacgcgaacatattcttcgtggcggcggactggctagcgcgcagcagcagcaaaacgcttttagctggccgctggtgcgccagctgttggcaaaacgacaggtgattggcgccagcgtcggtcaattcgccggtaataccgtgctggtcttctttctgacctggtttccaacgtacctggcgaccgagcgccacatggcgtggttgaaagtaggcttcttcgccatcttgccgtttctcgccgcggcgggtggcgtgctgtttggcggctggctctccgacaagctgctgaaagccaccggttcggccaatctggcgcgtaagctgcctatcgtcgtcgggctgatgatggccagcagcattatttccgccaactggctgccgagcgacctggcggtgatcctgatgatgtcttttgcctttttcggtcagggtatggttggccttggctggacgctaatctccgatatcgcgccgcaggggatgggcgggataaccgccggcatctttaatttctgcaccaatctggcggggatcctcacgccgctgattatcggttttatcgttgccgcttccggtagttttttctacgcgctggtctatatcggcggcgcggcgctgcttggcgtagtggcctatctgtttattcttggcgatgtcaaacgcatcgaactttcgcagtaa

SEQ ID NO: 89126 - DNA, 837 bp, Enterobacter aerogenes
atgatcattagtggtcatacgcggctgatagcgcatcttggttatccgaccgccagttttaaagcgccgatgatttataacccatggctggcccattgcgaggcggacgtcaaagtggtgccgatgggggtgaagccggaggattacgcggcgctggtgccagcgctgttttccatgactaacatcgtcggcgcgctggtcaccatgccgcataaaatagctacctgcgggctggtagaccaactgagcccgacggcggcaatcgccggcgcctgcaatgccatccgccgcgaagccgacggtagcctgcgcggcgatatgttcgatggcgaaggctttgtgctggggattaagcgcaagggctttcaaccacaaggggcgcgggcgcaggtgttcggctgcggcggcgtcggctcggcgattgccgcatcgctggcggccgcaggggttagtaccttgacgctgttcgatacctctttatccgccgccgaggcgctggcgcagcggctgaatcagcactatccgcgtctggagatcgttctgatgcagggcgatcccgccgcgcaggatctggtggtcaacgccacgccgctgggcatgaaagcggatgatccgctaccgttggacgtttcgcgcctgtcgccgcgcacctgggtcggcgaggtggtgatgagcgttgaatacaccccgctactgcgggcggcgcaggcgctggggtgtccgattcagcgcggtaccgatatgctgttcgaaatgatcccggcctatctcgagttcttccagctgccggtggcgacgccggaacagctgcgcgaacgggcggaaattcgctactga

SEQ ID NO: 89127 - DNA, 741 bp, Enterobacter aerogenes
atgaccccttcattgacgctgctggcggcgggaagcctgaaaagcgctttcctcccgctgctggcgcgatttcagcagcttagcggcattcaggtcgaggcgcagtttggcccggccggcctgctgcgcgaacgcattgaaggcggcgaacgctgctcgctgttcgcctgtgcgaataccgaacaccctcaggcgctgctgcaagccgggcttgcgataaaatgctgttcgtttgccgctaaccgactgatgctgaccgtgcgccgcacgcctgataccgatcgcgctgactggctggcgttactgcacgattctcggctgcggctggcgacctcgacgccgggctgcgatccttccggtgattacacctggcagctttttgcccgtcttgaggccagctatccgggcctcggacggacgttgatggcccgggcgcagcagctggtcggcggtcgggcgtcgctcactgtaccgtcgggcgctaccgcaggggcatggctaattggcgaagactttgccgatctgtttatcggctacgcccactatgcggttcagatgacggagagcgcgcagtttcgcacgttactcattcccgagccgtggaatattcgctgcgagtatcagctggcggaaattgaggagagcgccgccgcgcggcagctacggcgctttatcaccgctgaggaagggcagaattttctgcgcgcggcaggttttttggccgttaacgatggatcgtaa

SEQ ID NO: 89128 - DNA, 750 bp, Enterobacter aerogenes
atgaacatttccttatcactggacgccctgcgctatggtcatcgtcagccgctcttcgccccgctgtcaatgcagtgccgtcacgggcaaatctgggcgatactgggcgccaatggtcgcggcaaaagtaccctactggataccctgaccggcgttctgccgccgctcggcggaaagtttagcgtagaaggcggcatcgccatcgtgccgcagtcgtttcgtccggcattcggctggcaggtacgcgatgtagtactgatggggcgcgcccgccacgtcgatctgttcgcgcagccggggccggaagatgaacgggaggttcaacaggcgctggcgcagttggggatcgccgcgctggccaatcggctttttcgcgccctgtccggcggacagcagcagttggcgctcattgcccgcgcgctggtcagtgagagtcagaatatcctgttagacgaaccctgctcagcgctggatctggccaatcaacagattgtgttacagctgattagcgaccttgctcatcagcagaagcgcaccgtgatgttcaccacccatgatccgactcacgccctgcaggtcgccagccataccctgctgctgttacccggcggcgaatggctggcgggagagtcgttcgcggtgctcagcgagacaaacctgcggcgcgcctacgggctgccggtccacaaaatcgatcatcccggtagcgcggtgccgttactggcgccgcagtttacgatccatcgttaa

SEQ ID NO: 89129 - DNA, 1008 bp, Enterobacter aerogenes
atgcgcagtaaccttcactgggccctgctgcacggagggctgacggcggcgacgttgtttatcgctatcgcttcgctatgcctggggcagtaccacctcagcctgaatgaggtctttcatgagcttacgcatggcgcgcccgatagcggcatcgccgggcagatagtctggtcagtcaggcttcccagggtagcgatggcgctgttggccggcggctcgctggggctatgcggcgcgactttacaaggcgtattccacaacccgctggtcgacccgcatatcatcggcgtgacctccggctccgccttcggcggcacgctggcgatcctgctgggttttgacatcatatcgatgatggggtgtaccttcttcttcggcctcgccgcgctggtgttggtttatctgattgccaggctgcaagggcgtgaaaacacgctagcgctgatcctttcaggcattattctcagcggtttctttgccgcgctggtcagcctgatgcagtaccttgccgacacggaagaaaccctgccgaatatcgttttctggctgctcggcagctttgccaccgctaactggcataaagtgctgtccatggcgctgccggtcgccgtcgccgccgttatcctgctaaagctgcgctggcgtatcaacctgctggctctggatgataaagatgcgcgcggtcttggcgtttcggtgaccacattgcgccgcggagtgttggtttgctgcgcggtgctggtcgccgcccaggtcgcagtcagcggcagcatcgcctgggtcgggctggttattccgcatctggcgcgactgctggtcggcgccgatcaccgccgcctgctgccaacggcattctggctcggcggcgcgtttatggtggtggtggacgacctggcgcgcaccttaacccaggcggagattccgattggcattattaccgccctgctcggcgcgccgctgtttacccttttactcattcggtcccaacgccgcggagtagcccaatga

SEQ ID NO: 89130 - DNA, 1059 bp, Enterobacter aerogenes
atgtcaccacaccgtttacttttggcgctaacgttgttcagcgccagcctgttcaccagcctggcttttgccgaccgcaccgtcaccgaccaactgggccgccaggttacgctgccggaccacatcacccgcgcggtcgtcctgcagcaccagacgctgaatctcctggtccagttgaatgccggcgacgatatcgtcggcgtgttaagcagctggaaaaaacagctcgggccgcagtttgtccgctttatgcccgctattgaaaagctgccgacgccgggcgatttaactcaggtcaatatcgaaagcctgctggcgctgcatccgcaggtggtgttcgtcgccaattacgcgccgcaggcgatgatccagcagatccaaaacgccggggttccggtcatcgcgatatccctgcgtcaggacgcggcgggcgagaaaaacaaaatgaacccgacgatggccgatgaagagcaggcctataacgacgggcttaaacaggggatccgcctgattggcgaagtcgtcgaacgccaaagccaggccgaagcgctgattgattacacctttgcggcgcgggcagaagctaacgctccggtcgccggtatccctgacagccagcgggtgcgcgtgtacatggccaatccagatctcaacacctacggctccggcaaatataccggtctgatgatgaagcatgccggggcgctgaacgttgcggccgtgacggttaagggtgcccgtcaggtctcgctggaacaggttctgcagtggaaccctgaggtgatcttcgtccagggccgctatccgcaggtggtcaaacagattgaaaacgacccgcaatggcaagcgatagacgcggtgaaaaaccaccgggtatggctgatgccggaatacgccaaggcctggggctacccaatgccggaagcgctggcgataggcgaactgtggatggcgaaaaagctctatccttcccgctaccggaacgtcgatgtcgatgcgaaagcgcaggattactatcaacgcttctaccgcgtgaaatggacgccgaatgcgcagtaa

SEQ ID NO: 89131 - DNA, 720 bp, Enterobacter aerogenes
atgtcttatccatcccgcttattaagtgatatccccggtattcgttacgcttttctcgatgtgcacgaaaccgccgcttttccgtacagcgaaatggcgccggttaagctggtgcacggcaatgttgttcatcattatcaggggccgcaggtagagcggccgcatgccgatgctgtatttacggctctgcgtgggcaaaaggtcggcgtcgtcaccgccgactgtttaccgctgttaatggcctcgcgggatgggcgctatgtttgcagcgtgcatgccggctggcgaggagcggccagcggcattatcgaaaacagcctggcgctatttcgccagcatcaggtggcgatagaagacgttgtggtggtctgcgggccgcatattcacgcctgctgctatgaggtttcggccgagttttatcagttgctgttgaccatgccggcgggcaagctggcaaaacggtacaatgacgagctgtttcatcagcgcctcgccccgccagaaaccgggcaagcgcaggcgaccgggaacgataatctgtggttcgatctccgcgcgctggcgcagcgggtgctgcaacaggccggggtggcggcggaaaataccgaatggctgggaagctgtacctactgcacgccgcaggcgctcggctcgtaccgtcggcgcacccattttccggcggcgaaaacctttcagtattcatggattatgcgcgaatga

SEQ ID NO: 89132 - DNA, 1404 bp, Enterobacter aerogenes
atgaaagctaactcagttgtactggccctgacaccgctgctggccgccagcgctttttccgcccatgcaggaccgcaagcccaggcggtatgcggttacagccacactcttggcgacgacgcgattatgatgttcggtatgccaaaccaggcgatgtggcatgatttcttcggcaatacccacaccgacgcggtctcaacttatcaaaccctgcgcgcgcagccggaaaccacctgtgataacaaggccgatagttctgcctattgggcgccgtcaatgaagttgccggatggacaaattgtcactccggcttatcagaaaacctattaccaggcgaccaaagtcgaacagtatccgctgcatcctttcccgtcggggttagagctgctggctggcgaccaccacggcactgcgccgagctcacggataaccttcctgtgcgctaacggtaaaggctatagcaacaaggcaggtgaggtttgcggcctacgtaaagcgggcgacgcggtgcagtttaatatcggtattcagttccccaactgctgggatggcgtcaacctgaagccgagccacggtcacagcaacgccgcctatgatgtcaacggtgcctgcccggcagactatccggtaaaaatcccgacggttaatatgaatatcgcctacgtgctgccgcagattaaatcactggacacggcgaaaattgagctgtcgatggacccggttatgaagggcgataaacgtgaagagaagtggggcagtatctataccgcccatgctgatttcatgaacggctggacggtcgagggcgcgcacttcatgaccgaacactgtatgaatgaaggcatggattgcgggaccaacgtgccttatagcttctcgctggcggaagaaaacgcggtggtcgagagcgcgcagccgaatgttaacttcggggcgcctggagcgctgcagatttccgataactggaagaacggtggccgtaccagcaacccggaaaccctgaccctggtgaagtttaaaatcccggtgctgccgaaagatcaggatgcgtcgctgtttaaatatcgcctgcgtctgtacggcggcaaagtggaaactaacggcgcggatcagatcttcttctacccggccagtaatgactggagcgcggcgagcgtgacctggaagcatcgcccgacctgcagctacaactctgatggtcaactgtatctcaattcatctcgtgagtatcggatggtggatatcgataaagcggtgcgtaaggcgctggcggaagggaaaaccgagatctcctggtacatcggcggcgaccgtcagggcaaccactatcagtttgacgccgcagcggcgcagaagcagccgatcctgatgctggttggctttaaaaccaccccggaaatttaa

SEQ ID NO: 89133 - DNA, 1581 bp, Enterobacter aerogenes
atgcctgactacaattatcgccagccagccgaggtacgccaggcgctaatcgatggcgcagaagtggcgctcatcgatgttcgcgaagaggccgtatttgccactaaccatccgctgtttgccgctaatttgccgctcagcaagctggagctggagatttttcgccgcgtgccgcgcctgacgacgccgattaccctctacgataacggcgaaggtctcgctgagcaggcccttgaacggctgcaacgctggggctatcaggatgtcgcgctactggcagggggactgacgggctggcagcgcagtggcggcgagctctttcaggacgttaactcaccgagcaaagcgttcggcgagctggtagagagcgagcgccagacgccctcgttgagcgccgaggaagtgaaggcgctgatcgagggtccccagccggtcgtggtggtcgacgcgcggcgtttcgatgagtatcaaacgatgaatattcccggcagcatcagcgtgcccggcggcgagctggcgttacgcatcgaaggcctgctgccgtcggcgcaaacgacagtgatcgttaactgcgccggccgtacccgcagcattgtcggtacccaatcgctgcgcaatgccggcttagccaatccggtatacgcactgcgcaacggtaccatcggctggaccttagccggactggaactcgagcacggccaacagcgtcgctacgacgccgatttccgcgcctcagcgcagcgcgtggctgcggtgacgcagttggccgagcgcgctggcgtggccttcattgatgccgcgactttagcccgctggcaacagcagccgagccgcaccacctatctgtttgatgttcgcagccccgaggagtatgccgcaggccatctgccgcacagcgtgaatgcgcccggcggccagctggtgcaggaaaccgatcattatgccagcgtacgcggagcacggattgtgctggtctccgatgatgagatacgcgcgccgatcgcagcgtcctggttagcgcagatgggctgggaagtggcggttttacgcgatgtccgcgtggagcaattgagcgaacgcggcgttccgcccgccagcgtaccgccggcgccgcaggctgaggagataaccccagcgcagttagcggaacaattgcgtgaacccggcaccgtggtactggatttcaccaccagcgctaactatgtcgcacggcatatccccggcgcctggtggctggcgcgttcacagctgcgtcaggcgcttgagctcatccctcccgcaaaacgttacgttgtcacctgcggcagcagcctgctggcccgctatgccgtgcctgaagtcgcggcattgaccggtaagccggtacaactattaagcggcgggacgctggcgtggattgatgccgggctggcgttggaacagggcgagacgcatctggcaacgccgcgcggcgatcgctatcgacggccttatgaaggaaccgataactccgctgaggcaatgcaggcttatctcgactgggagtatggcctggtggaacagttagcgcgcgatggtacccacggctttaaagtgttgtaa

SEQ ID NO: 89134 - DNA, 606 bp, Enterobacter aerogenes
atgactgcaccgcgagtggaaaaattacgccagtttattcaagaccttgatgctctgcatcgccagtttaccgatgaggcccccctgctcgacgccgtcgccgagcgcctggcttcgctggtgcaaaaagacgactggttgccggaagagtacaccctgccgcatccccaccactatcagcagtatttgctgcatgctgattccggccaacgtttttcgattgtcagcttcgtctgggggccggggcaatcgacgccgattcatgaccatcgggtatggggagccatcggtatgttgcgcggcgcggaggagaaccagcgctaccgactcgacgaacgcggtttgccgatcgccactggccctgctgaacggctttcacccggcaaggtagaaaaagtctcttcccgcgatggcgatattcatcgggtgagtaacgcgctcgctgaccacgtctcaatcagtattcacgtctacggcgctaacatcggcagcgtccggcgtgctgtttataccgcggatgggatcgcaaaacctttcgtctccggttactccaaccgtcacttgcccaatatctgggatctctcaaaggataatgaatatgcctga

SEQ ID NO: 89135 - DNA, 894 bp, Enterobacter aerogenes
atgcgtatcgatgacattgatgccctgctggctaccgtgcagttttcctctcttaaccaggctgcggaatatctcggcattacccaatcggccattacccgtcggcttcagcgtctggagcaaaccctcaatgtgacgctgctggagcgccagacccggcccctgacgctcaccgccgccggacatcgggtgtatgagcagtgcctgagcattaagcgggaaaccaaaaagctgtacggtctgcttgacccggaggcggaaccacagggcgttctgcgactcggcgtgccgcagagcgtggcggaaatcgccctccagccggcgctgagcgcgctacgccagcagttcccggccctggagccgcaggtgacctgtggctggagcgggctgctgcaaaaacggctggagagcgtcgaactggatggcgtgctggcgatgggaccacaacagcagcgctttgctgacggctacagcggaaggctgctgtgtccgctggatattgtggtcatcgcggcgaaaagctggcgactgcacgccggggcgctgcgcgactgtgcgcagcgaggctgggtactgaatcccgacggctgcggcctgcgggccgggctaatccgcgaactgcaatcgcaggggctgcggcttgcgctgaacgtcgagaccgccggcgcccagctgcaaatcagcctggtggcgcaggggctggggcttggactggtgcctcgcgccgcgctggccgccagcccgtggcgcgatgaagtggccacgcttgcgctcgcggattttcagccgcaagtgcatctgtggctggtaaacgcgcagaatctggctaatctgagccagccgctgactttttttgccggaaaaattgtgcagcaacttaacgcatctgattga

SEQ ID NO: 89136 - DNA, 1086 bp, Enterobacter aerogenes
atgagcattcagtttctcggcatgatcggccaccgcctgtcgtcagaaaccatcgccccggtagggccgatttttgaccgtgattatattgtgcgcttcgcgcaaacacatgaagccgcggggtttgaccgtctgctggtggggcattggtccgatcaacccgacggctttttggtgaccgcgctggcggggttgtcgacgcaaaagatagctttcctgctggcgcaccgccccggttttgtctcgccaactctcgccgcgcgtaaattcgccaccctcgaacatctgcttggcggccggctggcggtacatattatcagcggcggcaatgatgccgagcagcgccgtgacggcgattatctcgaccacgaccagcgctatgcgcgcaccgacgccttcctcgataccatccgcaaagtctggaccgccgaacagccggtggacatcgacaatgatttttatcaggcgcaacaggcctggtcggcgattcgcacgctgcagaaaccgcatattcccctctatttcggtggctcgtcggaggcggcaattacggttgccggtaaacacgctaacgtcttcgcgctatggggggagtcgctggcgcagactgcggaaactatccagcgggtacgtgccgaagcggcaaaacatcagcgcgagatcggtttcagcgtatcgttccggccgattatcgccgatagcgaagcggaagcctgggagaaagccgagcatattctgcatgtcgccaccgagcgggcggcgcagagtgaagggggctttaaagccaagcccgatagcgttggcgcgcagcgtctgcgggctacggcggcgcagggcaaggtggtggataaacgcctgtggaccggcatcgcgcagctggtgggcggcggccacaactctaccgcgctggtcggtacgccggagcaggttgccgatgcgctgctcgactactacgacctcggcgtgcgtaatttcctgatccgcggattcgatccgctgaacgatgcgcaggagtatggcaaagcgctgctgccgattacccgcgaaaaagccgcgctgcgcgccgtggcggagcgtgcatcgtga

SEQ ID NO: 89137 - DNA, 1152 bp, Enterobacter aerogenes
gtgagtcatcgcccaatcgcagattggccacggcagcttgccgagatccgccaactgatggcggaagaggcggccagccttgatgccagcggcgattttccccgtcgcaatattgacgttctgcgccgacgcggatttttaagccttgccgtaccgcagcagtacggcggacctggtgccagtttagccgagctgcaacagcctatcgccgccatcgcctggggcgaaccggcaaccgcgctgattgtctgcatgcagtatctgcatcatctgcggctggcggaaaatacgcactgggcagagccgctacgccagcgcgtatttgatgatgcgctcacaaacggcgggttgatcaatagcctgcgcgtcgaaccggatctgggctctccggcgcgcggcggcctgccgcaaacgatagccagccgtaacagccggggctggctgattaacggccacaaaatttataccaccggtatcgaaggattgagctggctggcgctgtgggcgcgcagcgacgacaacccgccgctggtcggtagctggctggttcctgccgacagcgagggcatcagcgtggtgaaaagctgggatcacctcggcatgcgggccaccggcagtcacgaggtggtgctgaaaaacgtgcaggtgtccgccgggcacgcggtagacgtttggcccaccgacgagccgcccgcgccggacgccgaacagtttcgtctgtttgccaaccgtcatacggcgctactggcggcgatttacgatagcgtggcccgtgcggcgcgcgactggcttgtcgtgtggctcggcgcgcgggtccccggcaatcttgggcaagcgctttccagcctgccgcgggtacaggaaaaagtggggcagatcgaagggctgctgctggttaaccgcgcgctgctggagaatgccgcgaagctgggcttttccgctattgaggccaatctggcgaaagtcactgtcaccgacaacgccattcaggcggtcaacctggcgcttgaactcaccggcaatcatggtttaagccggcaacatcctctggaacgccactatcgcaacgtcctgtgcgggcgggtacatacgccgcagaacgacagcgcgtggcaggcggcgggtaaacacgcttttcaacaacaaggataa

SEQ ID NO: 89138 - DNA, 975 bp, Enterobacter aerogenes
atgcgcataccccattttacccgcatagccggggcgctaatgctattgacgctgagcagctatgttgcggctcaggaaagaatcacactaagaattgccgatcaaaaaggcggcatgcggtcacaactggaggccgctaacgccttgcaaaacctcgcttacgatattaaatgggccgagtttcctgccgccgcgccgctggctgaagcgctcaacgccggcgcggttgacgtggggattatcggcgatgcgccgctgttgttcgcgctggcgaacggcgcgccggtaaaagcgattgccgtcgataagagcaacccggcggggaccgctgtattggtacctcccggcagcgctttaaaaagcgcggcggatttaaaaggtaaacgcattgccaccgggaaaggatcgattggccattttgtggcgctgaaagcgctggagcaggcgggtgtttcgccgaaggaagtgcagtgggtattccttggcccggtggatgcaaaagtcgcgctgcttaacggttcggtagatgcctgggcgacctgggagccctataccacgcagctggtgaaaaccgctgaagggcagattctggtgagcggcaaagggctgctgccgggtaataccttcctggccgccaccgataatgcgctgaaggatccgcaaaagcgcgcggcgcttcaggattatctcacccgactggccggcgccgagcgttgggcttatgccaatctcgatagctatggcaaaacgctgggggagattattcgcttcccggcggatatcgcccgcgcgcagtttgccaatcgccagtcgcagtggcagcggctggacgcgccgacggtcgcccagcagcagtcgacggcggacttttatcttgccaacggcctcattcgcgcaaagctcgatgtaacgccgacatttgatcacggctttaacgtgccggtcacgccggttcatgcggaggcggcgccatga

SEQ ID NO: 89139 - DNA, 1038 bp, Enterobacter aerogenes
atgatgaccacacgttttacccgtcgtcgtttcttacagtttaccggtggcctggcgctggccgggacgtctgtgccgctatgggctcacgatatggcggagatggcgagcggtgatgaacacccggcgctgcgtctggcgcagccttataaaatcaagttggcgattaacaaaagcgcagtgtgcctggcgccggtcgccgtcgctgagcagcagaagatttttagtaaatataacctcgacgttgagtttgttaactttggtaactcgacggatgttctgctggaagcgattgccaccggcaaggccgacgccggggtaggcatggcgctacgctggctgaaggcgctggagcagggctttgacgtcaaacttaccgccggaacgcacggcggttgcctgaatctgctgacggccaaaaactcgccttttggcgcgctggagagtctgaaagggcaaaccattggcgtcaccgatatggccgggccggataaaaacttcttcgccatcttgctgaaacgccacggcatcgacccgataagcgatgtgcagtggaaagtctatccggcagacctgctcagcgtggcgttggataaacgcgaaatcgccgccattagcggcagcgagccctttagctatcgtctgctggaaaccgggaaatatcagctaatcgccagcaatatgaccggcgattatgccaatctcagctgctgcgtgctgggcgtcagcggtgcccttgcgcgcgatcataaaccggcggcggccgcgcttacccaggcgattctggaagcgcacagctatgccgccgcgcatccggaaagcgtggcgcaatcttttctcgcccatgcgctaaatactaacgaagcggaggttagcggcattcttcacggccaggggcacggtcatcatgcggtgggcgaggcttttgttaaagagctgacgcagtatgccgtggatctgcagcgggtacaggtcatcaaaccgggaaccgatcctcatcagtttgcggagagtatttatgtcaacgttttcgcctga

SEQ ID NO: 89140 - DNA, 996 bp, Enterobacter aerogenes
atgtcaacgttttcgcctgaccgcgcgctcgcccgacctgggctcggcgctctgctctggacggagggcgggcttgccgccgcgctatggctgctgggcggcctgttcacgcaggcctggcccgatgccggtcgacgctggccgtttagcgaggagtgggcgctggcgcagttcactctcggcggcggactgctgttactgacgctgagttaccgttactggcgccagcggggcgcgcgtttgcagcgtgccggaaaatggcttgcgctgctgccggtgctcttcgcgctatgggaagggctgacggccaagacggcgtttttgccggtgccgtttttcgctccgccgcaggcgctgattgaagtgctgcacgatgactggccgcggctgcttgatagcctactgcattcgctggggctgctcgggctcggagtgctgcttggcaccagttgcgggtttatcagcgggctggcgattggctggtctcagcgtattggctattgggtgcatccaattttacgcctgctggggccggtaccttccaccgcgctgctgccgctgtgcctgtttatctttccttccagcttcggcgccagcgtgtttttgattgcgctcagcacctggttcccggtcacggtattgacctggtccggggtcatcggtatcgataaagcgtggtatgacgtggcgcgaacgctgggagccagccagcgatttctgatcctgcgcgtggcgatccccgccgcgctgccgaacgtgtttgtcggcttgtttatggggcttggcgcgtcgttttcggtgctgattgtcgccgaaatggtcggcgtcaaatccgggatcggtttttatctgcagtgggcgcagggctgggcggcctatccgaatatgtacgcggcgctattcgtgatggcgttgttatgttccggcctgattagcgggctatttatgattcgcgatcggctgctgagctggcagcgaggagggatgcaatggtaa

SEQ ID NO: 89141 - DNA, 777 bp, Enterobacter aerogenes
atggtaagtgcccagacaatttcgaccggtgcggcggtggcggtacgtcatcttcatcatgcttttacgttgggcaaacagacggtgccggtgctggacaatatcagcctgcaactgcggccaggggagagtgtcgccctgcttggcccctcaggctgtggtaaatcgacgctgctgcgcctgctggcggggctggagccactgcaaagcgggcatattgagattgacgatgcggcgatgggcgggccggggccggaacggatcctggttttccaggacccgacgctttatccgtggctgacggtgcggcagaacgtgctgctggggccgcaggcgcaggggaaaaaggggctggagccgaaggccgacgcgctgatttcgcgcatcgggctgcagtcgttcagcgaggcgtggccgcggcagctttccggcgggatggcgcagcgtgcggcgctggcgcgcgcgttgctgaatgaaccgcgtttactgttgcttgatgagccgctgggtaagctggattcgcttacccgcatcagcatgcagcgcgagctgattgcactgtggcagcagcagggttataccagcctgctggtgactcatgatattgaagaagcgttgctgctttgcgagagagtactggtgatgtcgccgcggccggggcgcattatcgctgaatttacgcttcctttggcgtttccccgccatcgcgacaatccactgttattgcagcatcggcaggatattttgcgtatcctcggccaggaagaggattggtaa

SEQ ID NO: 89142 - DNA, 2154 bp, Enterobacter aerogenes
atgactcaaccccatgtcgcctgcaggacattgcaagggcgcgcgcttttttcgcttctttttttagcctcaccgggattaatggccgcagaaaataacgcggcaaagaatacaaaggatgttgaggacactattaccgtggtggctgacggccgccagcagaacgccaccagcggttatcagccgctgagttcgtccacggcgacattgacctcaatgccgctgctggatattccgcaggtggtgaataccgtcagcgaccgggtgctggaagatcagcacgctacctcgctggatgaagcattgtataacgtcgccaacgtagtgcagaccaataccctcggcggtacccaggatgcctttacccgccgcggcttcggcgccaatcgcgacggttctatcatgaccaacggcctgcgtaccgttttgccgcgcagctttaacgccgctaccgagcgggttgaagtcctgaagggcccggcctcgacgctgtacggtattctcgaccccggcgggctgattaacgttgtcaccaaacgccccgagcgccagttctctggttcggtttccgccacctccagcagttttggcggcggcacgggtagcttcgacgtgaccggaccgatagaaggaactcgtctggcctatcgactgatcggcgaatatcaaaatgaagattactggcgtaatttcggcaagaacaaaagcagctttatcgccccttccctgagctggtttggcgatagcgcgaccattaccgcttcgtattcacatcgcgattacagcgccccttttgaccgcggcaccattttcgacctcgataccggccacgcggtcaacgtcgatcgtaaaacccgtttcgatgaagcctttaatatcaccgatggttattccgatattgcccaactgaatgccgagtaccgtcttaacagcgcctggaccgcgcgctttgattacagttacagtcaggatcactacaacgataaccaggccagggtaatggcctatgattctgcgaccggcaacctgactcgccgggtcgacggcacgcacggctcgacgcaaaagatgcattccacccgcgccgatctacaaggcaatgtggtcatcggcggcttttataatgaactgctgaccggcgtcgcctatgagaattacgatctgctgcgtaccgatatgctgcgttgtaagaacgtgaaaggctttaatatttatcatccggtttacggcactcttgatacctgtaataccgtttccactgccgatagcgatcagcgcatcaagcaggagagctatgcgacctatctccaggacgccctgtatctgaccgacaactggattgccgtggccggcgtacgctaccagtattacacccagtacgccggtaaaggccgtccgtttaacgtcaataccgatagccgcgatgagaaatggacgccgaaggctgggctggtttacaaggtaacgccaaacgtgtcgctgtttgctaacgtcgcccagtcgtttatgccgcagtcgtcgattgccagctatatcggcgaactgccgccggaagagtccacctcttacgaagtcggcgcgaaattcgaccttttagagggtattaccgccaatatcgcgttatttgatattcataaacgtaacgtgctgtataccgaaagtatcggcgacgaaacggtggcgaagaccgcgggtaaggttcgctcgcgcggcgtggaggtggatctggcgggctcgctcaccgataacctcagcgtcatcgccagctacggctataccgatgccaaagtgctggaagatcccgattatgccggtaaaccgctaccgaacgtgccaaaacataccggttcgctgttcctgacctatgacattcataacgtctataacagcaacaccctgaccgttggcggcggcggccacgcggtcagcaaacgttccggcaccaacggcgcggattattatctgcagggctatgcggtggccgacgtcttcgcggcctatagaatgaagctgcagtatccggtaacgctacagatgaatgtgaagaacctgttcgataagacctattacacctcgtcaatcggcaccaataatctcggcaaccagattggcgacccgcgtgaagtgcagtttacggtgaaaatggatttttaa

SEQ ID NO: 89143 - DNA, 822 bp, Enterobacter aerogenes
atgccacagcgggtaaaccctgcagaaaaggggatcgtcctggaatccctgtcggccggatatggccagacgcttatcgtcgatgacattaacctgacgatccccagcggtaaaatgacggtgcttgccggggctaacggctcaggcaaatcaacgctgttatcgaccatcgcccggatgctaaaaccgctcggcggctgcgtgcgtctggacggaaaggccatccacgacatgccgaccaaaacggtttcccgccagctggggatcctgccgcaatcgccactgacgccggaagggctcacggtgttcgaactggtatcgcgcgggcgctacccgtggcaggggctgatgcgccagtggtctgcagccgatgaacaggcggtggaagaggcgctgctattaaccggcaccgccgaattcgcccatctggcggtcgatagcctttccggcggccagcgtcagcgctgctggatagcgatggcgctggcccagcagacgaaaaccatattactggatgagccgactacctggctcgacctgcgctatcaggtcgaaattcttgaactgctgcaaagcctgacccgcgaacatggccgcacggtagtgacggtgcttcacgacctgaactttgcggtgaactatgccgacctgctggtatttctcaaaaaggggcggatagccgggaccatttcagaacaggaaatctgcagccccgaactgattaaaaacgtctttgatgttgatgtgcagatgtcaatcaatccgcaaaccggcaaacctttctttatgccgtttcgcgcaccccaggccgttgcccgatga

SEQ ID NO: 89144 - DNA, 1026 bp, Enterobacter aerogenes
atgagcgccgccgtgctgtacgccacgcggcgtcgtactcgtccgcggttggccatgctgctattaaccctgatgctaatcgccggttcgctgattcatcttggtttaggcgcccgctggatcgcgccgcagacggtcctgcaggcgctgatcgagtacgacccgcggaacttcgatcaccgtattattgttgatttacgtctggttcggctggcagcggcgctgttgaccggcgcggcgcttggcgttgccggggtgctgctgcagacggtgatccgcaacccgcttggcgagccgcatatccttgggctcaacgccggggcctcgttggcggtggtcgcgacctcggcgctgggcctctctgtcggcgattttccggcagctcgcccgctaaccgccgcctgtggcgcggcgctactgttcggcggggtaatggcgctggcctctgccgggcgcggcggggcgacgccgctgcgcattacgctatgcggcgtggcgatctcggcgtttgcctcggcggtgacggcggcgatattaattcttgacgaacaaacgctgctggcgatgcgcacctggcttgccggcgatctggccgggttgaactgggctactctacaggcggcgctggtgccggcgctttctggcatgggactggcgctgcttctcgcgccacgtctgaacgtgctggcgctgggcgataaagtggcgctggggttgggggtgaatctggtgcagacccggctgctggggctggccgctattgcgttgctgtgcggcgcggcggtggcggtcgccggaccaatagggttcgtcgggctggtggtgccacacgtggtgcgccgtctgataacgcaagatattcgtctggcgttaccgctggcggcgccggtaggggcgctggtgctggtgctggcggatatcgccgcacgcacgatcgtcgccccgcaggaactggcgaccggcgcgatgaccgcgctggtgggcgcgccgctgtttatctttattgccgcgaggttttttaaatga

SEQ ID NO: 89145 - DNA, 1053 bp, Enterobacter aerogenes
atgaaacgcgccgttcatcgcgccggatttcggcctctggcgatgggttcaacccgcctattgttacgtccggcggcattaaaaattgccgccttcatcctgttcattttgctgacgctggggctctacagcctcagccgcggcagcttcccgctgccgtcttcgacatgggcgcgtgcgctgctggcgccggagcagattggcgagcagcaacgctttatcctgtttgacattcgcctgccgcgaattttgatggcgctgctgtgcggcgccatgcttggcctggcgggggcggcgatgcagagcattacccgtaacggtctggcggaccccggccttattggcgtcaaagagggagcctgcattgtggtactggcgctaattctgtttttcccggccatagggctggcgtggcggccgctggcgggaatgctcggcggcgtgctggtggcgctgttggtgctggcgctggcgcgtgattgttcacgtccgcgctttattctgattggcatcggcgtgtcatggacgctggcggcggcggttggcatttttatgaccaccgctgacgtacgcgatgtacagacggcgatgatctggctctccggcagcctgcacgcggcgacctggccgctgctggcggtggcgttttgctgggcgctgcctggcgcattgattctgttctgcaccgcccgcgcggcggatgtggcgctgctgggcgatcgtactgccatcggtcttggcgtgcgtttgccccagctcacgctactgcgtttcttcgcccccgtgctgctgacctctgccagcgtttcctgcgttggcagtctgggttttgtcggtctgatggcgccgcatatggcgcgcttcgtcctgcgcggcggtcaggtggcgctactctgcggcagcgcgctgattggcgcgttgctggtgctggcaaccgatacgctggggcggctggcgtttgcgccgctgcagatcccggcggggattgttattgctctggtggggtgcccattttttattgctctgctttggcgtcgccgtgacgccctgtaa

SEQ ID NO: 89146 - DNA, 948 bp, Enterobacter aerogenes
atgcgttggttcgtttctctgctggtgctgtgcgcgggcgctgccgcggctgccgattcgcaaaccttcaccgacgatttaggtcgtacggtgaccgtaccgctgcatccgcagcgtatcgtttcgatgcacgatctcgatattaccatcccgctaattgagcttggggtaccgccggtggccagccatggccgcacgcgcccggacggcagccactacctacgttccagcgcccaactgaccggcgtcgatttcgacaatagcgagatccgctttattggcaccgccgatattgaccttgaagccgtggccgcggcgaagccggatctgattattaccgagcccagccgccatgtctcggtggagcaactggcgaaaatcgcgccgacggtcagtatcgatcacctgcaaggcagcgcgccgcggatttaccgcaaactggcgcagctcaccggcagccaggcgcggctggcggtgcttgaacgtcgttatcaggaacaaattaaacagctaaaggccacggtcgatccgcagcagtatcgcgtgtcggtgattcaggcgaataacggcaaggtgacggtacaccactcctatcacgcgctggggcgagttttgcgtgacgccgggttccgtttcccgccgttgatcgacaagatccccgatggccagcggatcgacgtcagcgccgagcagctaccggaactggatgccgattttgtcttcgcgacctggcgttcggacaccggcggtaagccgcaggatgagctaaaggccatggaggcggtaatgcccggctggtgtgactttatgcgcgcctgccgcaccggccgctatattttgttgccgcgcgaagaggttatttctaattcgtacgccgcattgacgctgatggtggctcaggtgcagtcgcacatcgtcgggcggccgattccggcgggggcgaaatga

SEQ ID NO: 89147 - DNA, 900 bp, Enterobacter aerogenes
atgaaagcgggagtgaaaaaagagaagggcagagtcgatctgtttggcgagcgttttcgcgcccgcgcgcatcagctttcgccccgtttacgcgaagtggcaaactacattaatgataatcgcgaggtggtactggaacgcacggcgatggagatcgccaccgctactcacacctccgatgccaccgtggtgagggcaattcaggcattgggttttgccgggctacgcgagttaaaagagaccatggcgcgctggttcgggccgtcagcgacctcgtcggaaaagatgcgctcgacggtgggggcactctcctgtgatgtcaattccagcatcgattttgtgctcgatgggcatcagcgcgcctgtgaggtgctatcgcgtgcggataatcgcgcggcggtagcccaggcggtggcgctgctgggcgatgcgcgtcaggtggcgatatttggcatcggggcgtcggggatcctcgccgagtacaccgcgcgtctgtttaatcgtattggcttacctgcctgtaccctcaaccgtaccggcttcagtcttgctgagcagttgattagcctgcagcgcggcgacgtgctgattatgatggggcaaaaatcaccgcaccgggagggcatgaccacgttgcgcgaggcgcagcggctggggatcccgacgatattactcacccaggcgctggattcgcgcttcagccaactggcacaggtggtgattgatgttccgcgcggcggcgataacgggcgagtgccgctgcacggtacggtgctgatttgccttgagatgatcgtgctgtccgttgcctcgactacgccgcaaaagacggtcaaatcaatgaagcgaatcaatgaattgcatcgagccattggcaaatcaggtggtcaacgcggttga

SEQ ID NO: 89148 - DNA, 768 bp, Enterobacter aerogenes
atggtcaagaatttgctcaaagcgtgtttcatgatggccgcgctggcggcagccggacaggcggctgcggaaacctataccgtcggttctggcggcacctaccgtccctttgaattcgaaaatagccaaaagcagctggaaggctttgatatcgatatcattaaagcgatcgccagggccgaaggttttgacgtcaaattggtcaacaccccctgggagggcattttcgccactctgggtaccggcgatcgcgatattatcatctcgggtattaccatcaccgataaacgcaaacagatggtggatttctccgcgccgtacttcgcggccgagcagtcgattgtggtgccgcaaggttcaaaagtgaactcgctggcggcgttaaaaaacgaaaaagtcggcgtggtgaactccagcactggcgatattgtggtttcgcaggaactgggtaaaaacagcacctccattaagcgcttcgacaatacgccactcatgctgcaggagctgtttgaagacggcgtcagcgctgcggtaggcgacgttggggtggttaaatactacatcaagcagcacccggaaaagcagttcaagctggtgcctgacgctaaatttgagcgccagtatttcggcatcgccgtcgctaaaggtaacagtgaactgctgggcaaaatcaacgccggtttgcagaaaattgttgccgacggcacctacgccaaaatctataaaacctggttcgatgacaacgtgccgacgctgcctgcgcaataa

SEQ ID NO: 89149 - DNA, 765 bp, Enterobacter aerogenes
atgacgggattccgttgggagatcatcgaggagtatggcccgctgtttatggacggcgccttgatgacgattaaatgtaccattatctgcgtgatcctcgggacgttgtgggggttaacgcttggactggggcggatggcgaaggccgagcacgggccatggaaatatattctgcgttatctggtgcagtttccggtgcgcttctacgtcagcgccttccgcggtacgccgctgtttgtgcagatcatggtggtccactttgcgctggtgccgctgtttattaacccgcgcgacggcctgctggtcaccagcggagtgatgagtgccgatttcgcccgcgaactgcgttctaactacggcgcgttcctctcctgtatcgtggcgattacccttaacgccggggcctacgtgtcggagatcttccgcgccgggatccagtctatcgataaagggcagatggaagcttcgcgcgcgctgggtatgccgtggtggaaaaccatgcgtaaagtgatcctgccgcaggcatttcgccgcattctgccgccgcttggcaacaacgctatcgctattgttaaagactcatcgctggcctcggcgatcgggcttgccgatctggcctacgcggcgcgaaccgtctccggcgcgtacgccacctactgggagccctacctgacgatctcgctggtctattgggtgattaccttcctgctggcgcagctggttaaccgtctggaaaagaggtttggcaaaagtgattcacattaa

SEQ ID NO: 89150 - DNA, 723 bp, Enterobacter aerogenes
gtgattcacattaataatttacataagcgctttggcgatagccacgtgctgcgcggcatcagttgcgatattaaaccgcaggaagtggtgtgcattatcgggccctccggctccggcaaaagcacctttttgcgctgtatgaatgcgctggaaaccgtgagcgaaggcgaagtggtggtcaacggctttgccgcccatgaccggacgaccgacctcaacaagatgcgtgaaagcgttggcatggtgttccagcgctttaacctgttcccgcatatgacggtgctggaaaacctgctgatggcgccgatgaatttgcgcaacatgccgcgccaacaggcggtcgacctggcggaggccttgctggcgaaggtgggactcagcgataagcgtgacgcctggccttccagcctctccggcggtcagcagcagcgggtagcgattgcccgtgcgctggcaatgaagccatcgatcatgctgtttgatgagcccacgtcagcgctggatccggaactggtaggggatgtgctggaagtgatgaaaaatctcgccagcgaagggatgacgatggtgatcgtgacccacgaaatgggctttgcccgcgaagtggccgaccgggtgattttcatcgatcagggggtgattcaggaagagggcaaaccggcgaagatctttagcgcgccgaccaatccgcgcaccgctgccttcctcagtaaggtgctgtag

SEQ ID NO: 89151 - DNA, 1200 bp, Enterobacter aerogenes
atgtttaacccagaccagaatcgcctggcccccacgctggcgatgatcatggccgcttcacttgtgggatttatcaccggctatacggtgccattaatcagccttgagctggcgcagcagcaagttgctccgctttatgtcggcctgctggccgcgctgccgcccgctggaatgatgctctcttcttttctttctcccgcgctgtgccgtcgttttgaaatgggcgcgttgctcagcgttagcctgatcctgctggcgttggcgaccatcgcctcctgcatgaccaccgacatgacgctgttgctggtgccgcgtctgctgaccggactcgcctccggcgtcattatcgtattgggggaaagctggataaccggcggcgcggcgggcagtaatcgcgctactctcaccggcatctatgcctcggcctttaccggctgccagctcgccggcccgctgcttatctccgtcggccccgcctggcaacacgcggcgctgatggccattgtcgccattaccgccgtttgcctgctaatgctgcgtcatctgccgcgcggcagtcgcgaaagccttgccgagcgcgccagctggcgcagcctgggggcgtttctaccggtgctggcctctggggtattctgctttgccttcttcgacgccagtattctcgcgctactgccgctgtacggcatcgataaaggtttaaatgaaacgatggcggtactgctggtcaccgtcgtcctcaccggcgacgctatgttccaggcgccgctgggctgggttgccgaccgcttcggcatccgtcgcgtgcatcttatctgcgcggttgtctttagtctgtcgctactggcgctgccgtttatgctcgcctcgcgagtacagctgatggctatctgcctgctgctcggcgccgcggcgggcgcgctttacaccctgtcgctggtgcgggcggggaaaacctttagcgggcaaaagctcatcatgattaacgccctgtttggctttttctggtccgccggtagcgtggccgggccgattgtcagcggcatgctgattggcgtctctggctatgacggcttgatcatcaccctgttcgccagcggcgtgctgttcctgctaatccagtgtcttagcaagaatgaaaaaacgctgctcgccaatgagcaggaagaagacatggaagaggctaccgagaccgcgcaatag

SEQ ID NO: 89152 - DNA, 1164 bp, Enterobacter aerogenes
atggcggtatcgtcttcactgattgccgaagctatcggctggcgtcgcgattttcatgctcatccggagctcgggtaccaggagcaggagacctcgcgtcgggttgccgggctactggcttcgttcggcctgcaggtacatgtcgggctggcaggtaccggggtcgtcgcgacgcttgagaacggcccggggccggtgattggcctgcgcgccgatatggatgcgctaccgatcgctgaacaggggacggtggaatatcgttcgcgtcgtgctggcgtgatgcatgcctgcggtcatgacggccacaccgccatgctgttggctgccgccgcgcaccttgcccagacccgcaactttggcggcaccgtgcattttgtctttcagcccgcggaggagaacctcggcggcgcgcgcaaaatggtggaagaggggttgttcgagcgcttcccgatggacgccatttacgcgttgcacaactggccaggcttgccgctggggcatgtggcggtgaatcccggggcaatgatggcctcgcttgatgccttcgagataacgctcaccggtaaaagctgccatgcggcgatgccggagagcggcgccgaccctatcgtcgccgccgcccagctgattatggcgctgcagacgattccgtcgcgccgcctgtcgccgcaggattccgcagtggtcagcattacccagataaacggcggtgaggcgatcaacgtgctgccggaccgcgtggtgctgcgcgggacttttcgctgcctgagcaatacggtgcgcgagcgggtaaaaaacctgattgagcagtacgtgcatacgcagccgcaggtttccgacgttgacggtcagatttcgtggtatccgggctatccggtgaccaaaaatgatgcgcaacaggcgctgaaggtgcgcgaggtggcgcaggccgagctcggcgaagccgcggtgcgctggcagatcaatccttccatggcgtcggaggattttgcctgcatgctggaagtgtgtcccggcgcctatttctggataggcacagacggcgagacgccctccaggccgctacacaatgccagctacgattttaacgacgatctactggcgccgggcgtggcgctgtggacggcgctggtggaatcactgctgcctgccgggcagggctaa

SEQ ID NO: 89153 - DNA, 291 bp, Enterobacter aerogenes
atgagtggacaagccagaataattgaaaatacgggaagggatgttacgccgcattatcaactggcagcctggctggctctgcgagcagcacaagaagcaggttgtaccgccgcattgttaactgatggtagtcctacgtgcggcagtcagtttatctataacggttctttcagtaatcagcgtaaatcgggtatgggagtggcggcgtcactgctcagtgagcatggcatcacggtattttcagaagctcagtttgcggagcttgtgagctggatagaagaacgggaatga

SEQ ID NO: 89154 - DNA, 747 bp, Enterobacter aerogenes
atgaatttccagaataaagttgctgtcatcacaggaagcacgacagggataggtgaggcagtcgcagagcaattacaccaacatggtgctaaggtcgttattgtctcccgctcgccagagcaggccatccaaaaagcgaaacaattatcttcacaggggcaacaggcgctggggatcggatgcgatgtgtcgcaacctgaacaagtacagaaaatgattgctgaagtgatcaaacatttcggcagacttgattatgctgtaaataatgcgggcataacaggtgagcatggtaaaaatataacagaacagacggttgaaaactgggacaaagttattgccacttcattgagcggcgttttttactgcctaaaatacgaaatacctgcaatgatgaagtttggcggctctatcgttaatttatctgcagtcaatggtctggttggcattccaggattagcgccctacaccgtggctaaacacggtatcatcggtttgacccaagccgcagcattagagtttgcaacgcaaggcattcgaatcaatgccgttgctccgggctacgtccaaacgccacgaatgagtgaattccctgacaatatcgtatgtagtttcgccaatagccacccaatgaagaggatggcaaaaatgcgagaaatagcagacttcatactgtttttgctgtcagaaaatgcggcgttctgtaccggcggcgtttatcccatcgatggtggttatttagctgagtga

SEQ ID NO: 89155 - DNA, 690 bp, Enterobacter aerogenes
atgaccagaacagagaggcttctcgagttactacagatattaagagcgcaaagatatcccatcacggcatccacgctctcagaaagattagggataagcgtacgttcactttacagggatataaaaacgctacagcatcaaggggtgcgcattgaaggtggggccggaatgggttatatcgttaagtctgactttcatttaccacccttaaatttttctcatgaagaaatcaatgctattacccttgggctaaattgggtatctcataacacagatgatgatttcaaaaacacagcaaggaatgcgcttgctaaaatacacgccgtcattcccgacgaattcaaaagccttatcgaaagccaatcttatttaatcggtccttcagaaagtaatgaggtctttttcaaagacattcgcgatgctattaaaaagcaaaagagagtccaaataaaatattgtgacaagaaaggcactgactcttctcgtgttatatggcccatcggattggcatatatgcagtcatgttggcttttggtcgcatggtgtgagatgagaaatgattttcgtcattttagaactgacaaaattgcagagatggcacaactggactctatatacagggaaagccggatggctttattgaaaaaatggagaataaaagaagggatcgccgaggagaaagagtactga

SEQ ID NO: 89156 - DNA, 900 bp, Enterobacter aerogenes
atggcaagacgcaacctcaacgatttactctctttcgtcaccgtggcgcgggaaggcagcttcacgcgtgccgccgcgcagcttggcctgacccagcctgcgctgagccaggcgatttccgggttggaagagcgaatgcaaatccgcctgctgacgcggaccacccgcagtgtgtccccgacggcggccggggaacgcctgttgcaatcggtgggccatcgtattgatgagatagaggctgagctggacatgctgactgaactgcgggacaagcctgcaggaatcgtccgcatcacctgcgggccgaacgtgctgaaaacgactctgctgcccaagctggcgccgctgctccgcgaatatccggatattcatattgagttcgatgctaatcacggattccgggatatcgtggcggatcggtttgatgcgggcgtgcggcttggcgatacgattgataaagatatgatagcgatgccaatcggcccgaaactgcgcatggcagcagccgcctcgccagattatttcgtacgatacccggtgccgaaaacgcctcatgatctgacgcagcatcagtgtattaatatgcgcatggtccgctccggcgggatttatgtctgggaattcgatcacgagggaggagagttgaaggtccgggttaatggacagttgacgtttaacacgtcggatcatgttgtcgacgccgccctggccgggttaggcatcgcctttttacctgaagaggaattcggctcacacatcagagaaggtcgtctcgtacgcgtgcttgagtcctggtgtcatccttttccgggctactatctttattatcccagccgcaaacagccttccccagccttctcactcgttgttgatgcgctgcgcatgaacgggaaactttaa

SEQ ID NO: 89157 - DNA, 1230 bp, Enterobacter aerogenes
atgcgtaatcagaaaactgaaaccaaaaaccagaacggagcaagtgaaaaacaacaggcgcactggggcggcgtgtttgctatgacgctgtgtgtcttcgccctaatcgcctccgagtttatgccggtcagccttctgacatcgatggcgcactccctaaacgtcaccgaaggcatggccgggcaggggatcgctatttccggcgcgtttgcggtggtgaccagcctgtttatttcccgactggcaggcacgcttaaccggaaaaagctgctgcttggcctgacgtgcatcatggcactttcggggggcgtcattgcgatggcacctaattacctgacctatatgaccggccgggccctgattggcatcgtggtcggcgggttctggtcgatgtcggcggcgacagcgatgcgtctggtgccggtgcaccgtgttccgctggccctggccatttttaacagcggcaacgcgctggcaaccgttgtggccgcgcctctgggcagctggctgggttccgtcatcggctggcggggggcctttttgtgcctgttacccgtcgccatcgtcgcgtttatctggcaactgcttagcctgccctcgatgccggttacccgccagccagcgggggccggcaacgtctttgcactgttacgccgtcgggtggtcatgctgggcatgctgggggtggggatcttctttatggggcagttcacgctctttacctatatccggcctttccttgagacggtcacgaaggtggacgcctcagcggtgactctcatcctgctggtcatcgggagcgcgggtttcatcggcaccacgctgattggccgggtactgaagcgcggattctacccgacgctaatggctattcctgtgctgatggcgatcgtcgcgctggccctgatcgcgtttggcagccaggcggccatcgtgacggccttgctcgggctgtgggggtttatttcaaccgccgcgcccgtgggatggtgggcatgggttccacgcacgttcccgcagaatgccgaagcgggcggcgggctgatggtggcgatggtgcagttgtccatagcgctgggatccaccgtggggggcgtgctgttcgaccatcatggctaccagagcaccttcctggccagcgccgcgatgttgattatcgcaaccgtactgattttcctgacctcacgtgcagacgcgtctgccgagggtctttcatcacactcgtcctga

SEQ ID NO: 89158 - DNA, 1029 bp, Enterobacter aerogenes
atgaataaatttgcgttagccctgggaatgttcattagcgcatttgccgcctcggcggcggatatgtccagaggcgctgataacttttataaaagcgaaaaggtgacgcagcagaaagtcacctttaaaaatcagtatcaaatgaacgtggtcggcaatctgtttatcccgaaaacgatgaatcagaacgccaaaaacccggcgatcgtcgttggccatccaatgggcgcggtcaaggaacaaagcgcaaacctgtatgcgcagaagctggcggagcaggggtttgttacgctggcgatcgatctctcgttctggggggaaagcgaaggcaagccggggcacctgatttcaccagaaatctacgcggatgatttcagcgcggcggtggattacctcagtacacaatcgtttattgatccagataatatcggcgtgctgggcatctgcggcagcggaagttttgtcatcagcgccgcgaaaattgacccgcgtatgaaagctatcgccaccgtcagcatgtatgacatgggcgccgcgtttcgtaacggccttaaccactcccagacgctggaacagcgtaaggcctttatccagtcggccattgagcagcggtttgccgaattcaaaggaggagagaaaacttatattccgggcactgtgaataagctggacgcttccacgccggaaattcagcgcgagttctttgatttctatcgcaccgaacgcggcggttataccccgcagggcgagaaagaggaactgacgacaaaaccaatgctgagcagtatcggtaagtttatgaacttctatccatttaacgatattgaaaccatttcgccgcgtccgatgctctttattaccggtgaccaggcccattcaaaagagttcagcgaggacgcctttaaacgcgccggtcagcctaaagagctgtatgtcgttccgggggcagggcacgtcgatctgtatgaccgcacggatgtgatccccttcgacaagctgacggactttttccgcaacaacctgaaataa

SEQ ID NO: 89159 - DNA, 249 bp, Enterobacter aerogenes
atggctgtgtggtgtcacttgcgggggttacatgatttacctgtaatcaagtgccatagcaaacgggcaaatattcttgaggctgcggggaagtgcagcctcagtgatatgactgtggaaagcggtttattatttctttgctgctcgaatcaggccgtcaagccattcctgatgaccattaagcattgggttcgggcgggtattggccagatcttttgccgggactccgttctgtgtttcctgcgttag

SEQ ID NO: 89160 - DNA, 507 bp, Enterobacter aerogenes
atgaacgcgattaactggcctgaaggctttattccgggttttaccgataactttgtttctaatgaaatgatcatctcaggtctgaacgtcaatgatgtctggccgctcctgtgtcagccactgctatggccggaatactataaaaattccgccgatgtgcgcttttatgacaacaaaggtccagaattggaaaatggggttcgcttctacttcagcacgtttggtttcccagttgaagctcaggttgtggagattgtgccacctgctgaaggtaaacctgctcgcctggcatggcacggatgggccggtgaaaaagataccgctcaacgactcgatgtccatcatgcgtggctactggaggatctttccggtcacagggtccgtatcctaacgcaggaaacacagaacggagtcccggcaaaagatctggccaatacccgcccgaacccaatgcttaatggtcatcaggaatggcttgacggcctgattcgagcagcaaagaaataa

SEQ ID NO: 89161 - DNA, 909 bp, Enterobacter aerogenes
atgaaaaatgatatgagaaccctcgaccttaaccttcttaaggcccttgatgcattactggatgaaggaagcgtgacccgggctgcgcagcgcctctccctgacacaacctgccgtcagtggcatgcttattcgcttgcgtgattattttgacgatcccctctttgttcgcaccagtcacggtatggttcccacaatgcgggccaccgaactttctatgccggtgaaacaaatactcaccgatatcgctatcatgctgaaaccaaagcaatttgatcctatggcggcggagctgacttataccatcgtagcaacggactatgcacttaaggctgttgtcgttccgttgatggctgagctaaaacaacgtgcaccgaatattaaaatcgccgtgcggcccgtggacaatgagcgaatgtatcagcagttgtctcggggtgaagttgatctggctttgataacaccgcaaacaacccccgaagacctgcatggaagagcgctctatgaagaagattatgtctgcgtagcacgacgtcatcatcctctggcagcgagttcggaaatgacgctcgaacaattttgcaaacagaaacatattctggtgtcatcagaaggtaacttcaccggtgttacagatgaagcactggctaagctcagtctgacacgacgagtaggcatgtcagttaacagttttcaggtgatacctgacatattgcaagtgactgatatgattgcagttgtacctcaccgcatggtcttgactaacaacgatctcatcattctccctttgcccctgaaagtacccggctttaccaagagcatggcctggcatgagcgaacccatcgtgacccaagtcatcagtggattcgtgctttatgcgcagaagtaagccaacatcccgcgccctga

SEQ ID NO: 89162 - DNA, 900 bp, Enterobacter aerogenes
atgaacaaacttgatgctctaaagttttttatcatcgcctctgataccctgaacttccgcgaagcagcaaccaagctgtcggtttcaccatcagtagtcacgcggacagtcgctgagctggagaaacaacttggtgaacctcttttcaaacgcaatactcgttcgatctttctcaccagtttcggcgagctatttttaccccaagcgaagcgactgctggaggattctgaaaaactatttcagacggcgaaagatgataatgaaatgaagggtattgttcgtatcacattacttcgatttccaaatcatgaacaaatattgtatgaactattgactgcactacgtccctatcctgagttatttatcgactggcgtttagatatgatgaaacttgatactatagagcatcgtatcgatataggtatacgcgtagggcgagaacctaatcctaactttatcattaaaaacatcgggcaagttgaacatattttagtctcatcccctgaactcattgcacgcctgggagcaccaactgatttagaagatcttcggcagcgttatccatttagtggtttaattaaccctgatacaggaaaattatttgagtttatgagtgacgcagtgaatacttttgtccctcgtcatatcgagttttatacaacagacccatacgccgaaattcaggctgcattggccgggaaaacagttgtacaatccagcgattttatttgtagggagtacttaacaagcggccaacttgttcccccactgccagaactgcgacaggagaaatggcaattttatttatatcggccttaccagctgattactccaaaaagggtgacggtcgttttctcgctattagaaaaaatattacgcaaatatttcgcatcaaaataa

SEQ ID NO: 89163 - DNA, 573 bp, Enterobacter aerogenes
atgtcaattcaaccagtagagttaaacaaagcctatcgtttattgcagatcgggccaacaacaatgatatcggctaaaaatgatggcattgaaaatgtcatggcagcggcttgggtgggattaataggcaataacaaagtgatggcttttataggtccacaggcatttactcgtgggcttgtagaaaaaagcggatattacgttgtccagatcccagtagtaaatcagatggaaatggttttatatgctgggggcaacagttattctgacacacccgataaaaacagtaaaattccactgttttatcagaaagagtttgatctgcctttagttgaaggttgcgttggttggctagtctgtaaggtcatacccaatgaagaaaatgaaaagcagcacaacttgttcatgggggaaattatcggagcatggagcgatgaccgcgttttcagaaatgggcactggatttttgatgatgcgcctgatgaattacgtactgtccattacgtagctggcggacagttttacgccattggcaaaggtacaaaatttaattatggtccaggaaaagactaa

SEQ ID NO: 89164 - DNA, 789 bp, Enterobacter aerogenes
gtggatagcaccttttcagcaaggtttccgtggaaagaaactggcttgccacaggagtattttttacagcgaaaacttaatattgatggacagcattttcttactggtccgcgttaccgtgggggcgatatcaatagccctttcattgacattgtcgcttcagactccagtatagattgttctgtactcaaatacgtttgccaagagtgggcgcagctaaagccgctgtacattcgaattctcacgcccggccatcataaaaatcagggtataacagatcaattcatctatgcatcctgcttgtcaggtgcctcagaatatcaggatgacacagtaaccctgaggctggctaaacacgccgattttgaatggtgtcgaaaggcgctcatggatgcctatcagaattcgttgtcagctatcccagccttaagaggcaatctgtgctctgtcgatgacgaagaactcagtgattatatttcagaaggcgttgcacatattgtttatgaagaaggagtacgcgtcggactaataatttgcgaaaaaggaggcgtcgcttttttaagtggccacaggatttctgaagaggtaatccttcctgcctttcgcggacgctctctggcctcccgggctcagcgcctgctttgtaaccatcttcaacgctccagccgggaaccctgcctaatgacagggactatcattccggaaaatttgccgtcgataaagacagctgaaacagcggggcggacatgcattctcagatttgagtatttacctgtgatgtttagttaa

SEQ ID NO: 89165 - DNA, 1467 bp, Enterobacter aerogenes
atgaactattacggtgatttacgcagttatatcgatgccctcgacgccatgggcgacatcatgcacgtgacccgcgaagtggacggtgattttgagccgagcgctattacccgccgcagctatgagatccagtcccctgccccgctgttccataaggtggcaggcgtggcccccggtttccgcctgttcggtgccccggccagcctctcctcccgtcaggagatgccttatgcccgcgtggcgatgtcgctcggcctggccccggaatccaccgggccgcagatcgtcgaagcgctgtcggcggcgcgccataagcccggcattcccccggtgcgggtggagtctgcggatgccctgtgtcatcagaacatcctgcgcggtgaagaggcgaacctcgatcgcttcccgatcccctttgcccacgacaaggacggtggtcgctacgccaacacctggggcacgctgatcgtcaaaacgccggacggcaaatgggtgaactggtccatcgcccgcgtgatgaaggtcgacggcaaacggatggtggggctgattgtgccgagccagcatatcggccagatctggagtgagtgggtcaaactcggccagccgatgccttacgccctggtgcagggcccggctccggcgatctcgtgcgtgtccggcattccgatcccggcccacgccgacgaggcggattacatcggcaccctggcgggcgatccggtgccggtggtgaaagcggtcagtatagatctggacgtgcctgccacggcagagattgtgattgagggccatgtctcgatcaaccgcgattgccaggaaggcccctacggcgagtacggcggctatcttggcgagggctcgtctgcccaaccgaccttccacgtcgagaccattacccaccgggacgacccgatctggccgatgtcgatcaccggccgaccgaccgacgagtcgcacacgctctgggcgatgggactggccgccgatgccctgacgtatctgcgtgaagcggaactgccgattgtcaccgcctggatcccggaggactctaccgtccactggctgctggtggtggtgccgcagaactggcgcgagctactgccaggcgtcagcagcgaagccctggcccagcgcatcggcgaggtgctgtttaagaccgacgcgatggtatttattccgaaggtctacgtggtagacgatgattttgatcccaccaacctgcgcgaagtggtgtgggcgctctcaacccgcgttcacccggttggccgccgcgtggtgttcgacgatcagcgcgtgatccgcttgccgcagtgttatgaagaagaagagtatgtggcaggtaagggggcaaaagtggtgtttgatacgctgcagtccacccgccatctgcatgcctcatttgagcaggggtatccggaagaggtacgccagcgcgtactggagaactggccgtcggagttataa

SEQ ID NO: 89166 - DNA, 651 bp, Enterobacter aerogenes
atgacaatcatattgttcgagaacaaacagtttgaactcaaactatacatgaaagaatacattcagagaacccgcatgaagcttgttgtaggcatgactggcgcgacaggcgctgcaattggcgttcgtttactggccgcgttgaaaactctggacgtcgaaacgcatctgatcatctccaagtgggcgcgcgccaccattcaactggaaacgccctacagtgtacaggaggttgtcgccctcgcctcgaagacttatagcaagcacgaccaggcggccgccatctccagcggctcattccgcgtcgacggcatgatcgtcgtgccgtgcagcatggaaacccttgccgccatccgctgcggctacggtgatggcctgattgcccgcgccgccgacgtgaccctgaaagagcagcgcaagctgatgctggtgccacgggaatcgccgctcaacgccatccacctggagaacatgctcgccctgacccgcgccggggcgatgatgctgccgccgatgcccgccttctataacaaccccaccagcacggacgacatcatcaaccactttgtgtcgcgcattctgaatcagttcggcctggataacgctttaacaaaacgcaggggggaatctcactccaccccaacggcttaa

SEQ ID NO: 89167 - DNA, 489 bp, Enterobacter aerogenes
atggcagaaaatcgcgacttaatccttgccgcgcccctgtggccgcacggcgattgttcattaatgcacctgatgcgccgcgcagggcagcactccaccacctgctggagccagtgcgtcgataccgggttatctgccgtgcagtacgccatactggtagtgctggcggaagaaaccacctgcgaccagcaaacgctagggagccgcgccgggtttgataaagccaccggcacctatgtgattgatcgtatgaccaaaagtgggttactgacggtagagaccgatcccgccaaccgccgccgcaagcaggtctccatgaccgcagagggtgaggcgatgctggcccggatgattgagcaggccaaaagcgccgagaagatgattaccgctggtctgaattcccaggatatcgcggacctgaagcgtctgctgagcaagctggggggattgcaggagcctgatgactatgcctccaacgaaattgcctga

SEQ ID NO: 89168 - DNA, 1017 bp, Enterobacter aerogenes
atgcctccaacgaaattgcctgacagtgagccgaagcccgatctgacgatcggctttctgctaatgaagcactttacgctggcctcggtggcgggactggtggagtccctgcgctttgcggcggacgagtccttctccagccggcagatcttctgccgctgggagtggatgacctgcgatgaccagccgattaccgccagctgcggtctgccggtgtcacccaccgctaagctcgatttctcaaaagagtgggattacttcgtggtcgcgggcggactgctggaagagacccgccagtcgccggagtggctgttgcaggccctgcgggacctgcatgcccgcaatatcccgatcattaccctgtgcagcggggcctttgtcgccggtaacgccgggctgctggacggtcgccactgcgcgatccacttcaccacccgggatgagttccggctgcgcttcccgaatgccattccggtgattgataaaacctacatcaaggacggcgggattatctcctgtccgggcggcacggcgattgacctggcggcggatctgatccgccagcactgcgggctggtgcgctcgcaaaaggtgctgaaatatctgctggtggatgaggtgctcacgccgaaagcgaagtacaaagcgtcgctcagcgaacccgacgtttacgagaacccgctggtcaccagggtgattgagtttatgaagcaccatctcgactcgccggtgccgctggcggaggtggcagagtttgccggggtaaccttccgccagctcaatctgatctttacccagtgtaccggccactcggcggcggtgtactggcggcggatgcggcttgagcaggcgcgtaagctgatggccgactccagcaacagcattaacgccattgccacggccaccggttttgcggatgcctcgcacctgatcgcctggttccgtaagcagtacggtgaaacccccagttcattcagaaagcggcgcaggaaagtggaaaaactagtgaaagagtaa

SEQ ID NO: 89169 - DNA, 1383 bp, Enterobacter aerogenes
atgtcaaataccgtttctgttgaagacgtaccactcaaccgctttcaccgtctgctgaccgttcgctccggcggcggctccttcgtcgatggctatgtgctgagcattatcggcatcgccatgatgaaggtctccccggccctggggctgaccgccttctgggaggggctgattgccgcctcggcgctgatcggcatcttctttggcggttttatcggcggcgctcttaccgaccggctgggcagacggatgctctatttcgttggcccgacgctgtttgtggtctgctccgtggcgcaatactgggtgcagagcggcgagatgctgtttgccctgcgctttttaaacggcgtggcggtgggcattgaatacccggtggcgaccgccttcctggtggagtttttgccgaagaaaaaccgcgggccgtgcctggccaccctcaccatcctgtggtttgccggtgccgccgcagcctatatgctcggcgaagcgctgctgcactttggcggcccggacgcctggcgtctgaccctggccagcactgcggtcattggtgcgctgctgttcctggtgcgtatgggcaccccggaatccccgcgctggctgatcagcaaaggccgtcacgcagaagccgaagcgattattcgcaaggtgtatggccctgactttggcctgggcaacctgccggagcaggcggaaagcaaaaacctctccttcttcaacctgctgcactcaggttacggtaaacgtatggcgttcgtggccatcttctggacctgctcagtgatcccggtcttcgcggtgtatgcctttgcgccgaaagtgctggatgccctgcacctgagcggtaagtgggcctcctacggttccgtcgccatcacgttgctgttcgtggtcggctgcgttatcgcaacccggctggtgaacactctgggccgccgcaagctgctgctgcaaagcttcctctggtcgggactggcgctgctgctgctgggcctgctgcgtgacggtccgtcgatgatcattctgctgatgttcggtgcctacgcgctgtttatcggtggagcgcaggtgctgcagctggtctatccgaacgagatcttcccgacggagatccgtgccggtgcggtgggcgtggggacctcgctgtcgcgcattggtgccgcggtcgggacctggctggtgcccgcctcgctgcagagcctggggatcggcacaaccatgtacatcgccgcggcgatcacctttgtgggactggtcgtctcctggtggctggcaccggaaaccaacgcccgcagcctggccgatgcgtcctcgctggataatgaggcctcgcagaaagcgcgcgtgccggggcatatggcgaagcggcatatgttgtag

SEQ ID NO: 89170 - DNA, 912 bp, Enterobacter aerogenes
atgccccataagaaagcgacactcatcggcctgatcgccatcctgctctggagcgcgattgtcggcctgatcaaaagcgtgagcgaaggctttggcccggtgggcggggcggcactgatctacacctgcagcgcggtgctgctgctgtttacccttggctttccgaagatcaaaaaattcccggtgagttacctcatcatcggcagcgtactgttcgtctgctatgagctgtgcctgtcgctgtcgctgggctttacccactccgggcggcaggcgattgaagtggggatggtgaattatctctggccgagcatgaccattttactggcggtgatcgttaaccggcagaaaaccagcccgttaattattcccggggtgattttagccatcgtcggaataggccgggtattaggtggcgacgacgggttttcgctgacggaaatgatgaataacgttatggataatccgttgagttacgggctggcattcagcggagcggtgatctgggcgacttattgcgtagtcacccagcgtatcgctcagggaaataacggcattaccttgttctttatcttaacggcgctgacgctgtgggtaaaatatctcacctcaccccagccggaatttaatctttcgtggcatgcgtggatcagtctgatgctggcggcgatggcgatgggctttggctacgccgcctggaacgtcgggatcctgcacggcaacgtcacggtgctggcggcggcgtcctactttattccgattatctcggcagtactggcggcctttatgctggactcacacctgacgctggccttctggcagggaacggcgatggtcagcctcggatcgctaatctgctggtggtcgacgcgtacggttgccgtaaaacgcttatctgacgaagcgtcttaa

SEQ ID NO: 89171 - DNA, 897 bp, Enterobacter aerogenes
gtgttgacatttgaaggtatctacaccccggcaattaccccttacgcagccgatggcagcattgattttgcacgcttttccgacgtgctggagtcgctgatcgaggcccgcgtacacggcatcatcatcggtggctctaccggtgaatactacgcccagagcccggaagagcgtaaagcgctggtagaacatgcccgccaggtgataggcacccgcctgccgctgattgtcggcaccggggctacccgtactgaagacgcggtggagtacgctaaacatgcccgtgagcataaagccgatgccattctggtgacctcaccgccgtacgccctgccgaccgagctggaaaacgcccatcatgcgctgaccgtggataaagctgcgcagctgccgatcatgctctacaactacccgggtcgcatgggcatcaccatgggcgaaacctatttccgcgaagtgagccgctcatcgaacgtggtcgccatcaaagagagctccggcgatttcaataacctgcacctgctggcctgcaagttcccgaacatcgcgctctcctgcggctgggacgatcaggctctcgaattcttcgcctggggagcgcaaagctgggtctgcgccggctccaactttattccgcgtgagcacgtggcgctgtatgaagcctgcgtggtggagaaagatttcgccaaaggccgcaagatcatggctgcgatgatgccgctgatgaacttcctcgacggcggtaagttcgtgcagtcgatccgttacggctgcgagctgaacggcctgacctccggcacggtgcgcgcgccgctgcaggatctgaatgaagaagagaaagtgcagctgaaagcggtgattgccgatgtgaaacgcaacgtcgctgcggcgctgtaa

SEQ ID NO: 89172 - DNA, 1503 bp, Enterobacter aerogenes
atgagtcagttgcagaccctggacgacgtaacggccattgcacgggaactctccctggcgagtaaggcctttatcaacgggcgcttcgtggccgcgcaatccggcaaaacgctgccgactactaacccggctaccggagagaccatcggccacattgccgcctgcgacgccaccgacgttaacgcggctgtggaaggggcgcgcagcgcgttcgaggccggaagctggagcaagcgggcacccggcgaacgcaaagcggtgctgctgaaactggcagcgatgatggagcaggagatcgaccagctggcggtgctggagagcctcgacagcggcaaaccggtcagcgaatgcctggcggtggacgtgccggaaaccattcacgtgctgaaatggcacgccgaagccatcgacaaactctacgaccatactgccccggtcggtaacggcgcgatggcgctggtggtgcgcgagccgattggcgtggtgggttgcgtcctgccgtggaacttcccgctgctgatgctggcctggaaaatcggcccggcgctggcggctggctgctcggtgatcgtgaaaccggcggagcaaacctcgcttaccacgctgcgggtcgccgggatggcgtttgaggcgggcgtcccggcgggcgtgctgaatatcgtcaccggcaccggcaaagaagtgggtgaaccgattggcctgcatccggatatcgacatggtgagctttaccggctccaccgcaaccggacggcgtttcctgcactatgcggcagagtccaacctcaagaaggtggtgctggagtgcggcggtaaaaacccggcggttgtctttgacgatgctcaggatctggcgaccgtggctagccacgtgctgaatggcgcattctggaacatgggcgaaaactgttccgctacctcgcgcctgctggtgcaggaaagtgtcaaagaggcgctgctggccgagatggccaaacagatcggcgactggccgatgggcaacccgctcgatccgaacaaccggctgggggccatggtctcgacggagcatttcagcaaggtgagcggctatctcgacactgcccgccaggaagggctgcggatggtgcagggcggcgataccgagcagggcgcttacgtccagccgaccattatcgatggcgtaacgcctgagagcgcgctgttccgggaggagatcttcggcccggtgctgtgcgtcaccacgttcaaaaccgaagccgaggccatcgcgctggccaacgatacccagtacggactggccgcgtcggtttacaccggcaggctgaaccgggccattcgcgtatcgcgcgccattcgcgccggcacggtgacggtgaactgcttcggggaaggcgacgccaccaccccgtttggcggctacaagcagtcgggctttggcgggcgcgataaatctgtcttcgctctcgaccagtacaccgaactgaagaccctgtggattgatctctctgaagacgacgcctga

SEQ ID NO: 89173 - DNA, 702 bp, Enterobacter aerogenes
atgagaacgggaaaggtagcgctgtatgaggatctcaagcgacatattctcaccatggagctggatccggacgagctgctggatgaagccgcgctgaccgcgcagtacggtctctcccgtacgccggtgcgtgaagtattccagcgcctggcgggggaagggtatctcgagattgtggaaaaacgcggcgtacgggtgatcccgatgagccactcgacgctgcgtaatttcttcctggtggcaccgatgatctatgccgccaccggacgccttgccgtgcagcactacaaaccggcgcagcttaaggcgctgaaagagacccagaaacgctttcgtaaggcggtgcaaacccgcgatgccgaagcgctggcgctggagaacaaccgttttcacgagatcatgggcgagatggcggccaacccctatctgcagccgagcctggggcgtttgctgatcgaccactgtcgcatcggacataccttcttccggccgcaaaacgaggacatggagcgccgtttacagctggctgcagatcatcacgacgcctttatcgctgccatcgaagcgcgtgacgaacaggcggttgtcgatctggtgtttgagcactgggaactgtcgcgggaaaacatggagatcttcatcgcgccccaggggctgaaagccgataacttcgcccctttccctgagggcgataaccgctga

SEQ ID NO: 89174 - DNA, 1320 bp, Enterobacter aerogenes
gtgcaaaagatcacttctctacctgctgacgacgccctgccgggttggtatcacaccagtcaaccgcgtaccccgcgtcctgcccacgtcgggcaaaagcatgcccgctgggcgatagtcggagccggattaaccgggctggctgcggcccgccagctggcgctcaacttcccggatgatgaagtggtgctggttgaggcgcaggacgtgggctacggctcctccgggcgcaacgccggtttcgccattgatgtcccgcacgatatcggggcgaaggattatatcggtgatgtcaccaccgcgaatctgatcctcaagctcaacaccctcgggcagaactacctgcgtgagattgtgaaggagcacggcattgaatgtcagatgagcgattccggcaaatatcaggccgcggtgggggagaaggggatcgctattctcgaggcttaccgcagcgggctggagaaaattggccgtcactcggagatgatccccgggaaggatctgccggaccatatcggcacctcatactaccagcaggcactctacattccgggcactattctgctccagccctcggcgctggtgaaaggactggcggacagcctgccctctaacgtgaccctgtatgaaaatacgccgatcacgtccatcgactatggcgacaaagtgacgctggtgcatgaccacggcagcatcaccgccgacacgctgatcctggcgaacaacgcctttgctgcgcactttggttttctgcgcggtcgcctgctgccgaccttcctctatggcagcctgacccgtccgttgaccaccgaagagcaggcgcagcttggcggtaagccggtgtggggcgttattcccgcgcatccgtttggcagcaccgtgcgccgcacggttgataatcgcatcctgatgcgcaacagctttagcttccatcccgacggtcgcccgcgtgaaaaacagctgaagcacaatattgagacccaccgtaaatcgttcgagcgccgcttcccgatgctgagcaaggttgatttcgaatactcctggagcggggccatctgcctgtcagacaatcacgaaggcttcttcggccagctggcgccgaacgtctatggcgcgctgtgctgtaacggtctggggatcacccgcggcaccgccaccggcaaactgctggcggatatgatcgccggggagcgcaacgagctgatcgatttcctggtggcctcgccgggcccgaacagaaccccgccggagccgttcctgtcgattggggtgaactcggtgctgaagtggggccagttccgcgccggactggaggtgtag

SEQ ID NO: 89175 - DNA, 402 bp, Enterobacter aerogenes
atgaaccaaccgaaacctgttttcccggcgaatcgccacgctctctatgagaagcatggttattctgctgcgatccgctctggtgatttactgtttgtatccggtcaggtgggtagccgggaagatggtagtcctgagcccgactttgcaacgcaggtagaacgtgcctttgaaaacctcaaggccactcttaccgccgcaggatgttcgtttgaagatcttatcgatgtgacaacctttcataccgatccggagagtcagttttcaaccattatgcaggtgaaacaaaccgtttttccgaagccgccatatcccaactggacagccgtgggggttaactggctggcgggatttgattttgagataaaggttatcgcccggattccggaacatcagctttaa

SEQ ID NO: 89176 - DNA, 621 bp, Enterobacter aerogenes
atggctgccaaacgccgcgccgaaacgatggaagaaacccgcacgaagttgattacagccgcacgaaaagcctttgccgaaaaagggtttgcagcagcatcaatggatgatttgactgccagcgttggcctgacgcgtggggctctgtaccataattttggggacaaaaaagggttgcttgccgctgtggttgcccagattgactcagaaatggcacaaagtgccaagagtgcagcgacacagttcagggatgaccagcaaaagcttctggctgaagggatagcctatatcagaatggctctggatgaagaagtccggcgtatcgttctgcttgatggcccggcttttcttggcgatcctacgaaatggccgagtcagaacaactgccttgacgccacccgagagagcatttcagatctgattgaacgcggcttaatcaagccggtagatgtggatgctaccgcctggctgttaaatggagctgcactgaatgccgctcagtgggtggctgccagtgaagatccgcagcatgctttaccaaaagcgattcaggtttttaccctgctggtaaatggcctgctggaagagggcaagcactcatcacctccattctcaatctga

SEQ ID NO: 89177 - DNA, 219 bp, Enterobacter aerogenes
atgttggtttataatgtctttggtcgataccttggcattctgcgtaagaatgagtgctggttggtttttcgagtagatctgacagaaagaaagtattcccgtatctatgacgttgttattccagatgatctggcagaagatgaaattgcaggctggttagatgacattttccatgaagctgcaaccgaacgtcatccagatgttaaacgcatcgaataa

SEQ ID NO: 89178 - DNA, 357 bp, Enterobacter aerogenes
atgggagacagtccagaactggcaagcgagcttgctaaccttattaaaaaaggaatcaaaacggcctcttgtggatcttttgcctcttaccaacaggaagaatctgctccgaggattggcagctataacataattcttgatggacagaatgtcccggtatgcgtgatccggctggtttcgctacaattggtgcgtttttgcgatattaatgaggagttcgctcgcaaagagggtgaaggcgatttaagtcttgaatactggaagaaagagcatcagcgatttttcatccgtgaaggtcatttttctgaggatatggagttgatcgcagaagaattcgaagtggttgaggtgctgtaa

SEQ ID NO: 89179 - DNA, 549 bp, Enterobacter aerogenes
atgccaatacctattctctatacagaacgcttactgttaaaaccattatcctcagaagatgcctcacaaattcagatactttatcctcgctgggagattgttcggtacatggtctcatcagtaccgtggccctatccggataatggcgccgagaattatgtcaataacgttgccttgcctgatatagcaaatggaatcgcttggatctggactattaggcatcgtgaaacacctgacaacatggtaggtttaatctgtctttatgatgttgaggataacaaccgaggattttggttatctccggagcatcagggcaaaggttttatgcgtgaggcctgtaacgcagctacagattattggttcaattccttaaataagactatattgcgtgcgccgaaagcggctctcaataaccgctccaaacgtatctcacaaagcagtggcatgcggctcattaggactgaaaagaaagcatatgtcagcggtctgctggattccgagctatgggaaatcacacgtgatgaatggaatgctcgtaaaggtggctga

SEQ ID NO: 89180 - DNA, 621 bp, Enterobacter aerogenes
atgaaattgatacttgttcgacacgcagaaacagagtggaattgggaaggaattattcaggggcacagcgatagctccttgacctgtcggggtttgcgtgaaacatccctcctactagcagcgtttagtgcaagtgagtatcaaatagagcgtatttacgcttctccgcttgggcgtgcctggcaaatggggcaaagcctggctgaacactttcattgttcactgacggctgaaccggcccttaaagagcaggcctttggtcagtttgaaggtatgccgttagaactactcagacaaaaacatccaaactatgcaaatgcattattcaggcttgatgcagagtattgtccaccagggggggagtcactggcgcatgcttctcagcgagttatgcgttttttacaaaacctggaagatacttcatcacatcaacaaacaatatgtattgtgtctcacgggcatgtcagtcagggcactctggcaattcttaaagaagggactgtcgatagtttccctcgctatgctcatcccaatgcaagttattctgttatcgacctgattaatggaaaatgtattggcctaaagtgggggattgctacacatttacgtcacctgaattag

SEQ ID NO: 89181 - DNA, 585 bp, Enterobacter aerogenes
atggataaaacagcgaaaaatcagatagtagatagcgacattgcacagttattactaaagcacaggaaagctcgtaactggacggtaacggaacttgctcaacgctcaggcgtgagccaggcgatgattagtaagattgaacgaggcgtctccagccccagcgcgactatccttagtcgtttagccaacgccatgaatattacgctatcaaaactattcgccgagcttgagcaacatcagaattcgctggttcgtttcgctcaccagcagcagcattggacagatgaacaatcaggcattattcgttggacattgtccccggcgggcgccagtccggaactgataaaagttgaaatccctgcactggggcaactgacgatccccgcttccgctattgagcatctttgcgggcaaacactttggatgctgagcggcaaccttgattttaggatcaatcatcagactcatcatttgcaagcgggtgactgtcttgctcttacctttgcaggcgagtgccaaatgaccaacccggatagcgaacagagctgtacatacatcgttgcgtttagccaaaaaaacagatga

SEQ ID NO: 89182 - DNA, 444 bp, Enterobacter aerogenes
atgataaaaatcagaatgtcacgaccttctgaagcggaagacatcatccaaatttggaaaaattctgtcgatgctacgcacgattttctgaaagctcacgaccggcaagagatcgaaaaagaggtggtcggctttttttcggaaacccctgtatgggtagcgacaaatgatgaagaccagccactcggatttatgtttttacatgatggtcacctggaggccctgttcgtagatgctgctgctcgcgggcttggcgtcggaaaacagttgatatcccatgcccttgctcttcatcctgatttaagcgtcgacgtcaatgaacaaaaccaacaggctgtcgggttttatcaacatatgggctttcaggtttcagggcgctccgggcaggatagtcagggaagaccttatcccctgctgcacctgcgtaaagggcatggcgtctaa

SEQ ID NO: 89183 - DNA, 1602 bp, Enterobacter aerogenes
atgaatgctaccgaagctatcgaccaactggatccccaaaaatggaccacaacatctcccgcagaacgtttgcgtctgctggaggaaatccgtgcgaacctgaagaagtacggtgatgacctcgccttcgccgacagcaagatgaagaatggcatcctcggtgcgcctcttttttcatacccaatgtctaaggttgctaccgtcgttcctatggcgagtaccgtctcggcagccatcatcctttatgaatccattctcgacggcaagatgccacagccgctgagcgtggaaaaagtgagtgaggatctctacgacatttatgtctttccgcaggagcggaaagacaagttgatgtacgcggatcagaagagtcgcattcgtgtgaaaggcgcaccgaaacaaatcaatccgatggaaaagcccgcgggtattattgccgtgctgggtgccggtaactacagctcagcgctcgaggtgttgaaagcgatcttcttcgagaactgtgcggtcgtacacaaaccgcatcacctgaacgaagaaaccgacaggatttgggcaaagatcatgcagccgctgattgagcggcgcgttctgagcttctgcgataccgatcggggacatgatctgacagtagacccccgcctctccaggatctactttactggtggaaccgcgacggccgaggctatcatgtcagcgacagagacgccgctgatctccgaatgcggcggtaataacccatgcatcatcgtgccgggcgaccggccatggacaaagaaggaaattgagcaccaggcagtgcagatagccaccatggcaaagttcaatggtggcgcgaactgcggtcgtccccaaactctggtgacaagcaagcactggccgcagcgcaaggaattcctcgacgcgctgcgggtcgctatctcggagactactccggccatgggtatgtactaccccggcgccgacaaggtcgtggatggttttcgacaggcctatcccgatgcggaagtactgagccccgagggcggcaagtatccgcattccgatgtcatattactcacagacgtcgagcccggtggctacgccacttcacatgaagcgttcagcctggtgctcgctgaagtgccgcttgacctgccagccaatgccgcgcactttctccccggcgccgtcaagttcgccaacacccagctcctgggcacgctcgccagtgcgatacttatcgatgaggacaccagaaaggcccatcagaaattacttgagcaggcggtgtctgacctggaatatggtgcggtcgccatcaacagcatgccgtccttcatttttctcaacccctatctgacctggggtggaaatgaggcaggcaagacgttcgtttctggtcgcggcaactttggcaacctactcaattacgagaacgttgagaaatcgatcatggaggcaaagtttatgtcaccagggcacatgctctacaccaacaagcgagcgttcgacaatatggctggaaacatggcgaatttcgcagtcgagcctacctggatgaacctgacctgtctgatgggggacgccatccgcgatagcttccgtaaaaaagatttctga

SEQ ID NO: 89184 - DNA, 1008 bp, Enterobacter aerogenes
gtgcaaaacaaaacttttcccatggatattggctggctggcaatactgaaggacttaggtgttcagcctggccatgtattacgtcgggccggccttccagacgatttactctcccgtacaagacaggggctttctggcgaagactattttcgtttctggcgcgctttagaggctgaggcaagtgatgccatgtttcccttacgcctcgtcgagattctctcggctgattctttcaacccaccactgttcgctgccctgtgcagcgcgaatctggtacaggctttgcagcgcctcgccaaatacaagcaactggtggcgcccatgagcctggaagtcaatacgggtgacgcaggcgagctggtcgtgacgcctcgctggttgtcgatacaaaccgaggtaccttactcgctgcaagtggccgagattgcgtttttcgtgcgactagccagactggctacccgtgagcacattaaggcgcatcgcgttatcctgccgcaacttccgtccagtcgttatctccggcgttacgagaatttcttcggcgtacctgtgcaaaagggagagtatccagttatcgctttcgccgctgtggatgctttgcgtccattcctgacggtcaacgaaagcatgtttcacgcgttcgaacccgatcttcgccgacggctcagtgaacttgattcgacggcgtcgacggcggaacgcgtgcgtgctgtcttactggagctgttgcctggtaatgcggctaccattgagaaggccgcggaacgactgggcttgagtaagcgtacgcttcaacgtcggcttgaggaggagggggaaaactttcgcgccctggtcaatatggtgcgggagagccttgcccgacactacctggcaaataccacgatgtccggcgcagagatcgctttcctccttggattcgaagatcccaattccttttatcgcgcattccaggggtggactggaaaaacacctgacagcgtccgtcatgccatgcgcttgaattga

SEQ ID NO: 89185 - DNA, 2151 bp, Enterobacter aerogenes
atgaataaaattaccagcgtgtgcccctattgcggggcgggttgtaaactcaaattggttgtcgaaaatgataaaatcattcgcgccgaggccgccgacggcgtcaccaatcaaaaccagctatgcctgaaaggctactacggctgggatttcctcaatgacacgcagcttctcacacctcgcctgaagcagccgatgattcgttatcagaaaggcggcccattcaccccggtcagttgggaagaagcgattcgctacaccgccgctaagctccgcgagatcaaggccaaatatggcccacgcgccatcatgaccaccggatcgtcccgcggcacggggaatgaaaccaattacgtgatgcagaaattcgcccgtgcggtactcaataccaataacgtcgactgctgcgcccgcgtttgccacgggccgtcggtcgccgggctgcaggcttcgctcggcaatggcgcgatgagcaactcgataagcgatattgagaactcaaaatgtctgctggtctttggctataactgcgccgattctcaccctatcgtggcgcgaagggtactgagagcccgcgacaacggcgcgaaaatcatcgtctgcgatccgcggcgcattgaaaccgcccgcatcgccgaccagcatctgcagctcaacaacggcagcaatatggcgctggtcaacgccttcgcctatgtcctgctggaagaagatctctacaatcacgattacgttgagcgttataccgaagggcttgaggcctatcgtgaggcggtgaaagactactctcccgaagccgtggaagcgctggtcggcgtcccggcgctggccattcgccgggcgatgcgcaccttcgccgccgccccttccgccaccattatgtggggaatgggcgtaacccagttcggccaggcggttgatgtcgtccgcggtctcgccagcctcgcgctgctgaccggcaacctcgggcgggctaacgtcggcgtcggcccggtccgtggacaaaataacgtccagggcgcctgcgatatgggggtgttacccaaccagttcccgggctatcaggacgtcaccgacgccgcggtgcgcgccaaattcgccaatgcctggggcatcgatccggcgctgatggatacgcaaatcggcacccgtatcaccgaagtcccgcataaagcgctggcgggagaaatcaaagcctactacatcatgggagaggatccgctgcaaaccgaggccgatctgggtctggtacgcaaagggatggaagcgctggattttgtggtagtgcaggatatttttatgaccaaaacggcggaagtggctgacgtgctgctgccggcgacgtcctggggcgagcacggcggcgtctttacctgcgccgaccgcggcttccagcgtttcgaacaggctattccgcccacaggtaatgtgaaacgcgattgggaaattatcagcctgctggccagcgagatgggctatccgatgcattacgccagtaaccagcaaatctgggatgaaatgcgcgaactctgtccgctgttctacggcgtaacctgggagaaaatgggcgatatgggccacgtgcagtggccgtgcccaacgctcgatcaccccggtacgccatggttgtatcaggataatcactttgatactccatcgggcaaagggcaactgttcgccgcgccgtggcgcgcgccggcggaaacgccggacgatgatttcccgctggtgctctgcacggtgcgcgaagtcggccattactcctgccgttcaatgaccggcaactgcgcggcgctgcagtcgctggcggacgaacctggccggatccagatgcaccctgccgatgcagagcggactggtatcgccgatcgtcagctggtatgggtgagttcgcggcgcggcaaagtgatgactcgcgccgatctcagcgagcgaatcaaccccggcgcggtgtatatgacctaccagtggtgggtcggcgcctgtaacgagctgacccaggataatctggatcctatctcgaaaaccccggaaaccaagtactgcgcggtgaaggtagaggctattgccgaccaggactgggcggaacggtacgcgtggacgacctatagcctgatgaaggcgcggttaaaggcggcagctaacgcctga

SEQ ID NO: 89186 - DNA, 1092 bp, Enterobacter aerogenes
gtgcctacaggacatcgctttcgccccacggagctacaccacttcgtcaccaccctgttcacgcagctgggcagtacatcaaccgaagccgcgctggtcgcagaccacctgatcgccgccaaccttgccggacacgattcgcacggcgtcggcatgatcccgagttacgtaaaatcccatagcgaaggatttttgcagcttaaccgccatgccagcgtgatgaaagacgccggcgccgtcgtcacccttgacggtaacgccggcttcggtcaggtcgttgcccatgaagccatgcagttggggattgaaaaagccaaacagcacggcctggccgcggtagcgctgcgcaatgctcaccatatcgggcgcatcggttactgggcggaacagtgcgccgcgcaggggttaatatccattcatttcgttagcgtcgtcggcgacccgatggtggcgccatttcgcggcaaagatagtcgcttcggcactaacccactctgcgtggtcttcccgcgtgaaggccatccgccgctgctgctcgattacgccaccagcgccatcgcttttggcaaaacccgcgtcgcatggcataaaggcgaagcggtgcctgccggctcattgattgactctcgcggcgaaccgaccaccgatccggcggtgatgcagacctcgccgcttggcgccctgctcacctttgctcaacataaaggctatgccctggcgacgctctgcgaggtgctcggcggcgcggtctcgggtgggcaaacgacccatcaggacagcctgcagggctgcgtcgacgccatcttcaactgcatgactaccattattctcagccctgaagccttcgatgcgccgcagatgcagcgcgaaaccgaggcctttattgactggtgtaaacagtcgccgcacgatgccgatacgcctattctggcgccgggtgagtgggaagcggccaatcgtcagcagcggttggcaaacggtattccgctcgatgccagtagctggcaggcgatctgcgccgccgcgcggcaggccggcatgtcgcaagagacgctgaaccaactgcagcaaaatatggaagttaacgcttaa

SEQ ID NO: 89187 - DNA, 528 bp, Enterobacter aerogenes
atgcaaataatgaggatgacatacgataatttcgataaagatggatacgcaatcctgcatgtttatggcgttggtaactacagagtttttagcggtcaaaatccatatactaatcttgccaactgtgcatttcgaccgaatagtgccataccagtcgggaaatattggatagtagatcggcctgttgggtcgaggactaatcagtttagagcgtgggtaggggatctgataacaggcaatgaccacagtgaatggtttgggttatttagcgctcaaacgatgactgatagtattttgattaatggggtcttaagaggtagtttccgacttcatcctttaaggccagatggaggcggtctgtcgcaaggttgtataacatttgtggatagaaatgatttttatattgttaggcaaacattattgagaacatctaaagtgaaagtaccgggttctcgatcgggtttattggcttatggttacgtagatgttcaggggagccgagactatgccagttgtgaagtacattaa

SEQ ID NO: 89188 - DNA, 267 bp, Enterobacter aerogenes
atgccagttgtgaagtacattaagaattcattactatttgcggtatgttttctttttgccttatggcttagcagctatggtaaacctctaaatggcatcacgctttgggtgatagatcatacctggtgcctgtttaactcccgtctcagtcaaccatatgaatcaggagcagatcccatttcttttattaccatcctggtaatggcgctgctgtatgcgctgctcctgtttttctttattcgaatggtcctgaagaaatgcaaataa

SEQ ID NO: 89189 - DNA, 1089 bp, Enterobacter aerogenes
atgtataagaaaatcggcggtttagtggtttcactgacgacagtcttctcgtactccgcgctggcggagctgccgcagggttacccggcagattatcaaaaagtcgttgatgccggggtgaaagagggcaaagtcgtggtttattccacaacggacaccaaagcggcagggccgttaattaaaggctttgaagcgcaatatcctgggattaaagttgaatataacgatatgaacagcaccgaactgtacaaccgttatattagtgaacaagctgccggcggcgggagcggcgacgtggtgtggagctcttctatggacacggcgctgaaattagccaccgattatgcgcaagagtatgcttcaccagaagtcggcaagctgccgaaatgggcggtctggcagcaaaaagcctacggcacaacctatgagccggtggtctttatctataacaaacggctgatcccacaaaatgaagtgccggattcacataccgcattggccaaacttatcgccgggcaggctgataaatttaaaggcaaagtcaccacctacgatatcgagaaatcggggcttggctttatgctggcggtgcaggatagcaaggctgacggcaattactttgccgacctggcgaatatcgccaaaggcggcctgacggtgcaatcctctaccggcaccatgatggagcgcgtctcctccggtgaaaacctgatcggctataacattctgggctcctatgccgaagcgcgcgcaaaaactgacccgtcattaggcatcgcctatccgaaagactacgtgctggtgctgtcccgcgtctcatttatcaccgcggaagcagggcatcctaatgcggcgaaactgtggttcgactatgtactgtcggaaaaagggcaaacgattcttgcctctcagggcgatatcccgtcaattcgcaacgacattgaaggtaaaaatgatatcgacgggatgacgaaattactgggcaatgcgctgaagccgattccggtggatgaaagcctgctgcaatatctgcaacccaaacagcgtctggaatttattaagcaatggcgcgccgctgctgcgaaataa

SEQ ID NO: 89190 - DNA, 1770 bp, Enterobacter aerogenes
atgaacattttacgcagaaagtggcaagggctaccgcgtggcatggtggtattgatagcggcactggtaatttacgttccgctattatttatcgtggcgcaaagttttctttccgcaccattttttgcccgctcgaaagagtggagcctcgaagccttcggttttatttttaccgacccggatttttacctggccttacgctctggatttatcctcgcttttggtctggtcattatcgcgattccgctgggcggcattctggcctttttaatggtacgtaccgatttacctggcaggcgctttattgagccgctgatcctggtgccgattttcgtctcgccgatggtgctgggctttggttacgtggtggccgccgggccggtcggtttcctgtcgcagtgggcgcaggcgtggcttggttttgtgccgtggaatatctactcgatgtttagcatcgtggtaatcgccggtttaacgcacgtcccgcatgcctatctttatatctcctcggcgctgcgcagcgtcggttcggatgtggaagaggcggcgcgtaccgtcggcgccacgccgctgcaggtgatgacctcggtgagcctgccgatggtacgcccgtccatcctctacgcctgcgtgctgctgttcttcctcggccttgaggtctttggcctgatgctggtgctcggcgatccggaaggcaacatggtgctggcgacctatctctataagttgactaataaactgggaacgccttcttaccatctgatggcggcggtcgcggtagtgttaatctgcattaccattccgctggtgatgttgcagcgccggttgatgcgtaccgccaatcgcttcgtgaccatgaaaggtaaagcgtcgcagtcgcgcgccttgccgctggggaaatggcgttgggtcgcgggcgcggtcgtggtggcgtggctgacggtaaccatcggcgtcccgctactgggtgtggcgctacgggcctttatttccaattggggcgttggcgtttcgttatgggatgagctgtcgctggcgactttccgcaacatctggcagcagccgaatctgctgcgggcgatcgtcaactcgatggcgatcgggattatcggcggcgcgctggcggtggtgtgctatctgtttgtcggtatcgccatgcaccgtaaaccggataacgtcacgcgctttctcgactacagcgtgctggtaccgcgcgcggtgccgggcctgttggccggtctggcgtttctgtgggtgtttctgtttgtgccgatgtggctcgatcagtcattgaaaaacggctggctctcgacgctgccggtcgccgactggctgcgcgaacaccttatcgtgcaattgcgcgcgctgcgcaacaccattttcagcgtctggttggcctatacggtggtgtggatggcctacggcctgcgccttatctcatcaacgctgctgcaggtggcgccagagctggaggaggccgcgcgtagcaccggcgcctctcgcgggcaaatcacccgccacgtcaccgttccgctggcgcgctacgggcttatcggctcctggctgctgatgttcctgatctttgaacgcgaatattcaaccggcgtttatttgttgtcgccaggcaccgaaacgatcgggtcgatgctggtctctctgtgggcggcgggcgccattgatatcgtcgcggcgctatcgtttatcaatattctgctggtggtagtcggtctgggtatcgccctgcgctttggagtgaaattacatgattga

SEQ ID NO: 89191 - DNA, 1071 bp, Enterobacter aerogenes
atgattgagttatcggtagacaatctgcatctgacctatggcgacaacccggtgctgaaaggggtgtcgatggagctcaaacgcggggaagtggtgtcgctgcttggcccttcaggtagcgggaaaaccacgctgttgcgcgcggtcgccgggctggagaaaccgaccgccgggcggatcaccatcggcaataacgtggtttatgacggcagtccgcgtagcgagatcccggcggaagagcgtaatctcgggctggtgttccagtcctacgccctgtggccgcataaaacggtattcgacaacgtggcctatccgctgaaactgcgtaaggtggccagcggcgagattaaacagcgggtgcagagcgttctcgagcagctaggtctgggacatctcggtaatcggcatccgcatcagctatccggcggccagcagcagcgcgtggctataggacgggcgctggtctataacccaccggttattctgctggatgagccgctatctaacctcgacgccaagctgcgcgaagaggcgcgggtattcctgcgcgagctcattattaagctgggcctgtcggcgctgatggtcacccacgatcagaatgaagcgatggcgatctccgatcgcattttgttgcttaacaacggcgtgattgaacagcaggggacgccgcaggagatgtacggcaatccggccaccctgtttgccgccgagtttatgggcagtaataaccgcctgcacggtaaggtgacagcgctggaggacggacgcgcgcgagttgaaggcgccagctgggcgctatggggccgcgcgggcgagggggtcagcgtcggtcagccggcgacggcggtgatccgcgtcgaacggctgcgccttgactgctcgccgcaggataacagcctggaacttccgctgctgaccagcatgtacctcggcgatcggtgggaatatctgttccgcaccgagggcgatgactttgccatccgcgcctacggcacggccctgcgtgatgccgaacattgtcatctgacgctgcccgcggatgatgtgtgggtttttccgcagcgataa

SEQ ID NO: 89192 - DNA, 372 bp, Enterobacter aerogenes
atgttcgatcatgtcaaatttggcgtcagtgattatgccgcgagcaaggcattctttttacaggcgctggcgccgctcggcgtgacgctggcaggcgaaggcgagccggcttacggcgcggagctaaccggggcaaacgatgcctctttatgcctctatcaaagcgaagataaacccgcaccgctgcatatcgccttttgcgccgacagccgcgagcaggttgacgccttctggcacgcggcgctggccgccggaggcaaggataacggcgcgccgggattacgacctaattaccacgccaattactacgccgcctttgtcattgcgccagatggacacaatatcgaagcggtgtgtcatctggcgccctga

SEQ ID NO: 89193 - DNA, 747 bp, Enterobacter aerogenes
atgtcgagcgagaaaaccaacaattcaaggcgtgattttttagtaaaatcaatggccttgattccaacggtagtcatcggcggcggcagcgtgggcgccattggcgtggcggcgagcgccacggcacaggcggcctccgcaccttcagccggtggcaacgcgacatccagcgactggaagccgcaattcttcaacgatcgcgagtggctgtttatcaacgccgccgtcgctcgcttaatcccggccgatgaactcggtcccggcgccaaagaggccggtgtgccggagtttatcgaccgccagcttaacaccccttatgccaccggttccatctggtatatgcaggggccatttaaccccgacgtgccgaaagagatgggctaccagctgccgctggttccaaaacagatttataacctcggtatcgccgatgccgaagagtggtgtcaaaaccagtatcacaagagctttgctgaactgagcggcgaacagcaggatgaggcgctcggtctgtgggaatccggcaaggcgcagttcaaacagctcccggcctcgctgtttttctcctatctgttgcaaaacacccgcgaaggcttcttcagcgaccctatccatggcggcaataaaggcatggtcggctggacgctgattaattttcccggcgcgcgcgccgactttatggactgggttgaacgaggcgaacgctatcccttcccgccggtatcaattaatggggagagggcgtaa

SEQ ID NO: 89194 - DNA, 1785 bp, Enterobacter aerogenes
atggcgaccgtattgaaaaaaaccgatgtggcgatcgttggctttggctgggttggcgcgatcatggccaaagagctgacggaagcggggctcaacgtcgtcgcgctggagcgcggcccgatgcgcgatacctggccggacggcgcttatccgcaggttatcgatgagctgacctataacatccgccgcaagctgttccaggatctctctaaaagcacggtgacgattcgtcacaacaccagccagcaggcggtaccctatcgccaactggccgccttcctgccgggcaccggcgttggcggcgcgggtctgcactggtccggcgtgcatttccgcgtcgatccgatcgaactgcgtatgcgcagccattatgaagagcgttacggcaaaaacttcattccccaggatatgatcatccaggatttcggcgtcacctacgacgaactggaaccgttcttcgataaagcggaaaaagtctttggaacctctggtaccgcctggtcggttaaagggaaggttgtcggtaaaggccgcggcggtaacgcctttgcgccggatcgctcggacgatttcccgctaccggcgcagaaaaatacctggtcggcgcagctgtttgaaaaagcggcgctggaagtgggctatcatccctataacctgccttccgcaaacacctccgactcctataccaacccgtatggcgcgcagatggggccgtgtaacttctgcggtttctgcagcggctacgcctgctacatgtattcgaaagcctcgccgaacgttaacattctgccggcgctgcgccaggaaaaacgctttgaactgcgtaccaacgccaacgtactgaaggtcaatctgaccgacgataaatcccgcgccaccggtgtgacctatgtcgacggtcagggccgtgaaatggaacagccggcggatctggtgattatcggcgccttccagttccataacgtgcatctgatgctgctttccgggatcggtaaaccgtacaatcctgagacgggcgaaggggtggtcggacgtaacttcgcctatcagaacatgaccactatcaaggccattttcgataaagataccttcaccaacccgttcatcggcgcgggcggcaacggcgtcggcgtcgatgacttcaacgccgataacttcgatcacggcgcggcaggcttcgttggcggttcgccgttctgggtcaaccaggcggggactaaaccgatctccggcgtgccggtgcctccgggtaccccggcgtggggcagtaaatggaaatcggcggtggccgacacctacacgcaccacctgtcgatggatgcccacggcgcgcatcagtcctatcggcagaactatctcgatctcgatccgaactacaaaaacgtctttggtcagccgctgctgcgcatgaccttcgactggcaggaaaacgacatcaagatggcgcagtttatgttcgataagatggcgccgatcgccaaagcgatgaagccgaaatatatgctcggcagcccgaaaaacgccaatagccactttgacaccaccagctaccagaccacccatatgaacggcggcgcggtgatgggcgaagatccgaaaaccagtgcagtgaaccgttatctgcagagctgggacgtgcataacgtcttcgtcatcggcgcttccgctttcccacaggggctgggctacaacccgacggggaccgttgccgcgctggcctactggtcggcgaaggctatccgcgaacagtacctgagaaatccgggtccattggtgcaggcataa

SEQ ID NO: 89195 - DNA, 1341 bp, Enterobacter aerogenes
atgaaaatgcaatggttatcggcactggttctcggtgcgttaagctgcgcggcgttcgccgaagaggcgcctgcggacagcaatctgattaagcagggcgaatatctggctcgcgccggcgactgcgtggcctgccacaccaacggtaaagagggcaaaccttttgccggcggtctgccgatggaaacgccgatcggcaccatttattccaccaacatcacgccggacaaagcggacggtattggcggttataccttcgaagagtttgacgatgcggtgcgtaaaggcgtgcgtaaagacggctcaacgctctatccggcgatgccgtatccttccttcgcccgtatcaacgaagcggatatgcgcgccatgtacgcctactttatgcacggcgtggagccggttaacgtcgccaacaaagacacggacattccgtggccgctgtcgatgcgctggccgctggcgttctggcgcggcatcttcgctccgtccccgagcgactttgtcgccaatccgcaggtggacccggtactggagcgcggtcgttacctggtggaagggcttggccactgcggcgcctgccacaccccgcgtagcctgacgatgcaggaaaaagcgcttagcgaaagtgaaggcgatgattacctggcgggtagcaatgcgccgattgacggttgggtagcttccagcctgcgcggtgaaaatcgcgacgggctggggagctggagcgaggccgaactggccgagttcctgaaaaccgggcgcaatgataaatccgtggtcttcggcggcatgagcgacgtggttgagcacagcctgcagtatctctcgaatgacgatatcaccgctattgctcgctatctgaagtcgttaccgccgcgcggcggtaaacagacgccagctccggtggaagatagcgtggcgaaagatctgtggaaaggcgatgacagcaaaaccggcgcagcgctgtacgtcgataactgtgccgcctgccaccgtaccgatggcgtcggttataaacgcgcgttcccgtcgttgaaaggcaacccggtagtgcagaccgaagatgcgacctcgctgattcacatcattctgaccggcaacaccacgccggcggtgaaggatgcggtctcgaacctgaccatgccatcgttcggctggcgtcttgacgatcaacaggtcgcggatgtggtcaacttcatccgcaccagttggggcaacaacgcgccgccggtgagcgccagcgatgtggcgaaagtacgaaaagataagtcgatgattcgcgatgagaaggcgttaggtaacgccgacgtctcgaaactgccggctgctgcagagtaa

SEQ ID NO: 89196 - DNA, 2706 bp, Enterobacter aerogenes
atgatgccggaactgggcaactacctgctgtgtctggcggcagggctggcgctgctgctaagtatctttccgctatggggcgcagcgcgacaggaacgatggctgatggcattagcccggccgctggcctgcgcgctgtttatctgcatcatcggcgcgtttgcgctgctggtgcatgcttttgtaatcaatgatttcaccgtgcgctatgtggcggaaaactccaacagcgcgctgccggtgtggtacagggtggcggccacctggggagcgcacgaaggctctttgctgctgtgggtgctgctgctcagcgtgtggacgttcgccgtcgcgctcttcagtcgccagatgccgcccgacgcggtagcgcgggtgctggcggtgatgggaatgatcgccttcggtttcctgctttttatcctgttcacctccaatccgttcagccgcagcctgccgctgtatcccgtagatggccgcgatctcaatcctatgctgcaggatatcgggatgatttttcatccaccgatcctctacatgggctacgttggcttctcggtggccttcgccttcgcgattgcgtcgctgctggcggggcggctggataccgcgtgggcgcgatggtcgcgcccgtggacgcaggcggcgtggatgttcctgacacttgggatcgtgctgggctcggcgtgggcctattacgaactgggctggggcggttggtggttctgggacccggtggaaaacgcctcgtttatgccgtggctggtcggcaccgccttgctgcattcgctggcggtgaccgaaaagcgcggcagcttccgcgcctggacggtactgctggcgctggcggctttctcgctgtgcctgctggggacttttcttgtgcgatccggcgtgctggtatcggtgcactcctttgcctccgatccggcgcgcgggatgtttatactggccttgttgaccctcgcgattggcggctcgctgctgctgtatgcggtgaaaggtgggcgagtgcgggcgcgagtggaacatacgctctggtcgcgcgagtcgttcctgcttggcaacaatattctgctgatggccgcgatgctggtggtgctgttaggcacgctgctgccgttggtgcataaagcgttggggctggggacgatatcgatcggcgaaccgttcttcaataccatgttcaccgcgctgatggcgccgtttgcgctgctgctggggctggggccgctgattcgttggcgccgcgatgagcctggtaaacagcttaaacgattggcgatatcacttgtcgtgacgttgtcactttcactggcgttaccatggcttcttcaggaccgcatcaccgcgatggcggtcatcggcctgatgatggcgctatgggtgcttatcttcgcgctgattgaagtccacgaacgggccacgcatcgccacggcttctggcgcggcctgcgcaccttaacgcgtagccagtggggtatggtgctcggccatgtcggcgtggcggtaaccgtcattggcatcaccttcagccagaactatagcatcgagcgcgatgtccgcatgcgggctggcgacagcctcgatattcatcgttatcacttcgtcttcaagggcgtgcgtaatatcgtcgggccgaactggagcggcggtgagggcgtgattgccgtcagccgcaatggtcgcccggaagccatgctgtatgccgaaaaacgcttttacaccgccagccggatgatgatgactgaagcggccatcagcggcgggtttacccgcgatctttacgccgcgctgggtgaagaactggatgatggcagctgggcggtgcgtctgtactacaaaccgttcgtacgctggatctggtacggcggcgtactgatggcgctgggtgggctgtgctgtatgctcgatccgcgttaccgccggtcgcggcaacagaaaacagcagtggatcgcaatgacattaaccgctcgctgtaccagtcccgactgcgcgaactggagcaggaacgtactgacggtaatgaggcgatgatcgtcgagctgcaacgtacgttgctggcggatatctcgcagcaggaaccaacgcgcgttcggccgcttagccgctggttgctgctaccgggggcgctgttattggtcttcgtcagcggcgggctgtatctgaaaaccagcgatgtgggtcaggtgctgctgtggcgacagagcgagcgccattatcccgcgctgctggcgcaggcgaaagatccgaccgcggcgccgctgcggatggatgagttggcccagctgcggcttgggctgcgcagccatctgcaggctagccctgacgatcttgccggctggcaactgcttgggcggcttggcctgctgctaaacgatggcgagacggcgatcggcgcttttggacgggcgcataagctggcgccggatgacccggcggcaagttttgattatgccagcgcgctggtgcgggcgggcgataacgcgcagatgcggatgggcgagctgttgctgcgcgatctgcatcagcggcagccgaaaaacctgccggtgctggagatgctggcgctcagcgcggtacgcaatgaagactatccgcaggcggtagcggcgctacagcagttgctgatgttgttgccggagggcgatgcccgccgccaggcgattgcccgccagttggctcaggcgcagcagcaggcgcggtaa

SEQ ID NO: 89197 - DNA, 771 bp, Enterobacter aerogenes
atgaaaaaagtcgcacttgtcaccggcgccggtcagggcattggtaaagctatcgcgttacgcctcgtgaaggacggttttgccgtggcgatcgccgattacaatgacgtcacagcgaaagccgtggcggatgaaatcaaccagcacggcggccgggcaatcgcggtcaaagtcgatgtttccgaccgtgagcaggtgtttgccgccgtcgaacaggcgcgaaaaacgctgggcggattcaacgtcatcgtcaataacgccggggtcgcgccatcaacgcctatcgaatccattacgccggagattgtcgacaaggtctacaacatcaacgttaaaggggtgatctgggggattcaggcggcagtcgaggcctttaaaaaagaggggcacggcggcaaaatcatcaacgcctgttcgcaggccggacacgtcggcaacccggaactggcggtctacagctcgagcaaattcgccgtacgcggtttaacgcaaaccgccgctcgcgacctggcgccgctgggtattaccgttaacggctactgcccggggattgtgaaaaccccgatgtgggccgagatcgatcgtcaggtatccgaagcggcgggtaaacctctgggctacggaactgccgaattcgccaaacgcatcaccctcggccgcctgtctgagccagaagatgtcgccgcctgcgtctcttatctcgccagcccggattccgattatatgaccggtcaatcgctgctgatcgatggcgggatggtattcaattaa

SEQ ID NO: 89198 - DNA, 1680 bp, Enterobacter aerogenes
atggacaaacagtatccgcagcgccagtgggcgcacggcgccgatctggtcgtcagccaactggaagcgcaaggcgtacggcaggtcttcgggatacccggcgctaaaatcgataaggttttcgactcgttgctggactcctcaatccgcattattccggtgcgccacgaggccaacgccgcctttatggccgccgcggtcgggcgtattaccggcaaagcgggcgtcgcgctggtgacctccggacccggttgttccaacctgataaccgggatggccaccgccaatagcgaaggcgacccggtggtggcgctgggcggcgcggtcaaacgcgcggataaagccaaacaggtacaccagagtatggacacggtggcgatgttcagcccggtcaccaaatacgcggtagaagtgacctcgccggatgcgctggcggaagtggtttctaacgcttttcgcgccgccgagcagggtcgcccgggcagcgccttcgtcagcctgccgcaggatgtggtcgatggtccggtgaccggcaaagtcctgcccgccagcagcgcgccgcagatgggcgccgcgcctgacgaggcaatcaatcaggttgcgaagttgattgcccaggcgaagaatccggtgttcctgcttggattaatggccagccagacggaaaacagcgccgcgctgcatcgtttgctggaaaccagccatattccggtcaccagcacctatcaggccgccggggcggtcaatcaggataacttctcgcgcttcgccgggcgcgtcgggctgtttaacaatcaggccggtgaccgcttattgcaactggccgacctggttatctgcatcggctatagcccggtggaatacgaaccggcgatgtggaacagcggcaacgcgacgctggtacatatcgacgtactgcccgcctatgaagagcgtaactacacgccggatgtcgagctggtgggcgacatcgccggcacgctgaacaagctggcgcaaaatatcgatcatcggctggtgctctcgccgcaggctgctgaaatcctccacgaccgccagcatcagcgggaactgcttgaccgccgcggagcgcagttgaatcagtttgccctgcacccgctgcgtatcgttcgcgccatgcaggatatcgtcaacagcgacgtcacgctgacggtcgatatggggagcttccatatctggatcgcccgctatctctacagcttccgcgcccgtcaggtgatgatctccaacggtcagcagaccatgggcgtcgccctgccgtgggccatcggggcctggctggtcaatccgcagcgcaaagtggtctcggtctccggcgatggcggttttctgcaatccagcatggagctggaaacggcggtccgcctgaaagccaacatcctgcatcttatctgggtcgataacggctacaacatggtcgccatccaggaagagaaaaaatatcaacgcctgtccggcgtcgagttcggtcctatggattttaaagcctatgccgaatccttcggcgcgaaagggtttgcggtggaaagcgctgaggcgctggagccgacgctacgcgcggcgatggacgtcgacggcccggcggtggtcgccatccccgtggattaccgtgataacccgctgctgatgggccagctacacctgagtcaaattctttaa

SEQ ID NO: 89199 - DNA, 780 bp, Enterobacter aerogenes
atgaatcatgcttcagattgcacctgtgaagagagtctgtgtgaaacgctacgcgcgttttccgctcagcatcccgatagcgtgctgtatcaaacttcgctgatgagcgccctgctcagcggcgtctacgaaggtaccaccaccattgcggacctgctgaagcacggtgatttcgggctcggcacttttaatgaactcgacggcgagctgatcgcgtttagcagccaggtttatcaactgcgtgccgacggcagcgcgcgtaaagcgcgcccggaacagaaaacgccgtttgcggtgatgacctggtttcagccgcagtaccgtaaaacctttgaccatccggtcagccgccagcagctgcatgaggttattgaccagcaaattccttccgacaatctgttctgcgcgctgcgaatcgatggtcatttccgccacgcccatacccgcaccgtgcctcgtcagacgccgccctaccgggcgatgaccgacgtgctcgacgatcagccggttttccgctttaaccagcgtgacggcgtactggtcggttttcgtaccccgcagcatatgcagggaattaacgtcgccggctatcacgaacacttcattaccgatgaccgccagggcggcggccacctgctggactaccagctcgaccgtggggtattgaccttcggcgaaattcataagctgatgatcgaccttcccgccgacagcgcgttcctgcaggccaatctgcatcccgacaatctcgatgccgctatccgttcagtagaaagttag

SEQ ID NO: 89200 - DNA, 873 bp, Enterobacter aerogenes
atggaacttcgttatctacgctattttgtcgccgtcgcccgcacgcggcacttcacccgggcagcgaaagaactgggtatctcacagccaccgttaagtcagcaaattcagcggcttgagcgagaggttggcactccgctgttgcgtcggctaacccgcggggtggagctgaccgaagccggggagtccttttatgaagatgcctgccaaatactcgcgctgagcgatgcggcgctggaaaaggccaagggcattgcccgcggaatgaacggcagcctgtcgttaggcattaccagttctgatgctttccatccacaaatcttcaccttgctgcaccgttttcagctcgatcacccaggcgtcatcctccatcaacgggagggcaacatggcaaatttgatggcggcgctgagcgaggcggagatcgatatcgcctttgtccgtttgccgtgtgaaagcagtaaggcgtttaacttgcgtatcattgatgaagagccaatggtcattgcgctcccgcgcgataatccattgtcagcggaaccgacgctggcgctggaacagttgcgggacgtcgcgccgatcctcttcccgcgcgaagtggcgccgggtttgtatgagctggtgttcaatagctgcctgcgcgccgggatcgatatgaaccgcgccaggcagtcgtcgcagatttcatcgtcgctgagtatggttaacgccggatttggtttcgcgctggtgccgcagtcgatgacctgtatcgcgctgcccaacgtcagctatcaatcgatacaggggacgccggtcaagaccgatattgccatcgcctggcggcgcttcgagcgttcgcgcacggtgaagcgatttttggagatgttttga

SEQ ID NO: 89201 - DNA, 396 bp, Enterobacter aerogenes
atgatgaaaaaagcatggatatttgtcgcggcagtcgttgcgctaagcggttgtgcgccgctacacccgtcggattgtcataaaacctctgccctcggtagctgtgactccgggcgttttagcgatgaggatgagtatggtcagcaggcgagggggatcaaagaagccttcgagtcgcaacttgctgaccgctacgcgtggcggggaaaaaagtgccgcctgcatttagaattcgcccaggatggcactctggaaaagatgaatacggctgagggaaataaagcctattgtgccgcgctgcgtgaggcggcaaaaagtgcgaccttcccgccgtttactaacgataaagtctacaaggcctttgctcaatcgcggtttgatatgaagggtgaatag

SEQ ID NO: 89202 - DNA, 771 bp, Enterobacter aerogenes
atgaatttaaacggtaaaacagcgctggtcaccggctccaccagcggtattggtttaggcattgccaaagtgctggcgcaggccggcgcgcagctggtgttgaatggttttggcgacagcacgagcgcgcgagccgaggttgccgcgctgggtaaaattcccggctatcacgatgccgacctgcgcgacgttgggcaaattgaagccatgatgcgctatgccgaaagcgaatttggcggcgtcgatattgtgattaataacgccggtatccagcatgtggcaccggtggagcagttcgcggtggaaaaatggaacgatattctggcgataaatctgtccagcgtcttccacaccagccgactggcgctgccgggcatgcgcgagcgcaactgggggcggattattaatattgcctccgtgcatgggttagtcgcctcgaaagagaaatccgcctatgtcgccgccaagcatggggtgattggttttagcaaaacgctggcgctggagaccgcgcgtaccggcattacctgcaacgcgatttgccccggctgggtactgacgccgctggttcagcagcagatcgataaacgtatcgctgagggggccgaccctgagcaggccagagcgcagctgcttgccgaaaaacaaccctccggcgaattcgtgacgcctcagcaactgggggaaatggcgctatttttatgcagcgacgccgccgcgcaggttcgcggcgcggcgtggaatatggatggcggctgggtggcgcagtaa

SEQ ID NO: 89203 - DNA, 1392 bp, Enterobacter aerogenes
atgagtgtgttgattgccctggccgcgttggcattactgatgctggctgcgtatcgtggatacagcgttatcctgtttgcccctatcgccgcgcttggcgcggtcctgcttaccgacccgagcgcggtaggcccgacctttaccggcctgtttatggaaaaaatggtcggtttcgtgaagctctattttccggtatttctgctcggcgccgtctttggcaagctgattgaactatcgggcttctcgcgttccatcgtcgccgccgcgattcaaattctcgggcgtcgacatgcgatcccggtgatcgtgctggtctgcgccctgctgacctacggcggcgtttcgctgttcgtggtggcttttgcggtctatccctttgccgccgaactgtttcgccaaagcggaatcccgaagcgactgatcccggcaaccgtcgcgctgggcgcattctcatttaccatggatgccctgccgggcaccccgcagattcagaacattatccccaccagcttttttggcaccaacgcctgggccgccccctggcttggattgataggttcactgtttatcatcaccttcggtttactgtggctggaacgacagcggcgtaaagcgctcgcgaatggcgagggttacggtaccgatctgcaaaacgagccgcagacgccggataacatcaatctgccgcatccgctgatcgccattgccccgctgctgctggttggcctgctgaacctgctgtttacccgctggatcccgcaatggtacggcgccagccacgagctaacgctgccagggcttgccaaacccatcgtcaccgaggtcggcaaaatcaccgctatctgggccgtcgaggccgcgctgctatccggtatcgtcgtggtgctggtgttcggttttcgtaatattcgcggccgtctggcggaaggcagccgtacggcggtcggcggcgcgatcctcgcggcgatgaataccgcctcggaatatggcttcggtgcggtgattgccgccctgccgggttttctggtgttgtcgaaagcactgaccgccattcccaatcccctgttaaacgaggcgattagcgtaaccgtactggcggggatcaccggttccgcctccggcggaatgagcatcgcgctggcggcgatgtcagataccttcgtggccgccgcccacgccgccaatatcccgcttgaggtactgcaccgcgtcgcgtcgatggccagcggcggcatggataccctgccgcataacggcgccgtcatcacgctgctggcaatcaccggcttaagccatcgccaggcttacggcggcattttcgccattacgcttatcaaaagcctcgcggttctgtttgtcattgccgtgttctatttaaccggcattgtctga

SEQ ID NO: 89204 - DNA, 924 bp, Enterobacter aerogenes
atgtttacaccacaactggcggtactgggcgccggcctgatgggcgtcggcatcgcctgtcattttgcccgccacggccacaccgtacgcctctacgacaccgacccggcgcgcgttagcgagattccaggcgtcgccgccgccattttgcgcgagctcgaagagtgcgagcagtttgatgccgctcagcgtacggcggtgctctcgcgcctctccggcaccacggcattaggcgatcttgctgacgcgaccttgctgatcgaagcgattccggaacgtctggcgctcaagcacgccttataccgcgaactggaaaccttaatagccgacgaagccattatcgccagcaacaccagcggactaccgcccgatcggttggcgcagggtatgcggcatccggaacgcttgttaatcgcccacttctggcatccgccgcattttatcccgctggtggaagtggtgccgggcagcgcaaccctgccgcatctcgccaaccaggtcagcgattttttatcctcctgctcgctggaagcggtagtactcaaccgcgccgcgccggggttcgtcggcaaccgactacagttcgccctgctgcgcgaagcgctgcatatcgttaagagcggcatcgcttcgccggaggtggtcgacaaagtgatgcgcgcctcgctcggccgccgctacgcgatggtcgggccgctggaagccgccgatatgaccggtctggcgaccgtccaggatatctgccagcacctgctgccggaactggccacaggcagcgacatgatgtcgctggtcgccgacaaggttgcgcaaggcgctaccggcgcccgcagcgggcaaggtttttatcactgggatgagacccggcagaaacgaatacagtcgcgccgtgagcatcagctgcgctacgccctgaaaccgtaa

SEQ ID NO: 89205 - DNA, 1182 bp, Enterobacter aerogenes
atgaaagaagtcgctatcgtctgcgcgctacgtacgccaatcggcagttttcgcggcgccttgtcttccctttccgccgtcgagctaggcgccgccgtagtgcgtggtctgcttgaacgcacacagctaccggccagcgccgttgacgaactgatttttggccaggttttaaccgccggctgcggacagaatccggcgcgacaaaccgcgctgcgcgccgggctaccggttgaaactccggccgttaccgtcaatctggtttgcggttccgggctgaaagctgtgcaacaggcggtacaggccattcgcagcggcgaggcggagatagtgatcgccggcggccaggagagcatgagcaatgctccgtatctggttcagggcgcgcgcgatggcctgcgcttcggccatgccagcatgcaggacagcatgattcaggacggattatgggatgcgtttaacgactatcacatgggcatcaccgccgagaatctcgccgacgcctttgatatctcccgcccccagcaggatgccttcgccgccctttcgcaacgcaaagccgccgccgcgatagccgccgggcgctttcaggctgagatagtgccgcttagcgtccctcagggtaaaaaagcgccgcgcatggtggacgcagacgaacagccgcgcccggaaaccagcgaacaacagctggcgcagttgcgccctgcctttcgcacggaggatggcagcgtcaccgcgggcaatgcctcttcgctcaacgatggcgcggcggcagtcttattgatgagcgtcgataaagcgcggcagcttggcttgccggtgctggcgcgaattgtcagctctgcggtggccggcgtcgatccgtccgtgatgggtatcggcccggtaagcgcttgccggaaggcgctgcagcgcgccggttggtcgctggatgaggtggatctcatcgaagccaacgaggcctttgccgtacaggcgctggccgttggcaaattgctggagtgggacagccagaaagtcaacgtcaacggcggcgctatcgcgctcggccatccgattggcgcctcaggatgtcgcattctggttagtctgctgcacgagatgcagcgccgcgatgccagcaaaggcctggcgacgctttgcgtcggcggcggtcagggtatcgcgatgaccatcgaacgttaa

SEQ ID NO: 89206 - DNA, 669 bp, Enterobacter aerogenes
atgttaactcgcgaacaaatggcgatgcgcgtcgcccaggaaatgcgcgacggcgattatgtcaatctcggtatcggcattcccacgctggtcgctaactatattcctgccggtattgaagtgatgctgcagtcggaaaacggcctgttggggatgggcgaatttcccgatgagtcaacgattgatgccgacatgattaacgccggcaagcagaccgttaccgcccaaaccggggcggcaatttttgactccgcccagtccttcgccatgatccgcggcggccacgtcgatctcacggtcctcggcgcttttgaagtcgatgtcgcgggtaatatcgcctcgtggatgatcccaggaaaaatggtgaaaggcatgggcggcgccatggatctggtggctggcgcgcaaaacatcatcgtggtgatgacgcacgcctcgaaaaacggcgaatccaaactactcccgcaatgtaccctgccgctcaccggcgcgggctgtattcgccgggtactcaccgatctcgcgctactggaaattagcgacggcgcctttgttctgcgcgaatacgcccccggcgtcagcattgacgaaattgcccgtaaaacggccggacggctggtcattgccgatgacgtccgcgaaatgcgcttcactaaggaggcaatatga

SEQ ID NO: 89207 - DNA, 708 bp, Enterobacter aerogenes
atggcaggactggataagcgcgtcgccagctatgaagcggcgctggacggattaaccgatggcatgacgttactggccggcggcttcggcctgtgcggcatcccggaaaacttaatcgccgaggtcaaacgccgccaggtacagggcctgacggtagtttctaataactgcggcgttgatggctttggtctcggcatgctgctggaaacgcgccaggtacgcaaagtcgtggcctcatacgttggcgaaaacgccctctttgaacaactggtactgagcggcgaactggcggtggaactgaccccgcaaggtacgcttgccgagaaaattcgcgccggcggcgccggcatccccggattctataccgcgaccggttacggcacgccggtagcggaaggcaaagaggtgcgtcagttcgacggtaaacattacattctcgaagaagctattcgcggcgatttcgcccttgtgaagggctggaaagccgactggtacggcaacgtggtttatcgccacaccgcgcagaattttaaccccttgatggccaccgccggacggatcacggtagtggaagtcgaagaaatcgtcgcgccgggcgaactccccccctccgctatccatacgcccggtatttatgtcgaccggctgatcgtcgggcaattcgaaaaacgtattgaacagcgcacgctgcgcgccggagggaactga

SEQ ID NO: 89208 - DNA, 891 bp, Enterobacter aerogenes
atgagaatgagtgtcaaacagttacgcgcgtttctagcggtagctcacactcttaacttcgcccacgccagcgagcgcctgaacctgtcgcagccggcgctgagtttgaccattaaggggttggaagaggcgcttggcggggcattgctacagcgcagcacccgcaaagtgaccttaacccaggagggagaaacctttctgccgatggcccgccagctgctggcggactgggataacgccgaagaggcgatgcggcaaagtttcaccctgcagcggggaaagatctccgtcgccgcgatgccgtcgtttgccgctaacgtgctgccggaagtgcttaaagccttccgcgaccgctatgcgggagtcaacgtaacggtgcatgacgtgattaatgagcaggtcattgagatggtgcgcgaaggccgggtggagatggggatcgcgtttgagccatcgcccgtcaacaatctgctgtttacgccgctggcggtggatcgcttcgtggcgatcgtgccgaaaacgtcgcctttggcgagtaaaaagcagttgagctggcgtgaactgctgacgctggattttataaccctgcagcggccatcggcggtgcgtttgatgctggaagaagagttggcgcgtagcggtagccagttggacgtggcgctggaaagtcatcagttggtcaccgtcgggcggatggtcgccagcggtctgggcggcagcgcggtgcccgcattatgccagtcgcagatgcagtcgctgggagcggtttgtctaccgttaagcgatccgccgattgaaaagtgcattggcgttattcatgccggacatatgcagttgtcgaaggcggcgcaggcgctgctggaaacgctaaagggctttttgcccgcttag

SEQ ID NO: 89209 - DNA, 141 bp, Enterobacter aerogenes
atggaaattgatctcgacaacctggtgtttagcggcctggaagaagcggaagagcgtaacgctgaacgcctggacgaagcggataaaaaagcgcaggcgattgttgccgatgatgattgcggcgatgcctgcaaaatctaa

SEQ ID NO: 89210 - DNA, 915 bp, Enterobacter aerogenes
atggtatcgataacagcatctgccatcaaagaatggcggagaaataataaagtcatttgtcacgtaaaacttaaatataaaaaggtattgcgaaaatgtcgcgaaatacctttaacaggaggtaagtacaaggaatatcaacggctttgccagacatacacatgtgcaaaattgaccagcgcgacgccggggctggtacattttgaagataagccttttaaggcatatttaaataagcgaatgtcgaaaagagctaaactgaatattgcccatggcgctttgaattttattgaaaaaagctttcaggcggaaatattaccgcagttgtataatgtatcgtcgttcggttgctcgatgattgccatcccgctgaagaatggaaccagcctggaagtgaaacttctggcctcgccgttccaggaagagggagaactgatgctgcagatgttctttgaaaataaacgcgtatatagcgtctgtttttcctgcacggatcaaggaagcgcgtggattggcggtattcagggcggtaaagacattagcaacgatgaagtgaaggcgttgaccaaagagctctacggcacgcggccaaaaaacctgattatcaccttgttgtacgggttattgcgccactttaatatccgtgacatctacgccatcgacagcgactaccatgtgaagagcgacaaggtgaaagccagttactcagagttgtggttagaaatcggcggcgagaagcagcggcgcggttggtacaaattacctgcacaagagattaaaaaaagtcttgaagaggtgaaaagtaaacatcgcagccagttcattaaacgtgagagtttaaaagagcaggcgcagttggatctgattgctgcattacggcagattagcgtcggtgaaaacaccaaccaaccataa

SEQ ID NO: 89211 - DNA, 2400 bp, Enterobacter aerogenes
atggacgaacaaaaaggtcatggtcgaaggattttcttcaccatctaccgattgctttttgtgttactgagttttggcattgggattttcttaactatctgggggggcaagctgctctcgctcggcggcagcgcctggtatctgttagccggtctcgcttatcttatcatcgccgttgggtacttcactcgtagtcaatacgcgctgcctcttgctgttattaccttcctgttaacgctggtctgggcgctgtatgaagtgcagctcagctactggggcctgatccctcgtctggtggttcctgcgctgatgctaatgctggccctgtggctggcggcggcgatgccggtggctcgcgtgcgtctggcgaactggagcgccacggttatttttatcgcgctgctggcgacgctggtttcggcgttctacccgcacggcggcatccacaatggcatcgtgaaagcggcgagcgacaatagcgcgacgcaggcggcaaaaagcgataactgggagttctttggccgcgatgcctccggcacccgttttgcgccgtataccgatattaccccggaaaacgttcataagctgaaagtcgcctggacttaccacacaggccgccgcctgaccggcccggccatcggcgttgacgaaaatacgccgctgcaaattggcgatacgctctattcctgtacgccgctcaacgtggtgaccgccattgatgccgataccggtaaggcgcgctggcgctttgacccgcacgcgcagacggcggaacatgtgacctgccgcggtgtgggttactatgacgtgcagagcgacgatacgctcagcgcggaagaaaaagcgagcccggcgttgcaacagtgtccgcagcggatcatggtatcgaccgtggatgcgcgcctgctggcgctgaatgccaaaaccggcgaactgtgcgctgatttcggcgaccacggtagcgtggatctgaagcagggcatgggcgacaccgaaaacagcaaacgctaccatccgacttcaacgccggtgatcatggggcatattgcggtgctgggcggctgggtacgcgatatcgtacacggcgagccatccggggtcgtacgcgcttttgacgtacgcgatggtaaagtcgtctgggcctgggatgttggcaagccggaaaatatcaccgacccggaaaaaggccgcgtttataccctcgaaacgccgaacgtgtggaccattcccggctttgataaagagctgaatctggtctatctgccgaccggcaacggtccgccggactactggggcggcgatcgtaatgaagcgaaagagaaatatggctccgcggtggtggcggtggatgccagtaccggtaaaacaaaatgggttttccagaccgttcaccacgatatctgggattatgatctcccatcgcagccggtactgttccacatgaaaaacgagcagggcgaggacgtcccggtgctgatccagaccaccaaaaccggacagatttacgtgctcgatcgccgcactggtaaaccggtgacccgtgttgaagagctgcccgtcgctcatcagggggcggagggcgaacatctgtctgccacccagccgttctctaccggcatgccgcagcttggcgtcgagccgttgagcgaaaaatcaatgtggggcgtgacgccgttcgaccaactgatgtgccgtatcgattttaaagagtcgacctaccttggcatgtatacgccgccgtcagagaaaccgtatatcgagtggccaagcctgctcggcggcatgaactggggcggcatcaccatcgatgaacgtaccggtacgctgttcgtcaacgatatgcgtatgccgttgcggatgtcgctggtgcgcaaggaagagatggcgaaatacaaagtctccaccgacgaagtccctggatttatgggtaccgttcgcccgcaagttgccgggccttacggcggcgtgcgtatcgacatcctgcagtccgcgctgggcgtgccctgtaataccccgccgtttggtaccatgagcgctattgacctgaatagccgtcagctactgtggcaggtgccgatgggctcggtggaagataccggtccgctggggatgaaaacccatctgcatatcccgctgggaatgccgaccctgggcggcccaacctctaccgcctctgggctggtattcttcgccggtacccaggataactacctgcgggcgctggattccgccagcggtaaagagctgtggcgcgctcgcttgccggttggcgcggtagcggcgccgctggtctacaaatcgccgaaaaccggcaaagagtatgtgctgatttccgccggcggcgccagccactcgccggacgtcggggacgatatcatcgcctacgcgctggaggaataa

SEQ ID NO: 89212 - DNA, 546 bp, Enterobacter aerogenes
atgattaagcgtcgcactctcaaatctgcacttgcggcggttatttcgctcgccgtccttgccgcgccagtttatgccaaccctggtaatggcaacgggggtggcggaggtcatggcaatagcggcggaggtggcaaccacggtaatagcggtggaaaccacggcaatagcggtaaccatggcaacagcagtgaccacagcaacaaaggccagggaaatgataagtcgaaagaggatcacggtaaccgtaaaaactacggcaaacccgaccatgtcgactctgatattagcttctcgcgagcccgttctctggcggtgaattatggtctggtaggttatcaggcgctaccgccgggtattgcaaaaaatgtggttcgcggcaaaccattacctccgggtattgccaaaaaaacgttgccggcatctatgattaacgatctgccttactacccgggttatgaatggcgtgcagtgggcgatgatttagtgctggttgcgttaagtaccgcaatcgtcacttccgtcattaacggcgtttttgattaa

SEQ ID NO: 89213 - DNA, 969 bp, Enterobacter aerogenes
atgaaccagccctatttaattgaagttaatggcttgaaaaagtatttcccgctgcgcgacggcctgttcggccagcagaccggggaactgcgcgcggtcgatgacgtcagttttaatatccgtccgggaacgattttcggcctcgtcggagaatccggtagtggtaaaaccaccgttggccgcaccttgcttggcttgtatgaaaagaccgccggcagcattaaattccgcggtcaggagttatccgaactgtcagcggcggcaatgcaggccctacgaccgaaaattcaactggtgtttcaggatccctatagttcactgaacccacgcatccgcgtcggcgaggcgattggcgaggcgatgctgcagcataaactatgcacgcgcgctgaactctatgagaaagtcattgcggtgatgaagatatgcgggctggcgcctcagcattaccaccgttttccgcatgaattttccggcggtcagcggcagcgcatcggcatcgcccgcgcgcttatcctcaatccggactttatcgtcgccgatgaacccatttccgcactcgatgtgtcgattcaggcgcagattatcaatctgtttgccgacctgcgcgacgagcgtggcgtcacctttctattcatctcccatgaccttggagttgtagagcatttgtgcgacgacgtggcggtgatgtacctcggtcaactggtggaaaccgccagccgcgatgcgctgtttagccgccctcttcatccctatacccaggcgctgctggccgcggtacccaccctcgatcccgaaagcgaaccgcaggcggtcgtccagggagaaatcccggatccgtcgcgcccgcctgagggctgccggttttcgtcacgctgcccgcaggcaagtgaccactgccgccgtcaggcgccgacgcttcgtgaaatttcgcctggacacctggtcgcctgtcattgggcaggatag

SEQ ID NO: 89214 - DNA, 981 bp, Enterobacter aerogenes
atgagcacgccattaatttcttttaagcaactttcggtctctttcgctgctgaagggagccgggtgcgcgcggtacaggaggtctctttttcgattcaggccgggcaaacggtaggtatcgtcggtgagtccggctgcggcaaaagcgtgaccgccatgtcgctaatgggcctattgcctccccaggccgcgcgcattgacggcggcgagatccttttcgaaggacgcgatctgctcacgctgaaagcgcgtcacatggccgacctgcgcggcaaccagttggcgatgatcttccaggagccgatgtcggcgctcaacccggtactgaccataggcgaacagctctgcgagccgctcatccgccaccgcggcgactcgccgcaagccgcctggcagcgtgcaatacacctgttgaacgaggtgggactggcgcgcagcgaaagcctgatggcgtactatccgcatcaactttccggcggcatgctacagcgggtgatgatcgccatggcgctgagctgcgggccgcaattattgatagcggatgaaccaactaccgcgctggatgtcaccgtgcaggcgcagatcctgcgtctgatacgggaccgcgcgcgcgaaagccagatggcgatgctgctgatcacccacgatctgggggtaatcgcgcagatggccgaaagggtcgtcgtaatgtatgccgggcggattgtcgaacagggaaccaccgtcgaggtgctgcgccagccccagcacccctatacccgcggacttatcgcctcgcgtccggtgccgggcgcgcgccgccggcggctttactccattcccggtcaggtgccggatctcgcgcaactgcctgcgggctgcgcgtttgccgatcgctgcgaacaggcaacagcacgctgccgtcaggacaccccgccactttttgggtcctcgcatcaggcagcctgtttttatagtcaattcgcggagtcggtggcatga

SEQ ID NO: 89215 - DNA, 948 bp, Enterobacter aerogenes
atgataacttccctgtttggttaccgtcgccgcctgcgccaggcgacaatccccgcgcttgcgcaaataaccccctctccatggcgtcaggcatggcgccaactgcgccgcaaccggatggcaatgctgtgtttaatcctgcttgcggtgatggccacgtggtgcgtactcggaccgatatggtcgccgtggaaagatgacgccaccgatgcgctgatggtcaacaaaccgcccggcgccgaacactggctggggaccgattttcttggccgcgatatctatacgcgtctactactggccgggcgcatttcgctgataatcggcctgttgactatgctgctgtcggtaacgctgggctacctgctgggagcgctgtcgggctacgtcggcgggctcaccgataaactgattatgcggctggccgatctggtgatgacgatccccagtttgcctttattaatcgtcgccggcgcgatgctctccgagctcgatttttcgccggattcccgcatctggatggtggtgattatgctcagcctgctggagtggccaaagctggcgcggctggtgcgcgggcagtgcctgtcgctacgcgagcgcgattttatgctggcgacgcaggttctgggactgtcggcgcgccgccgcctgtttggccacctactgcccaataccatcccgattctggtggtgatggcgacaatggcggtcgctaacgccattctgagcgaatcggcgctgagctaccttggccttggcgtagtaccgccgacgccgtcgtggggcaatatgatggatgccgccaacagcctgattgatttccagcggcgaccgtggctatggatgcctcctgggattgccatctttattaccgtcattgctatcaacgtgctgggcgacggcctgcgcgacgcgatggacccgaaaatgaaacagaggctgaaatga

SEQ ID NO: 89216 - DNA, 957 bp, Enterobacter aerogenes
atgaaaaatttcatcctgaggcgcttattgcaaacgctgccgatgctgctgctggcctcctttatcatttttatgctctttgccaaaacccccggcgactttatcgatggcaatatcaccttgacggccgcccgcgccgccgaactgaaggcgatatacggcctcgaccagccgctcttcacccgctaccttcactggctggggcaactgctgcgcggggatttaggcttctcgctgcaataccaaattccggtcagccagttactgaaccagtacatctggaactccttcctgctggcaagcgtggcgctggtcttctactggggtatcggcctgacggttggcgtagtctccgcgcttagacctaattcctggtttgatcatctggtgagtatcgcggtgttcgccgccatgtcctttcccacctttttcctctgcctgctgctaattaagtggtttgccgtcgacctgcactggctgccggtaggcgggatgaccaataccggttgcgacgatagcggctggcggtatgtgctgcaggtcgccgctcatctggtactgccggtactggcgctggtgatgctgcaggccggcagcctgacgcgctattttcgcgccagcatgcttgacgtggtgaagatggatttcattcgtaccgcccgagctaaagggctgcgagaacgcacggttatcatgaaacacgcgctgcgcaatgcgctactgccggtcatcaccctgcttggcttcgaactgccgggattgttctctggcgccatcattaccgaaaaagtatttaactggccgggcgccgggcacattcatatcgattcgctggccgctcgcgattatccggtattgatggggtttaccctgtttctggcggtgctgacgatcatcggtaacttactggccgatgtgctctacgcgtgggccgatccgcgcattcgagtgaggtaa

SEQ ID NO: 89217 - DNA, 1704 bp, Enterobacter aerogenes
ttgtccagattacggcaaggattaaaaacccgacaaacgcgtttcgcactggcgctgaaagtggcgctactcggtagcatggtggcattttcttctgtcgccaacgccgacgatatcctaaaagaagggatcactcccgcaaccgatgccagccagatcccggccagcgccaaactgcgtaaagacacggtggtggccggcatttccgaaccacaggggatctttaacccttacttcttcgtcaacggttgggatgagaacgtcaccaacgttattttttcacgcctgattgactgggacagtcagggtaagctggtgccggggctggctgagagctggacggtgagcgcggataacaaagtctataccatcaaattacgccctaacctgactttcagtgacggatcgccactcaccgcggaggatgtcgcctttacgctgaccgttctgctcgacccgaaatatgacggcgataccgatatcactctggccaatatcgccggcggcgcggaatataaagccggcaaagccgatagcgtgagcggcctgaaagttatcgatccgctgaccctgcaggttactaccacccagccgggcgcgacaacgctggcgaaaatcggcggtccggtattatcgaaagcctggtacggcaaagggtatcaacgcggaaatctggattatctgcgttctctgcacggaaaaccgctgggtaacggtccttatgtctacgataaatatattcccggtcaggagattcgcttccacgccaacacgcatttttatcgcggtaggccgccaacgccgcgctttatctatcgcgtgaccaatccgtctaccaatttccagctattccagaccggcgaaaccgactacgacgccttcacctcgcgtccggatgatattgagcagcttaagatgctcggttttgccaatatcaacctgtacggctccagcgactacagccaggtggagttcaacctccatcgcccggcgctgcaggataaaaaagtgcgtcaggcgctgatttacgggcttgaccgccagaagttaatcgacgtggtgtatcagggatacggcaaggtagccattgaaccaatcgcgcctatttcctgggccttcaatgcgcagggcgtcaacccctaccattacgatccggtgcaagcgaaaaaactgctcgatgaagcgggctggctgcctggcgccgatggcatccgcgtgaaagacggtaagcggctggaattgaccctactggcgagcaaaaaagtcattaacgatgcgctgatcccaattgccaaagagaactggcggcagataggcgtgctgctgaaaccgcaggtggttgatttcaacgcgctgatggcgcagcgcaaagcgggtaattacgatctggcgtcgtttagcaccagtactctcaacgatccgcatgatggcgtgtgggacttctacagcagcgaggccaaagagtcgggctaccacaatgctgaagtcgataagcttatcaatgcgggtaacgcggtgctggatgtcgaacaacgcaagcctatttatcaccagctgtaccaggtgctggccgaggatccgccggttatcctgctaggataccgggagattctttccgccagcagcgcccgcgtgaccggctttaagccggatatctataacggcctcaccggcagtttgccgggcgtgaaaatcgtgaagtaa

SEQ ID NO: 89218 - DNA, 651 bp, Enterobacter aerogenes
gtggcacattatcgcgtcattgataaagcgagctggcctcgcctggatcactttacgttctaccgtacctttgccaatcccagcttcaatctgtgcgtgccggtagaagcgcaacagttgtacacctgcgcgaaggaccggggcgtctccttctttcaactggcgttattcggcctgttgcgcgcggccaacgccgtaccgcagttgaaacagcgcctgcgcaacgacgatatcatcgaatatgacgccatctcggtgatgacgccgatcatgaccgccagcgaaggttttcgccaggtatggtgcgataacgccgctgatttccccgcgtttagcgccgccgcgacgccgcgcattgaggccgcaagaagcaccaacccctcaccgcttatcgtggaagaagaaaatttcttttgcgccagttgtctgccgtggctgcacttcagcgccatgacccatgcggaatactacgtgggcgcggcggtacccgccctgacgtggggaaaactgaaaaatggcatcattccggttgccggccggtttaatcacgcttttgttgatggcctgcacgccagccgtttttatgccgaagttgaatattatttcgccaacccgcaggctctgtggctgccggttgaggcccgcgattag

SEQ ID NO: 89219 - DNA, 384 bp, Enterobacter aerogenes
atgaaagttgcccatatcgccctctggacccgccatcttgagcagcaagcacgcttttgggtggagttttttgccggtgaaatcaacgaaaaataccgtagtaaaaccaatcctggttttgaatcctattttgtaaaaattggctctgacgtggccattgagttaatgtccaaacccggtttacatgactcgacccacgataacaaccatacggggtgggtgcatctggcgatcgccgtcggcggcacggaacaggttaatgcgttagccaaacgcgctaaaatggcgggaattttagtctctgccccacgcaccaccggcgatggctattatgaggcggttatcaaagacccggatggtaacctggtggaaatcgtcgcatag

SEQ ID NO: 89220 - DNA, 771 bp, Enterobacter aerogenes
gtgctcgattatgcagctttccctcagcaacgacaagcgctgatttgtcagatcctgcaggaggacggtagggtcgtttgcgccgatctggcccagcgcttacaggtctctgaacacactattcgccgcgatcttcatgagttgagcaaagacggatattgtaagaaagtctacggcggcgcggtgatgaccctgccggaatccatggagtacaacgaacgtaaagagaaaaacagggcaacaaagagcagaatcgcacagaaatgcgcacagctagtgaaaccgggcggctgtatttttattgataccggcaccaccaacctggcaatggcggaagcgctaccgggcgaactggccttaaccgtggttaccaattccccggaaatcgcggcggttctgcttaaaaaaccgctttacgaggttgtgatgctcggaggtctggtgcaacgcgcggctggcggttgtgtcggcgcatcggcggtggcccaggtgcaggggatcctcttcgatcagggatttattggcggctgcgcaatggctccggagtcaggtctaaccggctttgatcacaccgattgtgaatttaagaaagcggttatcaaacagtgcagtgaaattatcgttggcttaacctcagataaaatccccgccgtcgcgcgttttgtggtagctgaaagcagcgccattgacgtgctggtcgtggaggaaaacatcagccgtaaataccgggatgctttccgtgaacacgagatccgtatctataccgtttag

SEQ ID NO: 89221 - DNA, 3216 bp, Enterobacter aerogenes
atgtgtgcttcaccttcagcgccgctacggcgcgtggatggactggcgaaagtcaaaggaacggccgtttatggcgacgatattaccttaccgggcatgctgtatggcgtttgccgctttgcggatatacccgccgggaaaatcgaggcgatagatcttagcgaggcgctgaatgttgcaggcgtggtaaaaatcgccacctggcaagatattcccggtactccggtcgtggggattatcgtcaaagattatctgcctattgtcaaagacgaggtggtcttccacggcgatgtcgtcgccgtggtggcggcaaccagttatgaagccgcctgtgaggcggcggataaaatacatgtgcgctatacgccctatgagccgctaacggacgtagaagccgcgctggcgccggatgcccggcgaattcacccggagcgcagcgataatatcgccgcccatcaccacaccgttaagggcgacatcgccataggttttgccgaagccagtcacgtgattgaacgtgaatatgaagtgggcttccaggaacacgcttacattgaaccggaagttgtactgacctggcttgaccccaccgatggtagcctgattatctccggctccattcagaacccgcaccgcgtacgcagcttcgtggctaagtttatgggctgcccgcagagccagattaacgtcaaacgcgcggtgatgggcggctcgttcggcggcaaagatgacatcatcgatcacctggcctgccgttccgcattgatgacgcgcctgaccggtcgtccggtgaaatttacctacacccgcgagcagtccattatcgaaagctgtaagcgccacccttataaaatgaagtatcgcgccggggtggacgacaacggacgcattctggcgatcaaaatcgatattcttgccgacagcggcggctatgcggcggcctccccgttcgtcacatggcgttcttcggtgcaggccgctgggccgtacaatattgataacgtccatatcgacgttaaagccgtctataccaacaacagctatacctcggcgatgcgtggtttcggttcaccacaggtggtttacgccaacgaatcctttatggatgaaattgccgacgtgctcaatctctcgccggtggcggtgcgtgaagtgaacgcgctgcgtcagggcgatacctcggtcaccgggcagcggtttgataaacacaccgtctcggcgactgaagtcctgagtaaggcggtgaatgcctcggaatttgcggcaaaacgccagcactatcgtgaattgaaccaaaaaggcggcgtttatcgctatggcattggcctggcgctgagctaccgtggttgttccatcggcgcggaaggggtagatacctcgacggcgctcattcaggtgaatgaggacggcagcgtcaatctggcgacatcggtttctgaaaacggtcagggtctgcaaaccgcgatgtcgctaatcgccgcggaagcctttggtattcctctatctgaactgcattttatggaaccgccgacctcggttatcggcgacggcggatcgacggcggcaacccgtgggactatggtcggcggtggggcgattcttgacgccgcggacaagataaaacgccgcattctcagcgtcgtcggcgacagcatcggtacccgcgagttggctgaaaccttgtggcaggatggctttatcatcaacgtccaggacagtgaacggcgtattgatttcaaaactgcggttaataaaaccaaatgggccagcgtcagcctgaccgagtacggctggtttgtgccgccgcccattcattgggatgaagaaaaagggtgcggcagcccgtactttacctgggtctatggctgccaggtggcggaggtacgggtgaataccagcaccggtaaaaccgatttgctgcatgttaccgccgcccatgacgtgggccgggtactcaacccggtgggttttgaaggccaggtttatggtggggtggcgcagggttttggctacgcgctgctggaagacttcaacattgaaaatggccaggtcaaatcggaaaacttcgacagctacctgctgccgacgatgaaagatattccgccgatgacgattatcggcgtagaaaacccggatatcgccgggcctctgggggcgaaggggatcggcgagccagctactgaactcgcggcggcggccatcaataacgcggtgagttttgccctcgagacgcggtttaataaattaccgttgaccctcgaacaggtgatcctcggctacaacctgaaaaagccggttcgccaaagcgaaatgatgctggaggcggaaaacaagaagcaggtgctgcgcctcactgacgtggaagtgactcgcgcgaaaagcctgcaggaggcgttaaccctgctggcgcaagagggcgtaacggctatcgccggcggtaccgatgtgattgtgcaggggcgtctgcaaacccgcgcgctgcggttggttgatatttcccgtctgccggagttgacgcaggtgagcgaagatccggtcagccatgaggtcatcattggcggggcgatgacttttaaccgtattaccgatcatccgctgctgcgcgaacgttacccgctgctggcgcaggcctgtcataccgtcggttcgcaccagatccgtaatcgcgccaccatcggcggcaatatcgtcaacgccgcgccctgcggcgattccattccacctgccatcctctatgacgcgcgcatcgagctgcgctcgctaaatggcgtacgcaccctcggtctgggcgagtttttgctgtccggctacaagacccagcgccagccggatgaacttttgaccaaagtgatactgccgccgccggcgcgcccgcgggctaaaggtttctatcaccagttagggcggcgcaacgcgctcaacatcacccgtcagagcctgagcgcgctgctcgattttgctgatgatggcacggtgagctactgccgtctggtggacggcgcgctgttcagcaagccgcagcggttactggatattgaacgctgtctgctagggaaaccgttaaatagcgacacgattaatagcgcctgcgaggtgctggacaagcttatctatgcggccattggtaagcgctggtcggcggcatataagcagccggtgttcgtcaatatgttccgcgacatgatggccgaggcgcaacgggcctcagggatttaa

SEQ ID NO: 89222 - DNA, 459 bp, Enterobacter aerogenes
atgagcacaattaaagtgaaggtaaacggcaagctggtggaagcaaaagtagaaggcaatatgcgcctattggatctggtgcgggatacattgcatcttaccgccaccaaagagggatgttcgattggcgaatgcggcgcttgtacggtgctgatggacggtaacgccgtttgttcttgtctggtactggccgaacagtgtgatgaagcggagatcgagacgctcgaagggttaaacgataatccgattacgcaaaaattacaggatgcatttattgagaagggcggcgtgcagtgcgggttctgtacgccgggagtactggtcagcgccaccgaattattaaccaaagagccgcatccggacgaagcgcaaataaaggatgtattagaaggcaatatgtgccgctgtaccggctatcagccgattattgactccattcaacacgcgattaaatcgtga

SEQ ID NO: 89223 - DNA, 1254 bp, Enterobacter aerogenes
atgtcgggatacaagtcgggattaagccgccgtcgttttttacaaggggcgggcgccatgtggttaatgagtgtgagtccggtcggtttggccgccgccgcgcaggtagtcgcggtgcgtatctggccgtcgtcgacttacacccgcgtcacggtggaatccaatcatgtactgaaatatcggcagtttgcgttaagcaatcctgagcgagtggtggttgatattgaaggcgttaacctgaattcggttctgaaagggatgggcgggcaaatccgcgacgacgacccgtatatcaaatccgcgcgcgtgggccagttcgacccacagaccgtgcggatggtgtttgaactgaaacaaaacgtcaaaccgcagctgtttgcgctggcgccggtcgccggttttaaagagcgtctggtgatggatctttatccctctacggccaccgatgtgcaggatccgctgctggcgctgctggaagattacaacaaaggcgatctggaacgtcaggtaccgccggcagaaagcgggccgcagccggggaaagccgggcgcgatcgtcctatcgttatcatgctcgatcccggccacggtggtgaagactccggcgcgattggtaaataccgaactcgtgagaaagacgtggtgctgcagattgcccgtcgattgcgcgcgctcattgagcgtgaaggtaatatgaaggtctatatgacccgtaacgaagacgtgtttattccgttgaaggtgcgtgtcgccaaggcccagaagcagcgtgccgatctgttcgtttcgattcacgccgatgcctttaccagccgtcagccgagcggctcttcggtgttcgcgctctcgaccaagggtgctaccagtaccgccgcaaaatacctcgcgcaaacgcagaacgcctcggacttaatcggcggcgtcagcaagagcggcgatcgttacgtcgaccacaccatgttcgatatggtgcagtcattgaccatcgccgacagcctgaaatttggtaaagcggtgttgcaaaaaatgggcaatatcaacaagctgcataaaaatcaggtggagcaggcgggctttgcggtactgaaggcgccggatattccttcaattctggtcgaaacggcttttatcagtaacgtcgaagaagagcgtaaactgaagaccgcgaaattccagcaggaagtggcggagtcgattctggcggggatcaaagcctactttgccgatggggcgacgttggccagacgtggataa

SEQ ID NO: 89224 - DNA, 1332 bp, Enterobacter aerogenes
atggtgaaggagcgtcgcactgaactggtcgagggattccgccattctgttccctatataaacgcacaccggggaaaaacgtttgtcatcatgctgggcggagaagccatcgagcacgataacttttccagcatagtcaatgacattggcttattgcatagcctcggtattcgcctggtggtggtctatggcgcgcgcccgcaaattgacgccaacctcgcggaacatcaccacgagccggtttatcacaagcagacccgcgtcaccgacgccaaaacccttgagctggtgaagcaggccgccggtatgctgcagttagaaattaccgcccgcctgtcgatgagcctcggcaatacgcccctgcagggggcgcatatcaacgtggtgagcggcaattttattattgctcaacctcttggcgtcgatgatggcgtcgattactgccacagcggccgtattcgccgcatcgatgaagaagccattcatcgccaactggacagcggcgcaatcgtgctcatgggcccggtcgcggtatccgtcaccggcgagagcttcaacctcacttctgaagagatagccacccaactggcggtaaagctgaaagctgaaaagatgatcggcttctgctcgtcgcagggggtctacgaccagcatggcgagatcgtttccgagctgttccctaacgaggcgcaggcgcgggtagaggagctggaagcggaagaagattataattccggtaccgtacgcttcctgcgcggggcggtgaaagcctgccgcagcggcgtgcgtcgctgccatttaattagctatcaggaagatggcgcgctgctgcaggagctattctcacgtgacggtatcggtacgcagatcgtcatggaaagcgccgagcagatccgccgggcaaccattaacgatatcggcggcatcctcgatcttatcagcccgctggagcagcaaggcattctggtgcgccgctcgcgcgaacagctggaaatggagatagataaattcaccatcatccagcgcgataacaccaccatcgcctgcgccgcgctctatccattcccggaagagaaaatcggcgaaatggcctgcgtagcggtgcatccggattaccgtagttcgtcacgcggcgaggtactgctgagccgtatcgccgcccaggcgaagcagatggggctcagcaagctattcgtgttgaccacccgcagtatccactggttccaggaacgcggcttcaccccggtggatattgatttgctgccggagagtaaaaaacagatgtacaactatcagcgccgttcgaaggtattgatggcagacctgggctga

SEQ ID NO: 89225 - DNA, 1848 bp, Enterobacter aerogenes
atgaccatggatgaactgctgctggccgccgccgagcagcgtttgctgcgaccgctggacgtacagtttgcgctgatggtggcgcaggatgcccctccggcagtgaagctggccgccgcgctgttgagccgggatgccggagaaggtcatgtctgcctgccgctgtcgcgcctcaacgctgaagaagcgctaagcggcaaggccggcgagatccgcgaccagttgctggcgatggccggagagccgcaggactggcctcaattgttgctttcttcgtcagcggtgagccgcggtgacgaaccgacgccgatgattttatgtggcgacaggctgtacctgaaccgcatgtggcgtaatgaactcaccgtcgcccgcttttttaatgagacgaaccgggtactggaggttgatgaagggcggttaacggcaaccctgaatgaactctttcctgcgaccgacgatatcgactggcaaaaagtcgctgcggcggtggcgctgacccggcgcatttcggtgatctccggcggtcccggcaccggcaagaccactaccgtcgcgaagctgctggcggcgctgattcagatcaacgacacgtcgcgctgtcgaattcggctggcggcgccgaccggcaaagccgcagcgcgcctgacggaatcccttggggcggcgttaagaaaacttccgcttagcgatgagcaaaaagcgctggtgcccgccgatgccagtaccttgcatcgcctgctgggggcgcagcccggcagccaacgcatgcgctaccacgccgggaacccgctgcatctggatgtgctggtggtcgatgaagcctcaatgatcgacttaccgatgatgtcgcgtctgattgatgctttgccggaacatgggcgggtgatttttctcggtgaccgtgaccagcttgcctccgtggaagccggggcggtgcttggcgacatctgcgcctgggcgacatccggttataccgcggcgcgagcgcaagaactgtcgcgtttgaccggcgcaacggtgccggcgggggaggggcagatcgccggggcgttgcgcgatagcctgtgcctgttgcaaaaaagctaccgctttggcagccattccggtattggcagcctggcgcgggcggtcaatgccggtgcgcgcgcagaagtgaaagcaacattacgccagccgtttgaggatatcgttctgcagccgctcagcaccaccgaggagtatgaagcgatgctgatggcggcgcaggagggctacggccgttatctgcaactgcgccgcgagcaggccgcgccggaacagatgattgccgccttcggcgaatttcagctgctgtgcgcgctgcgtgaagggccttatggagtaagcggcgtgaatgaacagctggagcagatgcttcatcgtaagcgggcgattacgctaccgcgccattcacgctggtacgatggtcgtccggtgatgatttcccgtaacgatagcgcgctggggctgtttaacggtgatatcggtattgcgctggaaagggacggcgaacttcgcgtgtggttcccgatgccggatggcagcattaaatcggtgcagccaagccgcctgccggaacatgataccgcctgggcaatgacggtgcataagtcgcaagggtcggagttcgatcatgcggcgctgatcttgccttctcgtagcgtaccgctggtgacccgcgagctggtttataccgcgattacccgcgccaaacggcgcctgtcgctttacgccgacgagcaggtactggcgcaagccatcgtgacgcgcaccgaacggcgcagcggcctggcggagattttcgcgcatggcggaaagcccggataa

SEQ ID NO: 89226 - DNA, 3546 bp, Enterobacter aerogenes
atgaccgaaaccgctgagtctcttgacccactccgcttgcccctgacgggcgagcggctgatagaagcctccgcgggcaccggcaaaacctttaccatcgccgcgctatatctacggctgctgctggggctggggggggaatctgctttcccccggccggtcagcgtggaagagctgctggtggttacctttaccgaagcggcgacggaagagctgcgtgggcgcatccgcagcaatattcatgaactgcggatcgcctgtttgcgtgagagttccagtaatcctctgtatgcctctctgctcgcggaaatcgccgataaaaaccaggcggcgcaaacgttgatgctggcggagcggcagatggacgaggcggcagtctttaccatccacggcttctgtcagcggatgctaagcctcaacgccttcgaatccggcatgctgtttgaacagcaattgatcgaagacgaatcccgcctgcgttatcaggcctgcgccgacttctggcgtcgccactgttatccgctgccgcgcgatatcgccgcggtgatccatgaacagtggaaaggaccacgcgatctgctcaaggcgatcgaccgctggctgcagggcgaagcgccgcagctaaaatcgccgccgcccgcggaagagacgctggcaagccgccatcagcaaatcctggaacgtatcaatgcgctgaagcagcagtggcgggagcaggttagcgaaattgaaaacgtgctggaaaactcagggctcgatcgccgcaagttcaaccgcggcaaccagggcaagtggatcgaaaaggtcagcgcctgggcgcaggaagaaacgctgagttatcagttgcctgatgcgctggaaaaattctcgcaaccgttcctcattgagcgcaccaaagacggcggcgaaccaccgttgcatccgttattcagcgcggtagaggcgctgctcgcctcaccgcttaccttaaacgatctggttatcgccagggcgatggtggagatccgtgaagcggtcgcccgcgaaaagcggcgtcgaggcgaactgggctttgacgacatgctcagccgccttgacgacgcgctgcgcggcgacagcggcgaagcgttggccagcgctattcgtcagcgtttcccggtggcgatgatcgatgagttccaggataccgatccgcaacagtatcgtatcttccgccgcatttggcgtcgccagccggatacggccctgctgctgattggcgacccgaaacaggcgatttacgcctttcgcggcgccgatattttcacctatatgaaagcgcgtggcgatgtcgctgcccactatacgctggataccaactggcgttcggcgccaggcatggtacagagcgtaaatcgtctgttcggcctgagtgataatccattcatgttccgcgagatcccattcttgccggtgaagccagccgctaaaaatcagacgttgcgctttaccattgatgagaagccgatcccggcgatgaacatgtggttaatgcctggcgaagccgtcggttctggcgattatcagtcttttatggcgcaattgtgtgcgacgcagatccgcgactggctcagcgccggccagcaggggcgcgcgctgctgtggcgcgacgaaaaagccgagccggtgcgcgcctccgatatcaccgtgctggtgcgtaaccgtctcgaagcggcgctcattcgcgatgcgctgcagcttttgtcgatcccgtcggtctatctctcaaaccgcgacagcgtttttgaaaccccggaagcgcaggaattactgtgggttctacaggcggtactggcgccagagcgtgaaaacacgctacgcagcgcgctggcgacgtcgatgtttggccttaatgcgcaggatatcgaaaacctcaatcaggatgaacgtgcctgggatgcgctggtagaggagttcagtgaataccggcacatctggcgccagcgcggcgtgatgccaatgctgcgcgcgctgatgggggcgcgtcatattgccgaaaacctgctggcgacccacggcggcgaacgccgtttgaccgatattttgcatatcagcgaattgttacaagaggcggctaatcagttggagagcgagcacgcgctggtgcgctggctgacgcaacatatcgccgaaccggacagcaatgcttccagccagcagatgcgtctggagagcgataagcatctggtgcaaatcgtcactatccacaaatcaaaaggactggaatattcgctggtctggctgccctttatcgcgcgctttcgcaaacaggatcaggcgttctatcacgaccgcgattcctttgctgcggtactcgacctcggagagggggagaatagccttgagctggcggaagccgagcgcctggcggaggatttacgcctgttgtacgtcgccctgacccgcgcggtgtggcactgcagtctcggggtcgcgccgttaagtacccgccgtagcgataaacctggcaacagcgattttcatcacagcgccctcggccgtctgctgcaggacggcgagccgatggacgcggcgggattgaccgcgcggctacaggcattatgccacgatgatattgcgctatgtattcccgataccatggaccagacaccgtggcaggcgccggaaaacgcgctaccgtcgctttcggcgcggacggttgaacgccaggtgagtgacgactggcgggtgaccagttattccggcctgcagcaacatggttccagcgccggtcaggagctgctaccgcgtctcgatatcgacgccgcgggcgttggcgaggtggcggaagagccgcagctcacgcctcatcagttcccacgcggcgcgtcgccggggactttcctgcatagcctgtttgaggatctcgatttcagtcagccggtaccggttgactggatggcgcaaaaactacagttgcacggttttggcgaagagtgggcgccggtgttgagcgaatggctggacggcgtgctgcgaacacgcctgccgggggctgaaatcgccctgaatcagctgagcgtgcgggataaacaggtggaaatggccttctatctaccgattgaacaaccgctggatccgctgcagctggacgcgctgatccgccgctatgatccgctgtcggctgataccccggcgctcgatttccgccaggtccgcggcatgctgaaagggtttatcgatctggtatttcgtcatgatgggcattattacctgctggactacaaatctaactggctgggcgaagatcgcgaagcctatacccagcaggcgatgatccaggcgatgcgcctgcatcgttatgatctgcagtaccagctgtatagcctggcgctgcaccgttatctgcgtcaccgtattgccgattatcactacgagcggcactttggcggcgtcatttatctctttttacgcggcatggacgggcaggaaggcgggcaggggatcttcaccacccgcccggcgcagccgctgattgacggcctcgacgcgctatttgccggtgttgcccaggaggtggactcatga

SEQ ID NO: 89227 - DNA, 2886 bp, Enterobacter aerogenes
atgccccgcagtttatggttcaaagttcttgttgtagtggtcgccctttgggcgccgttaagtcaggcagacaccggatggcaaccgattcaggaaaccatccgtaaaagcgaaaaagatccccgtcactatcaggctattcgcctgcaaaacggcatggtcgtgctgctggtatccgatccgcaggcggtaaaatcgctgtcggcgctggtggtgccggtgggttcattacaggatccggccgaccatcaagggctggcgcactatctcgagcatatgaccttaatgggctcgcagaagtacccgcagcctgacagtcttgctgaattcctcaaaatgcacggcggcagtcataatgccagcacggcgccgtatcgcactgcgttctaccttgaagtggaaaacgatgctctcaacggcgctgtcgatcggctggccgatgccattgccgcgccgctgctggataaaaaatatgccgaacgcgaacgtaacgcggtcaacgccgaattgactatggcgcgtacccgggacgggatgcgcatggcgcaggtgagcgccgaaaccatcaaccctgcgcatccggcttcacaattctccggcggtaacctcgatacgctgagcgataagcctggcagcccggtgcttgatgcgctacacgctttccgcgaccgctggtactcggcaaacctgatgaaggcggttatctacagtaataagccgctgcctgagttggcaagcattgccgccgcgacctacgggcgggtgcctaatcatgacatcagcaagccggagattaccgtaccggtcgtgaccgatgcgcagaagggcattgtgattcactacgtgccggcgatgccgcgtaaggtgctgcgcgttgaattccgcatcgataacaacagcgctcagttccgcagcaagaccgatgagctggtgacctatatgattggcaaccgcagccccggcaccttatccgactggctgcagaagcaggggctggcggaagggattcgcgcggattccgatccggcggtcaacggtaatagcggcgtgctggcgatctccgctaccctcaccgataaaggcctggcgcaccgcgatgaagttaccgccgctattttcagctacctgaatttgctgcgtacacagggtattgataagcgctactttgatgaattagcccacgtgctggatctcgatttccgttatccgtcgattaaccgcgatatggattatgtggagtggttggccgataccatgattcgcgtgccggtagagcacgtactggacgtggttaatatcgccgaccgctatgatgcccaggcgatcaaagaccgtctggcgatgatgaccccgcaaaatgcgcgtatctggtacatcagcccgaatgagccgcacaacaaaaccgcttatttcgtcaacgcgccgtaccaggtcgataaaattagcgcccggaccttcaccgactggcagcaaaaatctgcggccatcaagctgcagctgccgacgctgaacccgtatattccggatgatttcacgctgattaagagcgataaggcctacccgcatccggagcttatcgtcgatgagccgacgctgcgcgtggtgtatgcccccagccagtactttgccagtgaaccgaaggccgacgtctcgctggtgctacgtaacccgcaggcgatggacagcgcgcgccgtcaggtgatgttcgcgttgaatgattacctggccggtatcgccctcgatcagcttagcaatcaggccgcggtaggcgggataagcttctcgaccggcgccaacaacggtctgatggttaatgccaacggctatacccagcgtctgccgcagctctttaccgcgctgctggacggctactttagctatacgccgaccgaagagcagcttgagcaagctaagtcctggtatgcccagatgatggattcggcggacaaaggcaaagcctatgaccaggcgattatgccgattcagatgctgtcgcaggtaccctattttgagcgtaaaacacgtcgcgatttactaccgtcaatcaccctgaaagaggtgatcaactaccgcgataacctgaaagcaagagggcggccggagctgctggtcatcggtaacatgagcgccagacagtccaccgatctagcccgccagatccaaaaacagcttggcgccgatggcaacgagtggtgtcgcaacaaagacgtgctgatcgacagcaaacagctggcgatgtttgagaaagcaggcagcagcaccgactccgcgctggcggcggttttcgcgccgccaaatgtcgatgaatacagcagcatggccgccagttcgctgttagggcagattattcagccctggttctacaaccagttacgtactgaagaacaactcggctatgcggtattcgccttctcaatgaatgtgggccgccagtgggggatgggcttcctgctacagagcagcgataaacagccggccttcctctggcagcgcttccaggccttcttcccgacggcggaagccaaactgcgggcgatgaaaccggaagagtttgcccagatccagcaggcggcgattagccagatgctgcaggcgccgcaaacgttgagcgaagaagcatcaaagctgagcaaagatttcgatcgcggtaatatgcgcttcgattcacgtgataaagtagtggctcagatgaaactgctgacgccgcaaaaacttgccgacttcttccatcagacggtggtggatccgcaaggcatggcactgttatcccaggtttccggcagccagaacggcaagacggaatacgccgcccctgaaggcggtaaggtatgggaaagcgtcagcgcattgcaaaaatccttacccctgatgcgagagaatgaatga

SEQ ID NO: 89228 - DNA, 3372 bp, Enterobacter aerogenes
atgttaagggtgtaccactcaaaccgtctggatgtgcttgaagcgttgatggagtttatcgtcgagcgccagcggctggatgaccctttcatgccggaaatggtgctggtgcaaagtaccggtatggcgcaatggctacaaatgacgctggcaaagcgcttcggcattgcggcgaatatcgagtttccgctgccggccagctttatctgggatatgtttgttcgcgtgctagacgatattcccggcgagagcgccttcagtaaacagagcatgagctggaagctgatgaccctgctgccgcagtatctcgacgatgacgccttcacattgctgcgccactatctgagcgatgacagcgacaagcgtaagctattccagctagccgcgcgggtagccgatctgtatgaccagtatctggtctatcgcccggagtggctgatgcgctgggaggccgatgaacgggttgacgggctgggcgacgctcagcagtggcaggctccgctgtggaaagcgttagtcgaatacaccgcggagcttgggcaaccgctgtggcaccgcgctaatctgtaccagcgctttatcagcgcgctggaaaatgctgaccagccgccagccgggctgccgtcgcgggtctttatctgcggcatctccgcgctgccgccggtgtatttgcaggccctgcaggcgctgggcaagcacgtcgatgtctatgtactcttcactaacccctgtcgctactactggggcgatattaaagatccggcgtttcttgccaaactgatgtcgcgccagcgccgccaccaccgcgaggcgcgcgagctgccgctgttccgcgacactgaacaggcgccggggttgtttaatgatgatggcgagcaggatgttggcaacccgctgctggcctcgtggggcaagctcgggcgcgattatatctatctgctggccgggctggagcgctatgaagagctggacgcctttgtcgatatcgcccccgataacctgctgcataaccttcaggccgatattctggatctgcgcaacgccgcggtggcagggcgcaccgcgcaagagttcgccagcagtaagagcaagcgtccgctggcgactgacgaccgcagcctggctatccacgtctgccatagcccgcaacgcgaagtggaagtgctgcatgaccggctgctggcgatgctggaagaagacccggagctgacgccgcgcgatattatcgtcatggtcgccgatatcgacagctacagtccctatattcaggcggtattcggcgcagcgcgcggcgaacgctggctgccgtgggcgatttccgaccgtcgggcgcgggaatcgcacccggcgctacaggcgtttatcacgttgctttctctgccggacagccgcttcgccagcgaagatgtgctggcgctgctggatgtgccggtgctggcggcgcgcttcaatatcaatgaagaggggctgcgctacctgcgccagtgggtcaatgaatccggcgtacgttggggtatggatgacgacaacgtgcgcgaaatggatctcccggcgaccggtcagcacacctggcgtttcggtttaacacgtatgctgctgggatatgcgatggacagcagccagggcgagtggcagtcggtgctgccctatgatgaatccagcgggctgattgccgaactggtggggaatctcgcttcgctgctgatgcagctcaatctgtggcgccgcggtctggcacaggatcgcccgctgacagagtggctgccggtgtgccgcgatctgctcacggatttcttcctgccagacagtgaaaccgaagcggcgctggcgctgattgaacagcaatggcaagccatcatcgatggcgggttggatgcgcagtacggggctgccgtgccgctatcgctgctgcgcgatgagctggcgcagcgcctcgatcagcagcgcatcagccagcgtttcctggccgggccggtgaatatctgcaccctgatgccgatgcgttctattcccttcaaagttgtctgcctgctggggatgaacgacggcgtctacccacgcaccctcgcgccgctgggtttcgatttaatgagccaaaaaccgcagcgcggggaccgtagccgtcgcgacgacgaccgctatctgttcctggaagcgctgatgtcggccgaacagaagctatacatcagctatatcggccgctctattcaggataatagtgagcgttatccttcggtgctggtacaggaactggcggactatatcggtcagagccactgccttgaaggcgatgaagcgctggactgcgatgccagcgaacgccgcgttaaagagcacattacccatctgcatacgcgcatgccttttgatgccgccaattacctgccggatgaagatcagagctatgcaagagagtggctggccgccgccagccagcagggagaggcgcatagtgaatttatccagccgcttgcgccgctcgatatcgacacgctgccgttcgaacagctgttacgcttttggcagcatccggtgcgcgctttcttccagcagcgtctgcgggtgaatttccgctctgaagagagcgagatccccgaagatgagcctttcgtgcttgaagggctaagccgttaccagttgaaccaacagttgctgaatacgctgattgaacagcaggatgcgtcagcgatgtatcgtcgttttcgtgcggcgggtgagctgccttttggcgcgtttggcgaactggcatgggaggcgcagcgtcaggaaatgcagaacctggctgagcgggttatcgccagtcgtcagcccgcgcaaagtatggagatcgacctgcagtgcaacggtatcaatctcaccggctggctacagcaggtacagccggatgggttattgcgctggcgtccatcgctgctgagcgtctctcagggcgtgcaactttggctggaacatcttgtctattgtgctagcggcggtctcggcgaaagtcgcttgttcgtgcgcaaggaaggcgaatggcgtttcccgccgctggcggcggagcaggcgcaggcgtatctgaatgagctggtagaaggctacctgcaggggatgtcaaaaccgctactgctgttgccggaaagcggcggcgcgtggctaaaagcctgttatgacgcggaaaaggatgtcatgttaatggatgacgatacgcaacaaaaagcgcgtagcaagttccttcaggcctacgaaggtaatatggtggtgagcggcgaaggtgccgatatctggtaccagcgcctgtggcgcacccttgagcctgcgtactatgaagaaattatcgcgcaggcgcagcgttatctgttgccgatatttcgtttccatcagtccgaataa

SEQ ID NO: 89229 - DNA, 324 bp, Enterobacter aerogenes
atgcctgatgccgtagcgcgccagcgcggttttagcctggcggagacattattagcgatggcgctgttaatcatgaccatcgcggcgcttggcggttatcaccgcgggctggccagcggcgccgctcaattgaacgtctaccgccagcagtggcgggaggcgtggagctttagccagctcattcccccggcacagcccgcgcaagggcaaataagccgcttgcagacatccaggcaaagttgtgtcagcatcacggtaacgatcaccatgcccgccgctaagcgggtgcagatgaaccggctacattgtccggtaaatcagtag

SEQ ID NO: 89230 - DNA, 375 bp, Enterobacter aerogenes
atggtgctgctgctactggcgctgggcagtctgctgttgcaggggatgaatcagcagcagcgatctctgctggcgcaggtgagcgccgaaacccaggcgattcgcgatacggccgccgcgcagtcggcgctgcaatggggcaaaggggtgaactggccgctgcagagcgatgtggtgtgtcaacaggaaaacagccaacgctggcgagcgtgcctgcggctttttaatgatggccgtgcgctgcttatcgccggcagcggcacagtacagctgtggcagtcagcatgggttgaacagggcgtgctgcgctatttagcgcatggatggagcgatttttgcccgttaaaggagagtgcgttatgcctgatgccgtag

SEQ ID NO: 89231 - DNA, 564 bp, Enterobacter aerogenes
atgccagtaacggcgcgtggtttttcgctcattgaaacgctgattgccatggcgattggcgcggtattactgctcggagccgctcgtttccttccggcgctacagcgccaggttcttcgccaaacgcagcagcaggcgctggaaaatgagctatggcagcgggtctatgcgttagccaaacatttgcagcgcgccggatattgcgcaggtcaatgtcatggtcaggcgctggtgattgccagcggcgggcagtgcgtcatcgttcgctgggatggcaacagcaacggcatttgggaactggcgccggaggccgatgccgattccactggttttcgcctgcgcgacggagcgctggaaacgcggcgcggcgtcgctgactgcggcggtaaaaattgggagaaaatgaccaatcccgccgctatcacggtcacgcgttttcacgttgagcggcaggcgataagcgggttttctcctgaacttatcgttaccctgggggcgcaggcgcaatcggactcgcgtatttctgctgaggcgcaatatcgggtgatggggttcaacctgtga

SEQ ID NO: 89232 - DNA, 465 bp, Enterobacter aerogenes
atgaacagacagcatggctacaccctaattgaaatgctggtcaccatgatgctggtgatcatcctcagcgccagcggtatgtacggctggcagcgctggcaacagcaacagcgcctgtggcaggtcgcctgtcaggtgcgcgattatctcgcgctgctgcgcgatgacgccaactggcacaaccgcgagcgcgtcattcgcgtcggacaatcgcccgccggctggtgtctgagcgcaagcggcgtggaggctgactgtcacgcgaaaacaccttttaccctgcagccgctatggccggggattacgctgcaacatttgacggcgggcattggtttttacggcctgcgcaacagcgcctgggccggtcatatcctgctgcaaagcgatggcggagcgtggcggattgttgtctctaactgggggcgcgtacgcctgtgtcgggaaggggaggaattatgccagtaa

SEQ ID NO: 89233 - DNA, 795 bp, Enterobacter aerogenes
atgaaacagtatcttgatttgatgcagaaagtgctcgccgagggcacgcaaaaaaatgaccgcaccggcactggcaccatctctatcttcggccaccagatgcgttttaacctgcaggaaggcttcccgctggtgaccaccaagcgctgtcatttacgctccatcatccatgaactgctgtggttcctgcagggcgacaccaacattgcctatctgcacgaaaataacgtcacaatctgggatgagtgggcggatgagaatggcgatctcgggccggtctacggcaaacagtggcgttcctggcccgcgccggatggccgccatatcgaccagatcagcacggtcatggaacagctgaaaaacgaccccgactctcgccgtatcatcgtgtcggcatggaacgtcggtgagctggataaaatggcgctggcgccgtgccacgcgttcttccagttctacgtcgccgacggcaagctctcctgccagctgtatcagcgctcctgcgacgtgttcctcggcctgccgttcaacatcgccagctatgcgctgctggtgcatatggtggcgcagcagtgcgatctgcaagtgggcgattttgtctggaccggcggcgacactcacctgtacagcaatcacctggagcagaccaacctgcagctgagccgcgaaccgcgtccgctgccgaagctggtcattaagcgcaaaccggcgtcgattttcgactaccgttttgaagacttcgaaattgaaggttatgacccgcatccgggtattaaagcgcctgtggcgatttaa

SEQ ID NO: 89234 - DNA, 876 bp, Enterobacter aerogenes
atgaatagtggctacctgcattttccggagttcgatccggtaatattttccattggaccggtctctctccactggtacggcttaatgtacctggttggtttcgtctttgcgatgtggctggccacccgtcgggccaatcgtccgggcagcggctggacgaaaaatgaagtggaaaacctgctctacgcggggttcctcggcgtattcctcggcggccgtatcggctatgtgatgttctacaacctgccggtcttccttagcgacccgctatatctgttccgcgtctgggatggcggcatgtcgttccacggcggcctgatcggcgtgattctggtgatgattatcttcgccaaacgcaccaaacgcaccttcttccaggtctccgatttcatcgcgccgctgatcccgtttggcctcggcgccgggcgtctgggcaactttatcaacggtgaactgtggggccgcgttgacccgaacttccattacgcgatgattttcccgggctcgcgcgctgaggacctggcgctgctgccgtcgcacccggagtggcaatcattattcgatacctacggcgcgctgccgcgtcacgcctcgcagctttatgagctggcgctggaaggcgtggtgctgttcctgatcctgaacctgtttatccgtaaaccgcgcccgaccggttcggtttccggcctgttcctgattggctacggcctgttccgcattatcgtggaattcttccgtcagccggacgcgcagtttaccggcggctgggtacagtacatcagtatggggcagattctttcgatcccgatggtgcttgcgggtatcattatgatggtttgggcttatcgccaccgtccgcagcaacaaaactcttga

SEQ ID NO: 89235 - DNA, 2247 bp, Enterobacter aerogenes
atgctcactcggttgcgagaaatagtcgagaaggtcgccagcgcgccgcgtttaaacgaggcgcttgatatcctggtgacggatgtctgcaaagcgatggaaacggaagtttgttcggtttacctggctgacaacgatcgacgctgctattacctgatggccacgcgcgggctgaaaaaaccccgtgggcgcacagtcgcactcgcatttgatgaaggtcttgtcggcctggtggggcggctggccgaacctatcaacctcgccgatgcgcagaagcatcccagctttaaatacatcccggctgttaaggaggagcgttttcgcgccttccttggtgtgccgatcatccagcggcgtcagctgctgggtgtgctggtagtccagcagcgtgagctgcgccagttcgatgaaagcgaagagtccttccttgtcaccctcgccacccagatggccgcgattctctcccaatcacagttaaatgcgctgtttgggcagtatcgtcagacccgcatccgcgcgctgccggcatcatccggggtggcgattgccgaaggctggatggatgccagcctgccgttgatggagcaggtctacgaggcctcgacgctggacaccgcttccgagcgcgaacgtctcaccggcgcgctggaagaggcggcgaatgagtttcgtcgctacagcaagcgctacgccgccggggcgcaaaaagagacggcggctatttttgacctctattcgcacctgctatccgatgcgcgcctgcgccgtgagctattcgatgaagtcgacaagggctccgtcgccgaatgggcggtgaaaaaggtcattgaaaaatttgccgagcagtttgccgccctcagcgatggctatctgaaagagcgggcgggggatttacgtactctcgggcagcggctgttgttccatctcgacgacaccacccagggaccgaatacctggcctgagcgcattatcctggtggccgacgaactgtcggcaaccacgcttgcggaagtgccgcaggaccgcttggtcggggtggtggtgcgcgacggcgcggccaactcccacgcggcgatcatggtgcgcgcgttgggtattccgacggtaatgggcgccgatattcagccgtcgctgctgcatggccatatgctgatcgttgatggttatcgcggcgatctattggtcgatcccgaaccggtgctgctgcaggaatatcagcggttaatcagcgaagagaacgaactgagccggctggcggaagacgatctcgaacgcgcttccgagctgaaaagcggcgaacgggtaaaagtgatgctcaacgccggcctgagcccggagcatgaagagaaactcggcagctttatcgatggtatcgggctttaccgcaccgaaattccgtttatgttgcaaagcggcttcccctcagaagaggagcaggtcgcccagtatcagggcatgctgcagatgtttaacagcaagcctgtaaccctgcgtacgctggatattggcgccgataagcaactgccgtatatgccgatcagcgaagagaacccgtgccttggctggcgcgggatccgtattacgctcgatcagccggagatcttcttgatccaggtgcgcgcgatgctgcgcgccaatgccgccaccggcaacctcagcatactgctgccgatggtcaccagcctcgaagaggttgacgaagcccgccgcctgattgagcgcgccagccgtgaagtcgaagagatgattggttacgctattccgcgcccgcgccttggggtgatgctggaagtgccgtcaatggtctttatgctgccgcagttggcaaaccgcatcgactttatctcggtcggcaccaatgacctgacgcaatacatcctcgcggtcgaccgcaataatacccgcgtcgccaatatgtacgactgcctgcatcctgcggtattgcgggcgctggcaatgatcgctcatgacgccgagcgttttggtatcgatctgcgcctgtgcggcgaaatggccggcgacccgatgtgcgtcaccatcctggtaggactcggctatcgccatttgtcgatgaacggccgttcggtcgcgcgcgtgaaatatctgctacgccgtatcgatattgaagaagcgcaggagctgtcacggcgcagtctggaagcgcagatgaccaccgaagtgcgccaccaggtggcggcgtttatggagcgccgcggtctcggcggcctgatccgcggcggacggtaa

SEQ ID NO: 89236 - DNA, 531 bp, Enterobacter aerogenes
gtgattgatgacgatggctaccgcccaaatgtcggcattgtaatctgtaaccgccagggccaggtgatgtgggcccggcgctatggtcagcactcgtggcagttcccgcaagggggcattaatccaggcgagtccgccgagcaggcaatgtatcgggaattgttcgaagaggttgggttaagccgcaaagatgtgcggatcctggcctcaacccgtaactggctgcgttacaagctgcctaaacgtttggtgcgttgggacacaaagccggtttgtatcggtcagaagcagaagtggtttcttctacaactggtcggcagcgatacggctattaatatgcaaaccagcagtacacctgagtttgatggctggcgatgggtaagttactggtacccggttcgtcaggtggtgtcgtttaagcgcgacgtttaccgccgggtgatgaaagagttcgcgggtgtgacaatgtcgctcgctgaaaccacaccaaagccacaaagcgcgcctgcttatcgacgtaaaagaggttaa

SEQ ID NO: 89237 - DNA, 696 bp, Enterobacter aerogenes
atgccagccatcgctccgctcaccgctccgccgcaaagtcaggagcaacttcttgctcaggcccagcggctggcgggttattcgctgggtgaactggcggcgctggcgggggtccccattccccgcgatttgaaacgcgataaaggctggattggcattctgctggaaatttggctgggcgccagcgccgggagcaaaccggagcaggatttcgctgccttaggcgtggagctgaaaaccatccccattgaccgtcagggccgtcctctggagaccacatttgtttgcgtggcgccgctaaccggtaatagcggcgtgacctgggaaagcagccacgtgcggcataagctacagcgcgtattgtggatcccggtagaaggcgaacgcgagatcccgctcgcgcaacgccgcgtcggcgcgccgctattatggacgccagacgaggaagaagaacgccagctgcgcatggactgggaagagttgatggatttgatcgtactcggccaggttgaacgcatcaccgcccgccacggcgaggtattgcaactgcgccctaaagcggccaacagcaaggcgctaacggaagcgatcggcgcccacggcgagccgatcctcactttgccgcgcggcttttatctgaaaaagaactttaccgccgcactgctggcgcgtcattttctattagggcatgaataa

SEQ ID NO: 89238 - DNA, 714 bp, Enterobacter aerogenes
atgttatttgcatggataaccgatcctaacgcctggctggcgctcggcacgctgacgctgctggagatcgttctcgggatcgataatattatttttctctctctggttgtcgctaagttgcccaccgcccaacgcgcccatgcgcggcgtatcgggttaatgggagccatgctgatgcgtctcggcctgctggcgtctatcgcctgggtcgttaagctcaccaatccactcttcaccgtattcagtcaggagatctcatttcgcgacctgatcctgctgctcggtggcctgttcctgatctggaaagcgagtaaagagatccacgaatcgattgaaggcgaggaagaaggtcttaaaagcaacgtccactccttctttggcgccatcgtgcagatcatgctgctggatatcatcttcagccttgattcagtcatcaccgccgtcggcctctccgatcatctgttcattatgatggccgcggtggtgattgcggttggggtgatgatgtttgccgcacgtccgatcggcgacttcgttgaccgtcacccgtcggtcaaaatgttggcgttgtcgtttctgatcctggtcggtttcaccctgatgctggagagcttcgatgtgcatgtgccgaaaggttacatctacttcgcgatgttcttctccattgcggtcgaaaccctcaacctgatgcgcaataagaaaaacccgctgtaa

SEQ ID NO: 89239 - DNA, 219 bp, Enterobacter aerogenes
atgaaaaaatgggcagtattgatttccgccgtaggactggcgttctcggtttccggttgcagcagcgattatgtcatggcgacaaaagacggacgtatgattcttaccgacggtaaaccggcggttgacgatgacaccggtttgataagctacgaagatcagcaaggcaataaaatgcagatcaaccgcgacgacgtgtcacaaattattaagcgttaa

SEQ ID NO: 89240 - DNA, 1041 bp, Enterobacter aerogenes
atgcagtatcaccgtatcccacacagttctcttgaaatcagcacgctggggctgggcacaatgacgtttggtgaacaaaatagcgaggccgacgctcatgaacagctcgactacgccgtaagtcagggaattaacctgattgatgtcgccgaaatgtatcctgtcccgccgcgcccggaaacccagggtctgaccgaaacctacgtcggcaactggctggcaaaacgcggcaaccgcgaaaagctggttatcgcctctatagtcagcggcccggcgcgcaataacgacagcagcattcgcccgaaccacgcgctggatcgcaaaaacattcgcgacgcgctgcacgacagcctgaagcgtctgcaaaccgattatctcgacctctatcaggtacattggccacagcgccagaccaactgtttcggcaagctgggctatacctggagcgactccgcgccggtggtcaccctgctcgatacgctggaagccctcaccgaattccagcgcgccgggaaaattcgctatatcggcgtctctaacgaaaccgcttttggcgtcatgcgctatctgcatctggccgataagcacgacctgccgcgcatcgtcacgattcaaaacccgtacagcctgcttaaccgcagctacgaagtggggctggcggaagtgagccaatatgagggcgtagagctgctggcgtattcatgcctggcgttcggtacgctaaccggtaagtacctcaacggcgcgcagccggctggcgcacgcaatacgctattcagccgctttacccgctacagcggcgagcaggcgcagaaagcggtggccgcttatgtggacattgccaaacgccacaatctcgatccggcgcaaatggcgttggcctttgtgcgccgccagccgtttgtcgccagcaccctgctcggggccacgaccatggagcagctcaagaccaacgtcgaaagtttgcatcttgagctgagcgaagaggtgttagcggagattgaagcggtgcataaggtatatacctacccagcgccttaa

SEQ ID NO: 89241 - DNA, 1194 bp, Enterobacter aerogenes
atgagtgagtcagtgcacactaacgcttcactgtactcgaaagggatgatggcggtgatctgcgcccagttcctgtcggccttcggcgataatgcgctgctgttcgccaccctggcgctgatgaaacagctctactatccggagtggagccagccggtgttgcagatgttgtttgtgggcgcttacattctctttgcgccgtttgtcggtcagtttgccgatagcttcgccaaaggccgggtgatgatggtcgctaacggcctgaagctgctcggcgccgggtgtatttgctttggcgtcaatccgtttatcggttatacgctggtgggtgttggcgcggcggcctattcgccggcgaaatacggtattctgggcgaactgaccaccggcgataagttagtgaaggctaacggactgatggagtcgtcgaccatcgcggcgatcctgctagggtcgatggcgggcggcattcttgcggactggcacgtgctggcggcgcttatcgtttgtgcgctggtttatggcggcgcggtggtcgctaacctgtggatcccgaaactaccggcggctcgtcctgggcagtcgtggcgtttcagtccgatgacccatagcttcttcagcgcctgtaaaacgctgtggcgtaatagcgaaacgcgtttctcgttgatgggcaccagcttgttttggggcgcgggggtgacgctgcgcttcctgctggtgatttgggtgcccgtagcgcttgggatcaccagcaacgcgatgccgacctacctcaatgcgatggtcgccgtcgggattgtggttggcgctggcgcggcggcgaagctggtaacgctggaaaccgtctcgcgctgtatgcccgccgggatattgattggcgtcgcggtgattgccttcgcggtgcagcagtcgctattgccagcatttggcctgctgctactgctcggtgtgtgcggcggcttctttattgtgccgctgaacgcgctgctgcaggagcgcgggaaacataccgttggcgcaggtaacgccattgcggtacagaacctcggcgaaaacgtggcgatgctgctcatgctggggctgtactcgctggcggtcagcgttgggatcccgccggttggcgtggggatagggtttggtgcggtctttgcgctagccatcgccgcattgtggtggtggggacggcgtaaataa

SEQ ID NO: 89242 - DNA, 2160 bp, Enterobacter aerogenes
atgctgttgggattttttcgattactgttcaaaggattgtaccgggtgcgattgaccggagacactcaggcgctttatcaggaaaaagtattaataacgcctaatcatgtctcatttctcgacggtattttactggcgctctttttgcctgtgcggccggtgtttgcggtctatacctcgattagccagcgctggtttatgcgggcgctgacgccgcttatcgactttgttccgctggaccccaccaaaccgatgtcaattaagcatctggtgcgcttgattgagcagggacgcccggtggttatcttcccggaagggcgtatttcggtcagcggttcgctgatgaaaatctatgacggcgcggcgttcgtggcggcgaagtcgaaagcgaccattgtgccgctgcgaattgaaggcgccgaacttacgccattcagccgcctgaaggggctggtaaaacgccgcctgttcccgcgtattcagctccatttactgccgccgacgcatctgccgatgccggaggcgccgcgcgcccgcgatcggcgaaaaatcgctggcgaaatgctgcaccagatcatgatggaagcgcggatggcggtgcgcccgcgtgaaacgttatatgagtcgctactggcggcgcaggaccgctttggcgcgcgcaaaaactgcgtggaagatattaatttccagccggatacctaccgtaaactgttgaccaaaacgctgttcgtcgcgcgtattctggaaaaatacagcgcgcagggcgagaaaatcggcctgatgctgcctaacgccggtatcagcgcggcggtgattttcggcgcgattgcccgcgggcgaatcccggcaatgatgaactataccgccggcgtcaaaggactcagcagcgcgattaccgccgcggaaatcaaaaccatttttacctcccgtaccttcctcgataagggcaaactctggcacctgccggagcagttgactcaggtgcgctgggtttttctggaagatctgaaaggcgatgtcaccactgccgacaagctgtggatatttggtcatctgctggcgccgcgtctggcgcaggtcaagcagcagccggaagatgcggcgatgatcctctttacctccggctcggaggggaatccaaaaggggtggtgcatagccataaaagcctgctggctaacgtcgaacagattaaaaccatcgccgattttaccgccaacgaccgctttatgtcggcgctgccgctgttccactccttcggcctgacggtcggcctgctgacgccgctattcaccggcgcggaagtattcctctatccaagcccgctgcactatcgggtggtgccggagctggtttacgatcgtaactgtaccgttttgttcggcacctcaaccttcctcgccaactatgcccgctttgccaacccgtatgatttttatcgcctgcgctatgtggtggcaggggcggaaaaactgcaggacagcaccaagcagctgtggcaggacaaatttggtctgcgcatccttgaaggctacggcgtgaccgaatgcgcgccggtggtctccatcaacgtcccgatggcggcgaaagtcggcaccgtcgggcgcattcttccgggaatggatgcccgattgctggcgatgccgggcatcgaacagggaggccgactgcagttaaaagggcctaacatcatgaaaggctatctgcgggtagaaaaccccggcgtgctggaagcgccgacggcggaaaaccagtacggtgaagtggaaagcggctggtacgacaccggcgatatcgtcgtctttgacgaacagggctacgtccgcattcagggccgcgccaagcgcttcgccaaaatcgccggcgagatggtctcgctggagatggtcgagcaggtcgctttggcggtctcgccagacaaaatgcacgccacggccattaagcaggacgccagcaaaggcgaggcgctggtgctgtttaccaccgataatgaactcaatcgcgaaaagctgttgcgctacgcacgtgaacatggcgtaccggaactggcggtgccgcgcgatattcgttggctgaaacagctgccggtactgggcagcggcaagccggactttgtcaccctgaaaggcatggtagaagaggcggaacattcaaatgagtga

SEQ ID NO: 89243 - DNA, 1017 bp, Enterobacter aerogenes
atggcgacaattaaggatgtagcccgactcgcaggagtgtccgtcgctaccgtctcacgcgttatcaacaactcgccaaaagcgagtgaagcctctcgtcagtcggtgacggcggcgatggaaaccctgaactaccaccccaatgccaacgcccgcgcgctggcgcagcagtcaacggaaaccatcggcctggtggtgggcgacgtttccgatcccttcttcggcgcgatggtcaaagccgtcgagcaggtggcctacagcaccggtaattttttgcttatcggcaacggctaccacaacgtgcaaaaggaacgtcaggcgattgaacagctaatccgtcaccgctgcgcggcgctggtggtgcacgccaaaatgatccccgacgatgagctggcggggctgatgaaacagatccccggcatggtgttgattaaccgcatcgtgccgggtttcgagcaacgcagcgtggcgctcgatgaccgctacggcgcctggctggcgacgcgccatctgattcagcagggccacagccgcattggctatatctgctccaaccacgcgatttccgatgctgaagaccggctgcagggttattacgatgccctgaaggagagcggcctggccgtcaatgaccggctggtcaccttcgccgagcctgacgaaagcggcggcgagctggcgatgaccgagctattaggccgcggcagaaactttaccgccgtcgcctgttacaacgattcaatggccgccggcgcgatgggggtgctcaacgataacggtatcgaggtgccgcaggaaatttcgctgattggcttcgatgatgtgctgatttcgcgctacgtgcgcccccgcctgaccaccgtacgttatccgatcgtcaccatggcgacccaggcggcggagctggccctggcactagcagaacagcgtccggcgccggaaatcactcacctcttcagcccgacgctggtgcgccgtcactcggtgataacgcccgcggaaagtgacaagtcatag

SEQ ID NO: 89244 - DNA, 609 bp, Enterobacter aerogenes
atgagcctgacgacggcaaagactatcgcgatcacgctttttgcggaaatcctgttgaaggcattttccgaccccggatgcgcgggcgcgagcggcgcgctagaattcatcgattcacagggggaaaaaatgcagattcaaccgttgtacgccgcgccgcagcatgggccgcaggtggcggagtggctatggcaggcttttgccggcgatgccttaccgcaggcgttttttagcagtattgttgaacatagccaaacgccgggggcgctgccgctgacctttatcgccaccgatggcgaggcgctgctgggtaccgtggggctgtggcgttgcgatttgataagccgtcaggatctgtttccatggatggcggcgctctttgtcgccgaaacggcgcgcgggcaggggctggccgggaagctgcagcggcacgtcatcgactatgcccgccagtgcggttatccgcagctttatctctattccgcctgccgcgatttttatgagcgctttggctggcgctatatcggcgagggcctggattacccggccaccgccgtgagcctgtaccgctatgacttgtcactttccgcgggcgttatcaccgagtga

SEQ ID NO: 89245 - DNA, 1011 bp, Enterobacter aerogenes
atggcaacaatgctggatgtctcaatacgcgcaggcgtctcgaaagcgacggtttcccgcgtgttgaacggcacaggtcaggtaaaagagagtacccgccaacaggtattcaaagcgatggaagagctgggctaccggcctaattttctcgcccgctcgctggcgaatcgcaccagcaacagcattggactggtggtatcgacattcgacggtttttactttggccgcttgctgcaacaggcgtcgcgccaaacggaagcctggggcaaacagcttatcgtcaccgacggccacgatgcgcccgaacgagaagaagaagcggtacaaatgttggccgaccgtcagtgtgacgccatcgtgctctacacccgccatatgagcgaacagaaaatcatgtcgcttatcgagaccattgaaacgccgctggtggtgattaaccgcgacgttagccaggcgcgggaacgctgcgtgttcttcgaacagcaggaagcggcgtttcaggccgtcgactatctgatctcccaggggcatcgcgatatcgcctgcctgaccgtaccaatgcataccccaacgggtaaagcgcgcctggcgggctaccgcagcgccctggaaaagcacggaattgggtgggaaccggcgcgggtcaagtacggcgattcaacgatgacccgcggttatgagctgtgtcgggaattattagaagagaaaacgccgtttagcgcgctgttctcctgtaacgatgatatggcgttgggcgcctcgaaagcgctgcatcaggcggggctgcgcattccgcaggacgtatcgctcttcggctttgacgacgctcctagcgcgaagtggctggagcccggattatcaacggtctacctgccgatcgacaatatgatcaccaccgccatcgaccaggcgattaagctcgccaacgaacagccgatcgaaaccatcccgccattcaccggtacgctggtactgcgtgaatcggtgacgacggggccattctttaaataa

SEQ ID NO: 89246 - DNA, 1263 bp, Enterobacter aerogenes
atgccacgctcgctgaacgccaccgataccgatctgaccgccgacaatctactgcgcctgcccgctgagttcggctgcccggtatgggtctatgacgcgcagattatccgccgccagattgcccaacttagccagtttgacgtggtgcgttttgcgcagaaggcctgctccaatattcatattctgcgtctgatgcgcgagcagggcgtgaaggtggattcggtgtcgcttggcgagatcgaacgcgcgctggcggcaggttacgatcccgtgcagcatccggacgatatcgtctttaccgccgatctgatcgatcgtgcgacccttgagcgggtgaaagcattacagatcccagtgaatgccggatctgtggatatgcttagccaactgggcgaagtctcgccgggccaccgcgtctggctacgggtcaacccgggatttggtcatggccacagccagaagaccaataccggcggcgaaaacagcaaacacggtatctggttcagccagctgccgcaggcgctggaggtgattcgccgccattcgctgcagctggtcggcatccatatgcatatcggctccggcgttgattatggccatcttgagcaagtatgcggcgcgatggtgcgccaggtggtggagtttggtcaggatctgcaggcgatctccgccggcggcggtttatcaatcccatatcacgaaggcgaagaggcgatcgataccgatcactattttggcctgtggaatgcggcgcgcgagcagatcgccaaacatctggggcatccggtaaagctggagatcgaaccggggcgtttcctggtggcggagtccggcgtgctggtatcgcaggtgcgtagcgtaaaagagatgggcagccgccacttcgtgctaatcgacgccggctttaacgatctgatgcgcccggccatgtacggcagctatcatcatattaccgcgctggcggcggacgggcgcgacctgagcggcgaaccgcagctggaaaccgtggtcgcggggccgctgtgcgaatccggcgacgtctttacccagcaggagggcggcaaagtggaaactcgcctgctgccggcggtggcgccgggcgattacctggtgctgcacgacaccggcgcgtacggcgcatcgatgtcttcaaactacaacagccgcccgctactaccggaagtgctgtttgataacggcagcgcgcgcctgattcgccgccgccagaccattgaagaactgctggcgctggagcttatttaa

SEQ ID NO: 89247 - DNA, 927 bp, Enterobacter aerogenes
atgcctgccgtcaacttacgccatattgagattttccacgcggtgatgaccaccggcaacctaaccgaagcggcgcggatgctgcatacctcgcagccgacggtcagccgtgaactggcacgttttgagaaagtgctgggcttaaagctgtttgagcgcgcccgcggccgtctgcagccgacggtgcaggggctgcgactgtttgaagaagtacagcgctcgtggtacgggttggatcgcatcgttagcgccgcggagagcctgcgcgaattccgccagggagagctgtcggtagcctgcctgccggtcttttcgcagtcatttctgccgctgctgctgcagccgttcctggcgcgctatccggacgtcagcctgcagatcgtgccgcaggagtcgccgctgctggaggagtggctgtccgcccagcgccatgatttggggttaacggaaacgctgcatacgccggccggcaccgagcgcacgccgctgctgaccttaaatgaagtctgcgtgctgccacaaaatcacccgctggccgttaaaaccgaactcacccccgccgacttccacggtgaaaactatatcagcctgtcgcgcaccgacagctatcgtcagctgcttgatgcgctgtttatggagcaccaggtgaaacgacggatggtggttgaaacccacagcgcggcgtcgatctgcgcgctggtgcgcgctggtgcgggcatttcggtggttaacccgctcaccgccctcgactacgctgagagcggcgtggtggtgcggcgcttcagcgtcgatgtgccctttaccgtcagcctcatccgcccactacatcgccccggttccgcgctggtcgacgcctttgtccagcatctgcaaaccagcctgccgcgtatcgaacagccgctggcggcggtacttaagagagcataa

SEQ ID NO: 89248 - DNA, 693 bp, Enterobacter aerogenes
atgaaaaccatcggcctgctgggcggcatgagctgggaatccaccattccctattaccggttaatcaatgaaggcattaaagcgcggctcggcggcctgcattccgccagcctgttgcttcatagcgttgattttcatgagattgaagcctgccagtcggcaggggagtgggatcgcgccggcgagatcctcgccgcggccgcgctggggctacagcaggccggcgccgagggcatcgtgctgtgcaccaacaccatgcataaggtggctgatgcgattgaagcccgctgcgaggtgccgttcctgcatatcgctgacgccaccgggcgggctatcagcgctaaaggccagcgtcgggtcgcgctattgggcacccgctacaccatggagcaggatttttatcgcggccgtctacagcagcagtttgccattgagacgctgatcccgcaggccgaagatcgggcgcgcatcaatcagattatctttgatgagctctgcctcggcacctttagcgacgcctcgcgcgactattatctgcaggtcatcaaggcgctggcggcgcagggggcgcaaggcgttatcttcggctgcaccgaaatcggcctgctggtaccggaaacgagtagtccgctgccggtatttgataccgcggcgatccatgccgccgacgcggtggaatttatgctctcttaa

SEQ ID NO: 89249 - DNA, 1356 bp, Enterobacter aerogenes
atgaataaaatctgggttggatgtcttatctcgtctttatttattcccgccgccgacgcgcagcaaacgctttctcttgaggagcgtctggcgcagatggagcagcgcttaaaagccaccgagcagcgggcgcaaaacgccgaggcggaaatccgcgaactgaagcagcaggagcgcgccacggctaaaagcagtgcacctgcgcccgcgacggttgccgcgcccgcgctggcggtgaataaagatgtcgatttaaaattttacggtgatgttgaatttaatatggatggcgccagccgaaccggcagcctgacctcggtaaaaaccagcgcgaataagaactgggcgccgggggataaagagcgctgggatattaatgggcgtattttgttaggattcgatggtttacgtaaaggcgctaatgggaaatactccggctttagcgtacaaccgctggcggatatgaccggaaaaatgaatcttgatgatgccgtatttttctttggtcaggaaaatgactggaaaataaaaatcgggcgctttgaagcttacgatatgttcccgctgaatcaggatacgtttattgaatattctggtaataccgccaacgatctctatagcgacggttacggttatatctacatgatgaaagaggggcgcgggcgtagcagcagcggcggtaatttcctgctgagcaaatacctcgataactggtactttgagctcaacacgctggtggaagacggtagctcgctgtttgtcgatcaaaactaccacggcaacgcgctcgaaaatcataaaaacgtggtttatgtgcggccggtggcggcctggcagtccggaccgtggtcagtggcggcggcggttgagagtaatctggtgaacaatgcctatggctatcaaaaccagaacggacgctgggtcgatcagtccagccgtaccggctacggcctgaccatgagctggaatacgctgaaaaccgatgccgaggatggcatggtggtgaatctcagcaccgcttatctggacgcggcggatgaagaggatttcagcgccggtatcaacgcgctgtggcatcgcgtcgagctgggatatatctacgcgcacaacaaaatcgaccagttcaacatggcgggggtcagcggcgagtgcgatggcgactgcgcgattctgacgccgggccgctatgacattcacacgatccatgcctcctggcaactgccgaatatcatggatatgccgaactttaatatttatctcggcgcctatgcctcatggctggattcgtcagcccagcagagcgggaacgacgacgaacgctacggcgcgcgcgtgcgctttaaatatttcttctga

SEQ ID NO: 89250 - DNA, 1431 bp, Enterobacter aerogenes
atgatctattccattagtaacgcggagcgggaactgcaggcgaaaagcgtggatctcaacccgcgctggtatccgcgttatcacctggctgcccgtgccggctggatcaacgaccccaacgggctggtatggttcgacggctggtaccatgcgttttatcagcaccacccgtattcaaaccagtgggggccgatgcactggggccacgcgcgcagcaaggaccttgtacagtgggaacacctgccggtggcgctggcgccggaagggccggaagataaagacggctgcttctccggctcggcggtggtggatggcgatacgctggcgctcatctacaccggccataaatttcatggcgatcccgcggatgaaaataacctgtaccaggtgcagtgcctggcgaccagccgcgacggcatccattttgagcgccaggggatgatcattgataccccgccggggatgcaccattttcgtgacccgaaagtatggcgtgaaggtgaaagctggtacatggtggtcggcgcgcgggtagacgacgtcggccaggtgcggttgtaccgttctgacgacctgcgccattggcaggacgccggtattcttgcccaggccgaagcggggatgggctacatgtgggagtgcccggatttctttgcactcgatggcaagcgggtgctgatgttctcgccgcaggggatggccgcggacggctttgtccggcgcaatttattccagagcggctatctgctgggggactggcagccggggcaaccttttgtccgcgaagaggcgtttgtcgaactcgacagcggtcacgatttctatgcgccgcaaagtttcctcacccccgatggccgacgaattgtgatcggctggctggatatgtgggagtcgccgctgccggagcagcaggacggttgggccggtatgctgtcgctgccgcgcgagttaagcctcggcgcgaataatcggttattgatgcgtccggcaaaagaggtggaaggtctgcgccgcgactggttcccgtggccggtcagttcgttgaagaatcagcaactgacgatggtagagcactgcgaaaccatggaggtcaacctgcattgggatatggccaatagcggcgccgagcagtacggtttgagctttggcgaagggctgaaggtatatgtcgacaatcagatgcagcgtctggtgctggagcgtcgctatccgcaatatggtttgtgcggcacccgcagcgttccgttaccagccggttcggcgctgaagctgcggctatttttcgatagctcatccgttgaggttttcgttaatgacggtgaagcctgcctcagcagccgtatttatcctgatgcccggcgccgggaattagctttattttcctggagcggtagcgcggcattaattgatggcggagcatggaatctctaa

SEQ ID NO: 89251 - DNA, 1242 bp, Enterobacter aerogenes
atgatgaagatgcatcactctcacagctaccccttactcagtgccttactgtttttcttttttgttacctggtcttcttccggctcgctgctttccatctggctacatcaggaagtggggctgaaagccggggataccggcattatctacgcggtgctgtcggtctcggcgctattcgcccagatttgctacggctttatccaggataaactggggctgcgcaaaaatttactctggtatatcaccgtcttactgatcctttccggcccggcctatctgctgtttggctatctgctgaaaatcaacgtgctgctcggcagtatttttggcgggatctatatcggcctgacctttaacggcggcattggcgtgctggagtcctataccgagcgcgtggcgcggcaaagccagtttgaattcggcaaagcgcggatgtggggatcgctgggctgggcggtggcgacctttttcgccgggctgctgttcaacattaacccacaactgaacttcgccgtcgccagctgttctggtctggttttcttcatgctgctggcgcggcttaaggtctcttcagcgccgcacgccatgcaggaggcggtcagtggcggtaaagtcacgctagaagacgcgctgcgcctgctgacgctgccgcgcttttgggcgctggtgtttttcgtcgttggcacctgtatttacggcgtttacgaccagcagttcccggtctacttctcctcgcagttcgccacgttgcatgaagggaacgccatgtatggctatctcaactccttccaggtgttcctcgaagcggcgggaatgttctgcgccccgtggctggtcaatcgcatcggcgcgaaaaacggcctgatcttcgccggcatggtgatggcgatgcgcatggtggcctccgggctggtggaaggcccggttctgatctcgattacgaaactgctgcacgccgtggaattgccggtgctgctggtgtccatcttcaaatacaacagcctgaactttgataaacgcctttcttccaccctgtacctggttggtttcgcctgcaccagttcggtcatcgccaccgtactgtcgccgctggcgggctatagctacgaaaaatacggcttcgccgactcctatttgatcatgggacttctggtgttctgcaccaccttcatctccatcttcctgctgcgatccaataagccctcttcggattcgctcatgtcgcagccatccactatctga

SEQ ID NO: 89252 - DNA, 996 bp, Enterobacter aerogenes
atggcatccctgaaagatgtagcgaagctagccaacgtctcactgatgacggtatcccgcgcgctgaacagcccggagcgcctgaaggcggaaaccctcgcccgcgtacaggcggctatcgaacagaccaattacgtccccgacctgtcggcgaagaaaattcgcggcgcccgggcaacgccgagcaccatcggcgtgctggcgctggatacggtgaccactccattctcggtagagataacgctctctatcgaagagacggcgcgggcccacggctggaacagctttgtggttaacatgttctcggatgacaatccagatgccatccttgacctgctgctttcccaccgcccggacggcatcatttacaccaccatggggctacgccaggttccgctaccggcgaaattgttgacgctgccctgcgtgctggccaactgcgaaagcctgaacgagaacgtcgccagctatattccggacgatgagcaaggccagtacgacgcggtgaaagcgctgctggccgccggctatcgccgcccgctctgtttgcatcttccggccaggcatctggcgacgatacgccgccgacaggggatggaacgcgcctgccgcgaggcgcaggtcgatccggatacgctcgatcactgctatatgacctacggtgacgaacactatcgcgatattcccggccagctgctggcccatattgatcagggtaaaccgcggtttgattccgtagtgtgcggtaacgatcgtatcgcttttatggtctaccagacgttgctggcgcagggcttgcgaatccctgaagatgtggcggtggtgggttatgacaacatggtggggattggcgatctgttcctgccgccgctatcaacggtgcagttaccgcattatgaaattggccgcctgagcgccctgcatattattaacggcgacagccatcgggataccattaaggttcccagcccgtggctgccgcgcgaatccgtgtga

SEQ ID NO: 89253 - DNA, 1419 bp, Enterobacter aerogenes
atgacttcattgaccaccgatccgggtttactccccaatgcgcagcgcaacacccggcgcatgaaccagtttgtctccattgccgccgcggtggcgggtttgttattcggccttgatatcggcgtgattgccggggcgctacctttcatcaccgatcatttcgttttatccagccgtctgcaggagtgggtggtcagcagtatgatgcttggcgcggcgatcggcgcgctgttcaacggctggctctctttccgtcttggccgtaaatacagtttgatggttggcgcggtgctatttgtggcgggctctatcggctcggcattcgccaccagcgtcgagatgctgctggctgcgcgtattgtccttggcgtcgccgtcggtatcgcctcttataccgcaccgctctatctttctgaaatggcaagcgaaaacgttcgcggcaagatgatcagcatgtatcagttgatggtcacgcttggcatcgtgctggccttcttatccgataccgccttcagctacagcggcaactggcgggcgatgcttggcgtgctggcgctgccggcggtattgctgattatcctggtggtgttcctgcctaacagtccgcgctggctggcggaaaaaggccgccatatcgaggccgaagaagtgctgcgcatgctgcgcgatacctcggaaaaggcgcgcgatgagctgaatgaaatccgcgaaagcctgaagctcaagcagggcggctgggcgctgttcaaagtgaaccgcaacgtgcgtcgggcggtattccttggcatgttattgcaggcgatgcagcagtttaccggcatgaatatcatcatgtattacgcgccgcgaatcttcaaaatggccggctttaccaccaccgagcagcagatgatcgccacgctggtggtcggcctgaccttcatgttcgccacctttatcgcggtgtttaccgttgataaggccgggcgtaaaccggcattgaaaatcggctttagcgtgatggcgttgggcaccctggtgctgggctactgcctgatgcagtttgataacggtaccgccggcagcggcctctcctggctatcggtgggaatgaccatgatgtgtattgccggatacgcgatgagcgccgcgccggtggtgtggatcctctgctctgagatccagccgctaaaatgccgcgacttcggcatcacctgttcgaccaccaccaactgggtgtcgaacatgattattggcgcgaccttcctgacgctgctggacgcgattggcgcggcaggcacgttctggctctataccgcgctgaacgtggcatttatcggcgtgaccttctggctgatcccggaaaccaaaaacgtgacgcttgaacatatcgaacgcaagctgatgtccggggaaaagctgcgtaacatcggcaactga

SEQ ID NO: 89254 - DNA, 762 bp, Enterobacter aerogenes
atgattcttgatgcattctctcttcaggggaaagtcgcggtagtgaccggctgcgacaccggtttaggccagggcatggcggttgggctggcggaagcgggctgcgatatcgtcggtattaatatcgttgagccgacggaaaccatcgagcgcgttaccgcgctggggcgtcgttttttgagcctcaccgccgacctgcggcagatagatggtattccgcagttgcttgagcgcgcggtggcggaatttggccacatcgatattctggtcaataacgcggggctaatccgccgtcaggatgctatcgaattcagcgagaaggactgggatgacgtgatgaacctgaacatcaaaagcgtctttttcatgtctcaggccgcggcgaagcacttcatcgctcagggtaacggcggcaagatcatcaatattgcctccatgctgtcgttccagggcgggatccgcgtgccgtcctacaccgcctcgaaaagtggcgtcatgggcgtaactcgcctgctggccaatgaatgggcaaagcataatatcaatgttaacgccattgcccccggctacatggcaactaacaatacccagcagttacgcgccgatgaacagcgcagcgcggaaattctcgaccgtatcccggccggccgctgggggctgccgagcgatttaatggggccggtggtgtttctcgcctccagcgcatccgattacatcaacggctacaccgtggcggtagatggcggttggctggcgcgctaa

SEQ ID NO: 89255 - DNA, 1179 bp, Enterobacter aerogenes
atgaaagatgtcgtgatcgtcggcgcgttgcgtacgcctatcggctgttttcagggaacgctggcgcgtcactcggcggtggaattgggcagcgtggtggtgaaggcgttagtcgagcggagcggaatcgatccgcagtgcattgatgaagtgatcctcggtcaggtgctgaccgcgggcaccgggcagaatccggcgcgtcagtcggcgatccgcggcgggctgccgaataccgtttcggcgatcaccatcaacgacgtttgcggctccgggctgaaagcgctgcacctggcgactcaggctatccagtgcggcgaagcggatgtggtgattgccggcggccaggaaaacatgagccgcgcgccgcatgtgcttaccgatagccgaaccggcgcgcagctgggcaatagccagcttatcgacagcctggtgcatgatgggctgtgggacgctttcaatgactaccatatgggcgtaacggcggaaaatctggcgcgggagtatgggatcagccgtgaactacaggacgcctgggcgcttagctcgcagcaaaaagcgcggcgggcgatagactccgggcggtttcgcgatgaaatcgtgccggtcgccaccgagcataacggcagtcaacggctggtggataccgacgagcagccgcggatggatgccagcgctgaagggttagccagcctgatgcccaccttcgaccagcttgggtcggtgaccgcgggtaatgcatcgagtattaacgatggcgcggcggcggtaatgatgatgagcgaatcaaaggctcaggagctggggctgccgattctggcgcgtattcgcgccttcgccagcgtcggcgtcgatccggcgctaatgggtatcgcgccggtacatgctacccggcgctgccttgagcgcgcgggctggcagctggatgaggttgacttaatcgaagctaatgaagcttttgccgcccaggctatctccgttggcagagtgctggagtgggatgaacggcgggttaacgttaacggcggggctatcgccctggggcatccgattggcgcgtccggctgccgtattctggtgtcgctggtacatgaaatgatcaagcgcgatgcgcgtaaagggctcgcgacgctgtgtatcggcggcggtcagggcgttgcgctggcggtggagcgcgcataa

SEQ ID NO: 89256 - DNA, 876 bp, Enterobacter aerogenes
atgcactattctcccgaagccctcaccgcttttgtagaagccgccgccagcggttcgttctccgccgccgcccggcggatgcgtaaaagccagtccaccatcagtaccgcgatttcgaatcttgaaaccgacctggggttgactctgttcgatcgttccactcgccagccgacgctaaccgcgcagggcgagcaggtgctgggctatgtgaaagcgatactggccgccagttcgcggctggatgagctcgccagttcgttatccggcaataccgaaccgcggctgaccttcgtcttgtcggataccctgcacccggatgtactggaggatttgctggaacagttcgatcggcgttttccgcataccgagtttgaatgcctgattggcgaagacgaagacgtggtggatctgctgcaaaaagagcgcgcgcaggtggggcttatcgaagccagagacagctatccgatggagatcggcagcatgcgcctgccgttgcaaacggcgatggggatttatgttgcgccggggcatccgctggccggtcagggacggattttctgggatgatctgcacggctggcgtgaattgcggcttagcacttatcttgagagcgcgccggatccttcgcgcggccaggtatggtcggcgcccaactatttgctgctgctgagtatggcggtgcagggctttggctggtgcattttgccctgcgcgctggtggaagagttcgccggtagcggcaagcttaaagcgttgaatatcgccggctggccgcgctcgatctcggtggatctactatggaacaagcgtacgccgctgggggaagcgggcagctggctgcgccaacaccttgaagggcaaggccgcgagtcgtga

SEQ ID NO: 89257 - DNA, 462 bp, Enterobacter aerogenes
atgaaaaccaatcacctgcagcgtaagacactgctggaacgcgtactccacgcggtgagctttgaaggtctcgccacgttaattctggctcccaccgccgcctggctaatgcagcgatcggtggtcgaaatgggcggcttgagcattctgctcgccaccatggcgatggtctggaacctgatctataacgccgccttcgaccgtctgtggccggtttcacgcctggcgcgtacgctgcgggtgcgcgcgctgcacgccatcggctttgagtgcggctttatcatcatcggcgtcaccgtcgtcgcgctggtgcttggcgtgtcgctggtgcaggcatttatgctggaaatcggctttatgctgttcttcctgccctacaccatgttctttaactgggcgtgggatacgctgcgcgtgcgcgtcctgaagtatcgccagccgcagagtctgccgaatagttaa

SEQ ID NO: 89258 - DNA, 1230 bp, Enterobacter aerogenes
atgtctaaaatttggtctaaagaagaaactctatggagttttgctctatatggcactgccgtaggcgccggcaccctattcctgccgattcaactcggttcggccggcgccatcgtgctgttccttaccgctttggttgcctggccgttaacctactggccgcacaaagcgctgtgtcaattcatcctgtcggccaaagtggcggccggtgaagggatcaccggcgcggtcaatcattactacggcaaaaaagtcggcaatctgatcaccagcctgtactttctcgccttcttcgtagtgatcctgatctacgccgtggcaatcactaattcgctggctgaacaactggcgagacacgtggcgatgactcctggcgtacgcgctctgctgagcctcgccgtggtgctggtactgaatctgatcttcctgatggggcgtcatatgaccatcaaagtgatgggattcctcgtcttcccgctgattggctgtttcctgttcctctccatctacctgattggcagctggcaaccggaacacctcaccagtcagatgcagctgaacgcaaagacctggcaccaaatctggatctcgattcccgtgatggttttcgcttttagccatacgccgattatttcgaccttcgctatcgatcagcaggagaaatatggtgagctggccatgggtaaatgcaaaaaaatcatgaaggtggcctacaccatcatctgcgccagcgtgctgttttttgtcttcagttgcctgctgtccattccgctgccgtacatcgaagccgcgcgtaatgaaggggtgacgattctctctgcgctctccatggcgccgggcgcgccgggctggcttgcagtgaccggcattatcgtcgcggtggtcgcgatgtcgaaatcgttcctcggcacctattttggggtgatcgaaggcgctagcgaaatcgttaaaacctcgctcggccagctcggcattcgtaagagccgcgcctttaaccgcgccatgtcgattatgctggtctcagcgctgacctttatcgtctgctttatcaatccgaacgccatctcgatgatttacgccatcagcggcccgcttatcgccatgattctgttcatcatgccgacgttgtcgacgtatatcattccggcgctcaagccctaccgttcgctgggtaatctcattaccttaatcgtcggcctgctctgcgtctcggtgatgttcttcagttaa

SEQ ID NO: 89259 - DNA, 867 bp, Enterobacter aerogenes
atgtccagcgtaacattatccggggtcatgaccttaggcgaccgtcaggtttaccggcttggatacggcgccatgcagctcgccggccccggcgtgttcgggccgccaaaagatcccgacgccgccattcgcgttctgcaagaagccgtcgccgccggggtgaatcatatcgatacctcagatttctacggcccgcatatcaccaatcagctaattcgtcaggcgctgcatccctatagcgacgacttgtgtatcgtcaccaaggtcagcgcccgccgcgatgagaaaggcaattggctaccggctatgtcgccggcggaactcacccaggccgtcgaagataacctgcgtaacctcgccctggagaggctggaggtggtcaatctgcgcagcatgctcggcacccacggcccggtggagggttcgctggaggaaccgctaacgaccttactggaactaaaagcccgcggtctgattcgtcacatcggtctgagtaacgtcaccgccagacaggttgccgatgcgcagaagctgacccccatcgtctgcgtgcaaaaccagtacaacatcgctaaccgcggtgacgacgcgttaatcgacgcgctggcgcagcaaaacatcgcctacgtgccgttcttcccgctgggcggttttacgccgctacaggcgcaagaacttaacgaggttgccgccatgctcgacgccacgccgatgcaggtggcgctggcgtggttactgcagcgctcgccgaatattttgctgattccgggcacctcatcggtggcgcatttacgggaaaatctcgccgctgcaacgcttaccctccccgccggagcactggcgaagctggatagcatcagcggttga

SEQ ID NO: 89260 - DNA, 705 bp, Enterobacter aerogenes
atgatagagggaacgataaaaaccagtaagtatgaaatcattgctattttcagagaggaacagagaaagcaaacagagatagaaattttctttaataacaaaagcatcagtactcagattgcgcgcgtagattttgccgaattccatatccagagcgatagcaaaatccctgcggggaataaattcaaatttattctgcatagtgattcaggaaagatcgagttcacctcccagcggcagaagaattccgctggcggcgcggagaatagcaataaggtggcatttgcgttaccggaatgcatccaggttgtacaaagacgacgagatccgcgatttcgtttacgcgatgagaatgatttcttttgtcatgggcgccataaaaatggcgaaaactatgcttttgatatcaaagatatttcagatggtggctgcgcgctgattgcaccaagtccaaatctgaaattccttgccaacaactcaacgctgaaaaacgccattctgtctctggctgaatatggcgaaatcaccgttgatctgattatcaagaacgtggcgatggtcacgctggatagcgaagaaaagagtccggaaaactactatcagatttcctgccagtttaagttccgccgcagcgatgacaggaagaaaatagaaaaaacgctgatcgatttgattctggaagccaagcgtaagaagagagtttaa

SEQ ID NO: 89261 - DNA, 591 bp, Enterobacter aerogenes
atgcccttgaacaatatcttgctgtacactgacgacaatatcattggccaatctattcatgattatctgagcgatattcaccaggatatcacccaggccagttatcaggacatcgtgcaagggggcgtcgcgcccctggctgagacggtgatcttcaatatgatccacaaggatatatccgccgccgatacggtcgtattactcaacaaactgcgctttcatttctcgcgctgtacactgttggtattgatggtaaaaagcgatatcgccaatctgtgccgggaattaatcgatctggaaaacctgttaatcctgacggaaaaatcttctttagacgcattttcggcaattaccagaacgcaggatgaaactccgcagacccggtatttgcgcacgcagcgaaagctgaccgccagagagctgcaggtactggaacttattatcgcctgcaataacaacaagcgaattgcctcgctgctgaatatcgatcataagacggtacacagccaccgcattcacattatgaaaaagctgggaatgaatagctcgcaggtgatgcataagcaaatcgtcaatatgaatcactgctga

SEQ ID NO: 89262 - DNA, 702 bp, Enterobacter aerogenes
atgttgcaccctgcggttgtcattgacgatgacgaagcgctggccgtcgcgatggcggcggttgcctcggcgatggctgacccttcacgagtgaaaatactctgcgcgctaatggatggccgggcatggacggcgactgagctctccggcgcggcggatatttcgccgtcgaccgccagcgctcaccttagccgtctggtcaacagtcgcttactgatctgcctggcgcaagggcgacatcgctactatcggctggcgggcggcgatgtcgccggattgctggaaaatatgatgaccatggcgggcaaaagcgcagtgccgctgaccacgcgaacgccgggaacgctgcgtatggcgcgtacctgctacgatcatctggcgggtgaagtggccgtcgccatctatgattttctgcagcagcaagcgtggctcacggcaaatggcaccgcgcttaccgcggcgggggaggcgcatttcgcccgcttaggtattacgtgcgatagcggatcccgccgcaaagtatgctgcgcctgcctcgactggagcgagcgccgttttcatctgggcggtgccgcgggcgctgccctgctgcagtggggcgtgcaaaaaggttggtttatgccggtcccgggctatcgcgaagtgacaatcagcgagcctgggaagcgagcgctgcgtcagcactttggcctggcgctgtag

SEQ ID NO: 89263 - DNA, 318 bp, Enterobacter aerogenes
atgattgcggtactctttgaagcacaggtcacgccagcgcagcaggaacgatacctcgcgctggcggcgcagttgaaaccgctgctggaaaccatcgacggctttatcgccatcgagcgttttcaaagcctcagtgcgccgggaaagattttgtcgctgtcgtggtggagggacgaacaggcggtgacggcctggaagcgcaatatttgtcatcaggcggcgcagcgggaagggcgggagtctatctttgctgattatcagattcgcgtggcacaggtactgcgtgaataccagatgcagagttcacgttctgcgtaa

SEQ ID NO: 89264 - DNA, 213 bp, Enterobacter aerogenes
atgaaaaacgtaaaattacttgctgctgctggtatgctgtctctggtttctttcgcaagcttcgcggctcacccggtgagcgtgacctctgataccctggacaacgcagaagcaaaaatcgctgctatcgctaaagatcagggcgcctcttaccacattaccgaagcctataccggtaatcaggtacacatgacggcggaactgtctaaataa

SEQ ID NO: 89265 - DNA, 867 bp, Enterobacter aerogenes
atggccttttttactcgtcatctggcggtcgatctgctgctgaccgcgctggctcccgccatctggggaaccacttatatcgtcacttcgcaattcttgccgccggaccgtccttttatcgccgcgctgttgcgcgtgttgcccgccgggattgcgttgttactgtggagccgccagtttccgcagcgcggtgagtggtggaagctgatcattaccggaatattaaatatcggcgcctttcaggcgctgctgtttatcgccgcctaccgcttgcccggcgggctggcggcggtgatcggcgcgattcagccgctgctggtgatgctgctggcctggtgcgtggatcgccagcgttcgccgtggctggcggtggtttccgcctgcgccgggatcatcggtatggcgatgttgctgctttctccgcgcacggtgctggattcgttaggtatcggcgccgcttttcttggcgccgtcagtatggcgctgggcacctggctgtcgcggcgctgggcgctatcgttgccggttgtggcgatgaccggctggcaattgttgataggcgggatcgtgttactgcccatcgcgctgctggtggacccgccgttgcacaacatcaccccattacaggctgcgggttatgtctggctgtgtgtggccggggcgatgctggcctatggtttatggttccgcggtatcagccgattgtcgccggtggcggtatcggcaatgagcctgctaagtccggtgacggcggtgctgctggggtggatctttctcgggcagaaaattgaggggatggcgctggcgggccttattgtggtgctggcgagtgtgctctctattcagcgcgcgctggcgaaacgttga

SEQ ID NO: 89266 - DNA, 507 bp, Enterobacter aerogenes
atggacaaattaccgccaacggatgccgttgaccgcattctcgcccaatggcagcgcgagcgcccggatctggattgcagcccaatggggccgattggccgcctcaagcgctgcgccatgctgctggagccgcgggtggaggcggcgtttgttaaacatgggctggtacgttgggagttcgacatgctggcgacgctgcgccgcgccggcgagccattcgtgctgtcgccgacccagctcttttcgacactgatgattacctccggcacgatgacccatcgcctcaaggcgctggaaaaacgagggttgattacccgcttagcaaatcctcaggatgcccgcagcatgctggtcgcgttaacgccagagggacgagcgctgatcgatgaggcggttgccacccatgtggcgaatgagcagcaactgctggcgggactttccgccccccaacttcagcagttagacgaagcgctacgggtatttatgcgtctgctggagaatgagtga

SEQ ID NO: 89267 - DNA, 471 bp, Enterobacter aerogenes
gtggataagactcactcttcgaccccgccagagagccacgaaagccgttttcataaagaagagttccccttcttctgggtggttaacgtttacgcccgttatacccaattaatggaaatcgagctcaaaaaaatcgacatcgacctttcccgcttccgcgtactgatgttggtgcaccaataccaccgcgccagtatttcgcggatcaccgaatatgccgttagtaagatgccgacggtgaccaaaattgttggccgtctgcgcgatgatggcctgctcacgacccacgttagcgtcagcgatggccgggtcaccgaagcggaactcaccgccgccggtgaagccaaggttgccgaagcccgggcattagcggaaaccgtgtttgctaaagccttcaagggcgtcaccccggcgcaggaaaaaaagatgaatcaggtgctggcgctcattctgcacaacctcgatgactga

SEQ ID NO: 89268 - DNA, 1146 bp, Enterobacter aerogenes
atggttactgaacatcgtacagaggcagaaaacgcagaatccgggtttatctcgcgcttcacccttggcgaaggcgagctgacgtttgcggttaaagacagtctcgatattgccggttttccgacccgcgccggcagcccggtattgcaggatgcgccgcccgccgttcgccatgccgccgtagtcgaggcgctgctggataacggctgccagctgcgcggcaaaaccaccctgcacgagctggcctttggcgtcaccggcatcaacccgcatagcggtacgccgcgcaatccgcattatccgcagttaatccccggcggttcgtccagcggctccgccgccgtggtcgcggccggtgaagtcgacttcgccgtcggcaccgataccggcggctcggtgcgaatgcccgcggcctgctgcggcgtggctggcctgaagccgagctttggccgtctgagccgcgctggcgtcatgccgacggaaagttcgctcgactgcgtcggcctgttcgcccgcgatatcgccacattgcgtcaggcgctggcaaaagcgctgggggaatcagcgcctcctgcgcgccgggcagctcccgcgataagttatctggcgggcacggcaacgccggaaattgagcaactgatcgtctcacgtctgcagcaggcggggctggcatggactcgcgctgaactaccggggttcaacgaagcgcatcaggccgggcttacggtgataagccaggaaaactggctggcgtttcacagcatcatcaacgcgccgaacctggcgccggatgtcgcccggcggatccgcgccggcgcggagattggccctcagcaacggcagactgcggaaagcgtgcgtcagcaatttagcgccgcggtggatgcccaactggcgaaaaccccgctgattctgctgccgaccctgccggaatgcccgccaacgctggaagaagcggcggatccgctcaaggtggtcaacctgactcgcctggtgcgcccatttaatttaagcggccacccggccctgagccttccgcttggcgaaattaatcatcgcccggtggctctgcaattagtcgccaataaaaataaagagtttgatttacttaattacgctgaatatttgctggaaaaattaaaataa

SEQ ID NO: 89269 - DNA, 1167 bp, Enterobacter aerogenes
atgttaaacccctctgcaacttcgcgtgcggaaaagaccctgcacgccacgacaatagagtttgccgaattactcgcagatattaaaaagcgcagcgaggagttcgagcagcagaaatatatcccggcggatattatttcccgctttaaaaagatcggtgtttatcgcgcgctggtgccaaaacgctacggcggcgatgaaatatcacctgcggagttttgtcagttaattgaaacgctctcaacggcggacggatctgccggctgggtggcgagtttcggcatgaatccgttttatcttggcggcctgccgccgagcagtctcgatgagctttaccgccacgggccggatattgtctttgccggcgggatcttcccgccgcaaaaagcgacgactcaggatggcggctaccgcgtcagcgggcgctggagcttcgccagcggctgcagcggcgccgaacttatcggcgtgggcattctgaccgatgacggcagcgatcgtccgctgccgcgcatcgcggtgctacccgccggggagttcaccatcgatccggtctggaatacggtcggcctctccggtaccggcagccatgatgtagtgctgaataatgccttcgtgccgcaggagtggacctttattcgcggcggcgaacttaacctcgaaggccctctgtatcgctatccggtactgtcgctggccactcaggtgctgtcggtggtcgcactgggtatcgcccgcgcggcgttatcggaaatttacgccattgccgaacgccagagctcggtcaccggcgcgccgtgcctggcggatcgccaattcgcgcagatggaaatcgcccactgcgaagcggatctgcgttcggcgcgctgctggttctacgacgccatcgacgatgtctggcaagcgattctgcgcggcgatgaaccgggagaagagcggattaacgccatgcgtctctcttccacccacattacccgcgtctctgcttcggttaccacccgcgcgctgaaactggccgggatgccgggcatatcgatgcgcagcccgctgcagcgctatgctcgcgacaccatggtgatcacccagcacgcctttatgggcgagctgacatacatcaacgccggcaatatgttcttcggccactcgccgcagccaggctatttatga

SEQ ID NO: 89270 - DNA, 513 bp, Enterobacter aerogenes
atgaatgaagaaatgctgcaacgcctggaaaagctggaagccgtagtgcagatccgtaacgccatcagccagtatatgcatctctgtgatgacctgacgcatccggataccgcccggcaaattggcgcgctatttagcgaaacggctatttgggaaggcatcggcggattatatcaacacaagctcgggcgccactgcggcagagcggcgatcgtcgggatgatgaacgcttatattagcgagccgtcacacttcgccatcaacgtacattatttaacggccgagcatattcgcgtcgacgaaaataaccgcgcggtcggccgctggaaaatgctgcaagcttcaacgtttcgccgcggcggctcgcatttaaatagcgcggagctcgtcattgaatttattaaacaagatcaacagtggttaattcatcattttaccacccgtaatttatttagccgcccggtagatgactggcattcgctcgccgatttaccggtgcctgatgatcattaa

SEQ ID NO: 89271 - DNA, 1305 bp, Enterobacter aerogenes
atgtctgaatgtattccggtaaaaaatatcgataccagccataccgccgaaacgctggcggcactggtgcaaagcgaccgggtccatacctgtctctatacttccgaggaaattttcgacctcgaaatcgacaacatttttaaccgtacctgggtatgggtcgcccacgagagcgaaatccctgacgccggcagctataaatcctcgatggtgggtacccagccggtgatcgtcgtgcgcgatcgcaaaggcaatatcaacgtgctgctcaaccgctgccgccaccgcgccgccaccgtctgcgaacatcgcagcgggaaaacgaacggttttacctgcccgtatcacggctggggctatggcctcgacggcgcgctgcgcggggtaccgcatccagagagctacggcgatacgctgaacaaatctgagctcggcatggtgcgcctgcgcgttgaaagctacgccggaatgattttcgccagcttcaaccacgacattgagccactgaccgacttcctcggcccggcgatgaaatggatggatctgttcatgaaacagggggctggctacgcgctgcaggccaccaccgcgcaccgttttcgctttcccggcaactggaaaatccagctggaaaataccaccgacggctatcacttcccgatcgttcataagtcgtttttaagttcggtcgataaacagaccgaagagatgctcaacttcgtcgacggcaaaggtttcgtggaagatctcggcaatggccacagcgtgatggtgatgatccccgagcttatcgatctggaagccaatctcgatgcgccaatcccggaacgctttagcgagctggcccaggccctgcgcgaagaaggccacgacgagcagcaggtgcggcgcatcgtacgcgcggtgggcggcagcggttttaaccttaacctgttccccaatgtcgcctgttcaatggccttcttccgcgtgctgcagccgatatcggtaaaagagacggaaattcatcacatggtgctgaccatgaaagatggcccggcgatcgccaaccaggcgcgcctgcggctgcacgaacacttccaggggccgatgggcttcggcacccccgatgattcagaggcctgggagcgggtgcagcgcggcggcggtgcgggcgacgatctgtggatcatgctcaaccgcggcctgcccggcgaagtccgcaccgccgacggcctgcgcagcgacgtcagcgccgaaaccggcatgcgcgccgcctatcaacaatggaaaaagtacatgaccgctgataaccgggggcaataa

SEQ ID NO: 89272 - DNA, 480 bp, Enterobacter aerogenes
atgaacacatcacctatcctcaacgccgccattcagtttattaacctggaagcggacctgctcgatcaaggcgaattccgtgaatggctggcgctgtggcgcgctgagggaatgtacatcattcccatcgatcagcagaccaccgatttcgccaacgtgctcaactacgcctacgacaaccacgagatgcgggaaaaacgcgtgcagcgtttatacagcggcgaatcgatctccaccaccccgcgcgcgcgcactatccgcatgagcggccgttatcgcctgctcagcgccagcgatgaggtcgtcgaagtacgctgcgcccaattcctttacgagtaccgcaagggcaatgaacagcactacgccgctgacgtcacctggacgctggcgccggagggcgacagtttccgcatcctgcaaaaggtcgtacgcctgattaacggcgacgattacctgcatagcattggctacatcctgtga

SEQ ID NO: 89273 - DNA, 969 bp, Enterobacter aerogenes
atggctgaaacattgacggtacgcgtcacagaacgcgaaattcagggagccgaggtggtagtcctgacgctggcctcgccggacggcgctcccctgccctcgtttagcgccggggcgcatatcgatttacatcttggcgatggcatcgtgcgccagtattcgctgtgcggcagcgcccatcacccgcagcgctatcggttggggatcctcaaggatcgcgcctcgcgcggcggttcgctggcggcgcacgctttacagcccggcgacgaggtgcaaattagccctccgcgcaacctgttcgcgctggagatgtcggcgcctcatagcattctgatcggcggcggcattggcatcacgccgatgctggcgatggccgatacgctatttcgcgccgggaaatccttcgaagtgcattactgcggccacagccgtgagggaatggcgtttctggccgaactggcggattgccactttagcgctcaggttcagctgcatatcagcgatgaaaacggccggatccgccctcaggaactcctgacgcctcacgccgccgccggccacctgtacgtttgcggcccggagggttttatggcgtggattaacgaaacggctcagggatgcggtttcagcgcggagcggctgcatcaggagtatttcaaccgcgaggtagaaaccagcggcggcagctttgaggttgcggttccagaactcaatctgagcgtcaccgtcggtgaaaacgagaccatcgtcgccgcgctgcaaaaggccggcatcaaagtcaaagtctcctgccaacagggcgtctgcggcacctgcctcgccaacgtttgcagcggcgaacctgaccaccgcgacgagtatttaaccgaagaagaacgcgaagataacgaccagatcctgctgtgctgttcgcgggccaaaaccccgcggctggttattgaaggcttcgaatacgtcaaactgaaataa

SEQ ID NO: 89274 - DNA, 495 bp, Enterobacter aerogenes
atgaacctgacatctgattttcgtaatgccatggcgcaactgggcagcgcgatcaccatcattaccaccgatggcccggcgggccgcttcggttttaccgcctcggcggtgtgtagcgtgacggattcgccgccgacgctgctggtatgtatgaaccgctcgtccttcgcgcacggcaaattccagcacaacggcgtgctgtgcgttaacgtgctctccggacagcatcagcaattgtccgggattttcgccaacggccaaatccgctccgaagaacgcttcctgcacgacgaatggctggcgctggagaccggttcgccggcgctggcttccgccgtggcgaactgcgactgcgtcattgccgacagccatgaagtgggcagccacagcgtattttattgcgaggtcaaacagatccgcttcggcaaccccagcgacgggctggtctggtttaatcgccagttccatacccttagcatggcgtcgtgccgttaa

SEQ ID NO: 89275 - DNA, 1326 bp, Enterobacter aerogenes
atgtctggagctgtgagcggtacaacggtccccccggcgcaacctatgcgcaaattaatcatcgggtcttttctcggcaactcgctggaatggtacgattttttcctgtatggcaccgcggcggcgctggtcttcgggccgctgtttttcccggccacgaatgacccgctgctcggttcatttttagccttttccggcttcgccatcggctttatcgcccgccccctcggcggggtgatattcggccatctcggcgatcgctacagtcgcaaaatgacgctcatcatcaccctgacgctaatgggcgccagtacgttcttaattggtctgctgccaacctacgcccatatcggcatattggcgccaatcgccttgattacgctgcgctttgtacagggcgtggcttccggcggcgaatggggcggcggggtgttgatgctgagcgaaaatgcgccggaaagccagaaagggtactacaccgcctggagccaggtgggggtctgcggcgggtttgttctttcttcgctggcattctatctggtgcagctgctgccgcaggaagaggtgatgtcgtgggcgtggcgtattccgtttttgctcagcctgtttatctttctggtgggcgtctatattcgccgtaacatccaggaaaacgcggaattcgtggcgcgcaaagcagaaaacgacagcaaaaaggaggcccatcatttaccggtgctcagcgccttcaaaaatcatccacgagcgatattacaggctatcggcctgcggctggcggaaaacggcgcggtgtatatcttcttcacgttttcagtggtctattgcaaacatatcggcatcgacacccgcgacctgatcgcggcggtcaccatcgccatgacggtggagatcgccacgattctcggctggggatggctttccgatcgcattggccgtaagcggctttactatatcggcgtgataggcatggcgctggtcgccttccccttcttctggctgctgaatatgcacaccttcccggcgatgctgctcgccatgctgttggcattgccattgtgccatggcgcaatgattgccgcgcagccgtgtctgatggtggatctgtttccggtggaggtacgctacaccgggctggcgctggggcatgagattggggcggtgatttccggtggtattagcccgatgctggcggtagcctttttaatgatgtgggatagctatatccccattgcgctgatgctgctggcctttgcgctactggcgctggtggcgctgataagtattcgccagccgcagccgcgacctgaagcggtcgcgatcacctaa

SEQ ID NO: 89276 - DNA, 996 bp, Enterobacter aerogenes
atgaaatggataattttgctggtattaagcttatgctcttttttagcgcgggcggggaactgtgaattaacgccgagcatccctccggcgtcgattgaggctagcggcaactacacttttaaaccgctggccgccaacggggagctcaatttacgtgatagttcacttcaggctaacgcattcagctttcgctgccccagtaactcaaatattacggtctcggtcagtctgcaatcgccaccacaaacctcctactatgttgaggtaggcagtaagaactatgagattaatttctccttcgaccagacaaaaatggaatcgttgggaaacggaaaaattgttgaaaaccaagtatataatttggcagatatgtttaatagtttggtcggcatacgctatgagattaaagaaggtagcgctaacgggcagcgtgttactcccggagtacctttccagatgcgttacggtatagttttgaaatattgtaagaataatgaatgtcataacgttaacatcaattacacctttaacgtcaccctgcaggtaaatatcatgacctgtggttttaacgtcccgaaccgcttcattaatatgggcgattacagctacttcgatattaaagaagacaaagcgcaatatcgcctggaacgcgttgatatcgactgtagccgggacgagtcggcggtattcgaactgacgccgggtaaaattgattactactttgtcgccgcctccggctttgccggcaccagcaaaatattgaagaatgacgatcaggatgccgccaccggcgccggcgaagtcggttttcatctgctcgatagtcagggcggggaactccagtacggtagcggtttcctctaccactccagtgaggatgcccgacatggcgatagcaacccgatctatctgcaaatcaagccgatgaaatatggcgagaatatccgcggcggcacgattaaaagccgggttattatcgtcatcaacaataactag

SEQ ID NO: 89277 - DNA, 2484 bp, Enterobacter aerogenes
atgttaaggatgacgccgctttcctcaatgatattgttggttttattatccggtcagctgcaggccgctgaagagacttttgataccaattttatgatcggcggaatgaaaggtgaaaaatcatcaagctttcactttgcggataatcaaccactgcctggggaatatgaattggatatttacgtcaataagcaatggcgtggtaaatatccaatcgtagtcgccagtaatccggatgatacctgcctgtcatcggcattattacatcagttgggaatcaaagcggatagcacgcagatggtaaaaaataaccagtggatgacgcttaaatccgcggtgcggagcggcagttatacttttaatatcaatatttttcagcttgatttagaaattccgcaggcctacgttctggatcttgagcgcggctacgtcgcgccggaaagttgggaccgcggcgttaacgcgctctatacctcttattatctgagccagtattacagcgactataaagacagtggcaataacaaaagcacttacgcccgcttcaacagcgggctgaacctgttgagctggcagttgcactctgatgctacctacagcaaggccgatagcggcggcggcgactggaaaagcaacaccctgtatctggagcgcagctttgcgccgattttaggcaccttgcgcgcgggcgacatgtatacctcagcggatattttcgatgcggtacgctttcgcggcgttcgtctgttccgcgacatgcaaatgttgccaaactcaaaacagaactttacgccaatcgtgcaggggattgcccagagcaacgcgctggtaaccatcgagcagaacggcttcaccgtctatcagaaagaggtgccgccggggccttttgcgattgccgatttacaactcgccggcggcggggcggatctcgatgtcactatccgggaagccgacggctcggtaaccacctacctggtgccttattcctcggtacccaatatgttgcagccgggggtgtctaaatatgacattgccgccgggcgcagccatattgaaggcgccagcaatcaggaagactttatgcaggccagctatcaatatggcctgaacaatctgctcaccctgtatggcggtaccatgctcggtaccgactatcaggcttttactatgggaaccgggtggaatacccatctcggcgcggtatccgttgacggtacctgggcgcgcagcgatcaggataacggtacttttgaagggcaaagttatcagattgcctacaacaaatacctcacccagactaaaacacgcttcggtatggcggcttatcgctattcaaccagcgactatcgcacctttaacgatcatgtctgggcgaagaaccgtaatagttatcaccatgatgataatgacgtttacaacattgatgattattaccgttatgattttggccgtaaaaatagcttatccgccaatattagccagtcgttgccggaaggattagggtctttctcactgagcgctttatggcgtgattactggggaaaaagcggcagtaataaagattatcaactgagttacaccaataactggcagcgggtttcctggaccatttcggccagccagacctatgacgaggatcatcatgaagataagcgctttaacctcttcatttcgattccgctgatctggggagagagcgatagcgtgctggcgcgtcgcctgacgctgtcgaattcgacgaccttcgataacgacggttttgcctccaataataccggcatcagcggtacgggcggccagcgcgaccagtttgactatggcgtgaacctaagccggcagcagcaaaaccatgaaaccaccgccggcggcaaccttacctggaacgcgccgttggcgacgctgagcggcagctacagccagtcgtcaaaatatacccaggccagcggcagcctgtctggcggggtggtggcctggtccggcggcgtcaacttcgctaaccagctatcggaaaccttcgccattattcaggcgccgggcctggaaaatgcttacgtcaatggtcagaaatatcgcaccaccaacgcgcagggaacggtcattttcgatcatgtcttgccctatcgcgaaagttcgttgctgctgaataccgccaatacgcagagcaaaaccgagttgattggcaaccggaaagcggtggctccgtaccgcggcgcggtggtgctggcgcgtttcgataccgaccagcgtcaaccttggcttattcacgccgaacgcccggacggtacgccgctgaaatttggctatgaaattgaagataacgacggacagaatgtcggcgtcgtcggccagggcagcatgctgtatatccgcaccgataacgttccgccgtcgattaccatcgcggtcgataagcagcagggccattactgcaccattacatttaaacataccattgatgaaggtaagacctatgtctgccgctaa

SEQ ID NO: 89278 - DNA, 684 bp, Enterobacter aerogenes
atgaaacggattttattagcaggtttatttatcgctatgcagcccgcgcatgccggagtggtgattttcggtacccgggtggtttatccggctgagaaacaagaagtggtcgtacagttgatgaatcatggcgcccgctcttcactggtgcagtcgtggattgacgatggcaatacttcattgccgccggaaaaaatcaacgtgcctttcctgctgtcgccgccggtggcgcgcataacgggtaactccggccagcagctgcgaattaaaaagttagccaacaaacttccggcgaacaaagagtcgctgttttatctcaacgtactcgatattcctccgaatacaccaggaagtgagggggcgaatacgctgcggtttgccatgcaaaaccgcattaagcttttttatcgccctaaaggcattgcggcggtaaataaagatacgtttaaaagtatttcgttgtcttcgcgcaaaaacgctctgcatattgccaatgattcggcaaattggttgacgattactgaaattaaactcagtaacgttaaagtcaatgagcgcagcgttatgcttgcgccgttatccagtcaggatgtctttttaaaaaataatctcgcccgccagtattcgctaacgatgattgatgataatggaaactttattagcgacaggctcaatgtaaaataa

SEQ ID NO: 89279 - DNA, 567 bp, Enterobacter aerogenes
atgaagcgttcaattattgctgctgcagtattttcaaccgtgctgatgagtgttaatgcttttgctgcggcgccaagtgaagagcagggcgagttagttattattggtaatgttattaattcttcctgtcgttttgaaaccgattatagcagtacgattcaactggctgatgttgacgctacccgttttgccggcatgtcagccggtgaagtcttatccggcaatttcgctaccagtagcgatccattaactatcgtttgcccggaaggcacggtattgaaatcgattgatattagcggcgggacctatactaccggcggcgtacttaatcctatcgcaactacaacgtctgctaatggtgtcggttttaaattaagactcggctccgcggatattaatgaaaataccatatatgacgtcaataatttgccgggtgcggtgacttctttgggcaatggcgtttatcaaatgaacttttcggcgcaatacgcccgaattaatgccgccacaccggtaaccgccggtgaagtccgctcggtgttaacgattgccgtctctgcggagtaa

SEQ ID NO: 89280 - DNA, 246 bp, Enterobacter aerogenes
atgaaaaaaataatcctgcctctgcttaccgccgccctgctgctgccgaccctcaccgcgcacgccacctaccgcgcggaaaaacgccaggatgctcgcgatatccgtcaggatgcgcgccagagtggacgtgaagaaaaacgtgaatgcgtgaggaatgacgacaagagcaatatgcgctgtcgcgaagataagcgtgaaaatcggcgcgaaggccgtcgcgacgcgcgagatgaaaagtggtaa

SEQ ID NO: 89281 - DNA, 516 bp, Enterobacter aerogenes
atgttatgtcataatccggcgataaaagagaaaatcttccaaatggatagcatagatagaaaaattcttgctgagctgcaggcggatggtcgtctgtcgataacggaactggcggagcgggtgaatttgagcctctctccctgccaccggcgactacgcgcgctggagcaagagggggtgatcaccggctatcgcgccaatctcgacccgggaaaaatggggttcaattttctggctatcgttttcgccacgttaaaagagggcgataaaaaagcggtcagcgcttttgaggaggcggtggcggagatcccgcaggttgtgctggcgcagcgattgtttggcgatccggactacctgatgcacgttgtcacccgtgatcttcctgcgtttcagaaactctatgatgacaaactgtcggcgatgccgggcgtgcagcatttacgttcgacgctggtgatgaaaaccgtggtgcaggatcgccctttccctctggagacgttaaacgcttcccgctaa

SEQ ID NO: 89282 - DNA, 612 bp, Enterobacter aerogenes
atggaaataagcctgatcgccagcttctggatagtctcattcctgttgattattacccccggtgctgactgggcctatgccatcagcgcaggtatcaacggccgtcgcgtcgttccggcggtgatggggctgatgtcaggacatctgctggcaacgattatcgtcgtcgccggcgtcggggtgttaatcgccggtcatccgctggcgctatcggcgatcacgctggcgggcgcggcctatttattgtggctcggggtcatgacattacgccatccggcggcgccgggcgcggcgcaacaatcggctggcagctggaatgcgtgggcggtgaaaggattatgcattagcggccttaatccaaaagtttttctgttgttcctcgccctgctaccgcaatttaccgatccgcacggcagttggccgctggcgctgcagatgtcggcgctgggtgcgatgcacctgatgacctgtacgctaatttatctgttggtcggctatgggtcgcgggcggtactggctgcccgcccgcaggcggcgaaaggagtgagcatggtttcagggcttatcatgattgccattgcgattatcctgttttaccagcagttaagataa

SEQ ID NO: 89283 - DNA, 162 bp, Enterobacter aerogenes
atgaacaggacgtgtaaacctccaggaaaaccgatgtacatcaaatgcctgagcgcttcgcatcaggaattcgcctgcgtacagcttgcgggcgatgaagccacttcattatatccacaggatttcgcgcagctttgccgcgataaagtccttgttacctga

SEQ ID NO: 89284 - DNA, 606 bp, Enterobacter aerogenes
atgaagaataatagtgacattaaaaaaaggaacttcctgactcaaaatgaaatcgagtcattactcaatgctgccaatagcggacctcatgcagctcgtaattattgcctgacattactttgttttattcatggctttcgtgccagcgaaatttgtcgcctgcgaatttcagatattgacttacgttcaaaatgtatttacatccatcgattaaaaaaaggtttctcaaccactcatccattgctgaataaagagatccaggcgctaaagcgctggctggatattcgtgatgaatatccacaatccaccagcgaatggttatttttatcgcgtaagggtaatcctctgtcgcgccaacagttttaccagatcatttccgcctccggcgatcaggcaggattaccgctggaaattcacccgcacatgttacgccattcctgcggctttgcgctggctaatatgggcatcgatacgcgacttatccaggattatctcggccaccgcaacattcgccataccgtctggtacacggccagtaacgccgggcgcttttatggtatctgggataattcccgcgagaagcaaagaatctcgcttttccagtaa

SEQ ID NO: 89285 - DNA, 597 bp, Enterobacter aerogenes
gtgaaccgacgtcgttttctcaccgccaaagaagttcaggcaatgatgcaggcggcccagcacggcccaaccggcgaacgggattactgtctgatcctgctggcgtttcgccacgggatgcgtatcagcgaattactcgatctgcactatcgcgatctcgaccttaacgaaggacgcatcaatgttcgccgcttaaagaacggtttctctaccgtacatccgctgcgttttgatgaacgcgaagcaatagaacgctggacacagcaacgggccggctggaaggcagcaggcaaaagcgacgctctatttatctcgcgccgcggcaccccgctttcacgacaacaggcctatcgcattatccgcgccgccggggaagaagcgggaaccgtgacgcatacgcatccgcatatgctgcgtcatgcctgcggctatgaactggcggaaagaggagctgatacccgtttgatacaagattatctcggacatcgtaatattcgtcatactgtccgttataccgccagtaatgcagcgcgttttgccgggatttgggaaagaaacaatctgttagaggaaaatttacaagcgcggaagaaatag

SEQ ID NO: 89286 - DNA, 549 bp, Enterobacter aerogenes
atgaaaatcaaaacactggcaatcgttgtcctgtcagctctgtccctgagctccgcggcggccctggccgataccaccacggtaaatggcggaacagtgcattttaaaggagaaatcgtcaacgcagcctgtgcagtcgatgccggttctatcgaccagaccgttcagttaggccaggttcgttcggcaaaactggctaccgcgggcagcaccagctccgctgtaggtttcaacattcagttagacgactgtgatacctctgtcgccaccaaagcctctgtcgctttctctggtaccgcggttgacagcaccaacaccagcgttctggctctgcagagctccgctgctggcggcgcgaccaacgtcggcgtacagatcctcgacaaaaccggcactccgctgggcctggatggcgctaccttcagcgcggccaccacgctgaacgacggcaccaacatcattcctttccaggcgcgttactacgccactggcgcggctactgccggtactgctaacgcagacgccaccttcaaagtgcaatacgagtaa

SEQ ID NO: 89287 - DNA, 513 bp, Enterobacter aerogenes
atgtttatgtttccgccgctggcgctggccggcaaccactggaacgtcacggtggctgggggaaacatgcgttttcaaggcgtcatcatcgctgagtcctgccgtgttgaagccggcgaccagcagatgaccgtcaatatggggcagatcagcagtaatcgctttcattcagccggggaagatgccaacccggtgccattcgatattcaccttcaggattgcagcaccgcagtcagccagcatgtcggcgtgtcttttcgcggcgtggccgatggcaaaaatccggatgtgctctcggttggcgaaggaccgggtatcgccaccggcgtcggcatcgcgttatttgataacgaagatcaattgattccgctgaatagcccgccgggcgcctggcggcggctgtataccggccccaccacgctacattttgtagccaaatatcgggcgaccggcaatcaggtcaccggaggagcggcaaacgcgcaagtttggttctccctgacctatcagtaa

SEQ ID NO: 89288 - DNA, 726 bp, Enterobacter aerogenes
gtgagtacaaaaggggtaaacgtgaaaaagagactggggatgacgcgcggactactggcgggattattgatgatagccgcaagcggttactccgcctgggctcaggccggcgttgcgctcggcgccacgcgggttatctatccggccgggcaaaaacaggtgcagttaggggtgaccaataatgatgacagcagcacctatctgattcagtcgtgggtggaaaacgccgacggcggcaaagatggtcgcttcgtgattacgccgccgctgttcgccatgcagggcaaaaaagagaataccctgcgcatcattgacgccaccaataaacaactgccgcaggatcgcgaaagcctgttctggattaacgtgaaagccatcccgtcgatggataaatccaaactgagcgacaacaccctgcagctggcgattatcagccgcatcaagctctattaccgcccggcgaagctggcgctaccgccggatcaggcggcggaaaaactgagctttagccgcagcggttcgtcgttaacgttgactaaccctaccccttattacctgaccgtcaccgaacttaacgccggcacccgggtgctggaaaacgcgctggtgccgccaatgggtaaaacctccgtcaagctgccgccggatgccggtagcaacattacttatcgcacgattaatgattacggcgcgctgaccccaaaaatgactggcgtgctgcgttaa

SEQ ID NO: 89289 - DNA, 2634 bp, Enterobacter aerogenes
atgtcacatctcaaatatggacaggaccgttttggttcccgcagcgcgaggctccgcccacgcgctattttggccatggcgaaactccccgtggcgctctgttttgtcctgcaggcgggctacgcgcaggctgaactctattttaacccgcgttttttagctgacgatcctgcggcggtggccgatctttccggtttcgaaaacgggcaagaggtgccgcccggcacctaccgcgtcgatatttaccttaacgacggctttatgaccactcgcgatgtcacttttaaccgcggcgaaaaaggccatgggttaagcccgtgcctgacccgcggccaactggctggcatgggggtcaataccgcggcggtgaacgggatgagcgccctcgccgccgacgcctgcgtgccgctgaccgaacttatcactgatgccacgacgcgcttcgatgtcggccagcagcgcctgtacctcaccgtgccgcaggcttttatgggcaaccgcgcgcgcggctatattccgccagaaatgtgggatgacggcatcaacgccgggctgctgaactacaacttcaccggtaacaacgtccataacgataccggcggcagcagcaactacgcttatttaaacctgcaaagcggcctcaatctcggtgcctggcggctgcgtgataacaccacctggagctacagcagcggcggcagcagttccagcaatgagaacaaatggcaacacgtcaacacctggcttgagcgcgacatcacaccgctacgctcgcgcctgaccctcggcgatagctacaccaacggcgatattttcgacggcataaacttccgcggcgcccagctggcgagcgatgacaacatgctgccggatagccagaagggctttgcgccggtgatccatggcatcgcccgcggcaccgcgcaggtgtcgatcaaacaaaacggctatgagatttaccagagcacggtcccgccgggcccgttcaccattaacgatctctatgccgcaggcaacggcggcgatctgcaggtgacgattaaagaaaacgacggcaccagccaggtcttcagcgtgccgtggtcaacggtgccggtactgcagcgcgaagggcacacccggtacgcgctaaccgctggcgaatatcgcagcggcaacgatcagcaagaagagccgaagttctttcagagtaccgtgttacacggtctgcctgcgggctggacgctgtatggcggtacgcagctcgccgaccgctaccgcgcctttaatctcggcgtggggaaaaatatgggcgatttcggcgccgtgtcactggatgtcacccaggccaatgccaccctacccgacgacagcgatcatcaggggcagtcaattcgcttcctctataacaagtcgctgagcgatgtcggcaccaatatccaactggtgggctatcgctactctactaaaggttattacagctttgccgatactacctaccgccggatgagcggttatgacgtagagacccaggatggcgtaatccaggtgaagccgaaattcaccgattactacaacctcgcctacaacaagcgcggcaaagtgcagctaagcgtcacccaacagttggggcgtaccgccacgctctatttgagcggcagccatcagacctactggtcaaccggcaaagcggaccagcagctgcaggccgggctcaacgcggcggtggacgacatcaactggacgctgagctacagcctgaccaaaaacgcctggcagcagggccgcgaccagatgctggcggtcaacgtcaatattccgttcagccactggctgcgttccgacagcaaatcggtatggcggcacgccagcgccagctacagcatgtcgcacgatcttgatggccggatgaccaatctggcgggactttacggcaccctgctggaagacaataacctgagctatagcgtgcagaccggctacgccagcggcggcgaaggcgatagcagcggcaccggctatgcggcgctgaactatcgcggcggctacggcaacgccaatgtcggctacagccgcagcgacggtttcaaacagctctactacggcgtcagcggcggtgtgctggcccacgccaacggcgtgaccctgagccagccgctgaatgacaccgtggtgctggtgaaagcgcccggcgccggtgatgtcaaagtggaaaaccagaccggggtgcgtaccgactggcgcggctatgcggtgctgccttacgccaccgaataccgcgaaaaccgggtggcgctggataccaatacccttgccgataacgtcgatctcgatgacgcggtggtcagcgttgtccctacccacggcgctatcgtgcgggcggacttcaaagcccacgtcggggtcaagttactgatgacgttgacccataacggcaaaccggtgccgtttggcgcgatggtcacctctggcagcaatcagagcggcagtatcgtggccgataatggccaggtctacctgagcgggatgccgctcgccggcagcgtgcaggtgaaatggggcgaaggcgcggacgccagctgtatggccagctaccgcctgccggaagagagtcagcggcaggcgctgagccagctatcggcagagtgccgttaa

SEQ ID NO: 89290 - DNA, 528 bp, Enterobacter aerogenes
atgaaaaaaccacttaacctgttcggcgccatcctgacgctggtctgcgccaacgcctttgcggcggacagcaccatcaccatcagcggctacgtgcgcgacaacgcctgcgcggtggccaccgaatcgaaagagtttaccgtcgatctgatggataacgccgcgaagcagtttaacgccgtcggcgcaaccacgccgctggtgccgtttcgtatcgtgctgtcgccctgcggcagctcggtgacggcggtcaaagtcggctttaacggcactccggatagcgacaataacgacctgttaaaaatcgacggcggcgcctccgcggcggcgggcatggcggtgcagatcctcaacggccagcagacgatgctgccggtcaacgcgccctcttcgtcgctcgcctggaccaccttaacgccggggcagaccaacaccctcggtttttacgcccggctgatggcaacccgcgtaccggtgaccgccggtcacgtctatgccaccgccacctttacccttgaattccagtaa

SEQ ID NO: 89291 - DNA, 504 bp, Enterobacter aerogenes
atgaaagcacactacgcaggatggcttctggcaggcgcgctggcgttaaacattatcccgctgcaggccgccgacatcaccatcacggtgaacggcaaagtggtggccaagccgtgtacggtctccaccactaacgccagcgtcgacctcggcgatctttataccttcagcctggtatcggcgggttccgcttcggcctggcacagcaccgcgctggatttaagcaactgcccggtcggcacgtcacgcgtcgtcgccacctttagcggcaccgcggacagcaccggctattacaagaatcagggtaccgcaggaaatatccagctcgaactacaggacgacagcggcaccacgctcaataacggggcgcaaaagtcggttcaggtcgacgaaagctcgcagtcggcgcgttttccgctgcaggttcgggccctctcggttaacggcggcgccacccagggaaccattcaggcggtgattagcgtcacctatacctacgcctga

SEQ ID NO: 89292 - DNA, 903 bp, Enterobacter aerogenes
atgaaaaaaatcatcgctctgtttaccgcactgctgctgatgggctggtcgctggacgtcgcggcattcacctgtaaagttgccgacaccgggcaaactatgacttcaggcgcggcgaatgtttacgtcaacttaacgccctctattggcgtcggccaaaacctggttgtcgatttatcttcttccatcgtctgtaaaaatgactccagcggcggctccattattgactatatcaacctcaccagtggctcagcattcggtggcgcgctggaggcatttaccgggagcatttattgggcaggcaatacttacccattaccgatgaactcgaactcgtcggtctacatcatcacccacacagattatcgtggattaccgttgcgcatgtaccttaccgcaaccggtgctgcgggcggggtcgtgattaattctggcgagcttatcgcgcggctcaatatgcataaagtggccagcgacggaaacccgagagatttcacctggaatatttatgccaataataatgtcgtggtaccaacgggcggttgcgacgtgtcagcccgtgatgtcacggttacgcttcccgactatccgggttccatggccgtgcccgtcacggttcactgcgcgcaaaatcaaaaccttgcctattacctgacgggcaccaccgccgatagcgccaattccatatttcgcaataccgcttccgcttcgccggcacagggtattggcgtccagttgacgcgtaacgggaccgccgttccggccaacagcaatgtctcactgggtacagttggcacttcgccggtgaatctcgggctgaccgccacctacgcgcgcaccagcggtcaggtaacggcgggtaacgtccagtcgattattggggtgacgtttgtctaccagtaa

SEQ ID NO: 89293 - DNA, 1416 bp, Enterobacter aerogenes
atggcggcggcgggattagcccgcatggtcgacgacggttgccgccagcctgtgtggctacagccgcgggtgcagagcatgctgtcgatatctgcgccagccgacgtccggcaaatcgtggtttttctgcccgacgatccctggtggctactgttcgtcctgcgcgaagccgcctggttactcaaccaggccaaacgacctttgcctatggtgatcttaagccgcagtccggcgccgtggttatggcaaaccttactgcaccaggttggcgaccgccgcctgctggccgccgtgcaggcggtctcttccgatctaccgtgccgccgtctggcggcattgttgaaaggcggcctggtcggctaccccggcctgcaacagctttcggccatcgaggcactggcgcgcggcaaaccgccgtcgggcttaagcaaaatcgaacttaacgccaccctcgccctgctgtatggccacagcatcaccagtcaggcgcagatccgcggcgtcagtcagaaaacgctctacaaccaaagaacctcaggactaaacaagatggtggagtatcatccgcatctggcgagccggtttccgggcagccgaagcaaacgcgtagctggtcagggcatgaccgcgctgacccccttcgaacgtgagtttatccatgctattcacagccggcagatctttccggtctttcagccgattgtcgacgagcgcttacgcctgcagggcatcgagatcttatcccgctggcgcaaagatggcgtggtactgccgccgggcgaatttctcccgcatattcactccgaatacgcctggctattactgaccgcctttgtcctgcaggaagcggtgcagaatatcaatcgctatcagggcgagttctatttttcggtcaatatccctccctgcatcgcctatcacgataatcttgcccgtatgatggaaaccgcctggcaacagctacagaacccgcagtgggccaaccggctggtgctggaatttgctgaaaccgtcgatttacagcagcaaggaaaagcggtggagaatatgagtaatattcagcagcagggctttcgcatctttctcgacgactgcttctcgcacagcagcgtgatgttcccggtacgcacggcgcgttttagcggctacaagctggatatgagcatcgtcaatgattttcagcgcgacccgcacgcgctggtgttgattaaaagcctggtctactactgccagttaacgcagaaccgctgcatcgccgagggggtagatagtctggagaaatttaatcagctaaaagcgctgggagtcgatcgtttccaggggtatctgttctcaccaccggtcactcgcgagcatctgggagagatcatttctcgatttttaccggatcatgccacctgccggttggccggataa

SEQ ID NO: 89294 - DNA, 273 bp, Enterobacter aerogenes
atggaaattctggaaggccataacaagttctacgttaatgacgccgagggaaaccaggtggcggaaattgtctttgttccaaccggtgaacatctgagcattattgagcataccgatgtcgatcccagcctgaaaggccagggcgtgggtaaacagctggtagcgaaagtggtcgaaaaaatgcgccaggaacagcgcaaaatcattccgctgtgcccgtttgccaaacacgaattcgataacacccgcgagtacgacgacattcgcgcctga

SEQ ID NO: 89295 - DNA, 231 bp, Enterobacter aerogenes
atggataaagaactactggacgcgggctaccgggcctataccggcgagaagatagatgtctatttcaataccgatatctgtcagcactcgggtaactgcgtgcgcggcagcgcgaagctgttcaatctgaaacgtaaaccgtggatcatccccgatcaggtggatgtggcgacggtggtcaaagtgatcgatacctgtcccagcggcgcattgaagtatcgccacaaataa

SEQ ID NO: 89296 - DNA, 273 bp, Enterobacter aerogenes
ttgaagcaaattgtaaaacgggcgcgcccggcattgttattacttcttttggcggtctccggttgctctttatcccccgccataccggtattaggcgcagcattccccggctggttcttctgctttttaggcggcgcattactgctgatcccttgtcatatcctgattgcccgtaaaggctggcaggcgcgcttttccccgctggtattaagttacctggcgttaatgtttctatttgccactattctgtggtttcttcttttcgcacattaa

SEQ ID NO: 89297 - DNA, 1029 bp, Enterobacter aerogenes
atgactcaatccagcccaagcgttttacggaaaaaatggcccttgttggctctcgtcctcgccgccattgtggcgctgatcgtggttatctggcagttgcagacttcaccggaaaccaacgacgcctacgtctacgccgacaccatcgacgtggtgccggaagtcagcgggcgaatcgttgaaatgccgatccgcgataaccagcgggtgaagaaaggcgatctgctgttccgcatcgatccgcgcccctatcaggcgatgctggacgatgctaaatcacggctggcggcgcttgatgcgcagattatgctgacccagcgcaccatcaaagcccagcagtataacgctcagtcggtgagcgccgcggtagagcgggcgaaggcgctggtgaaacagactacctcgacccgtatccgcctggaaccgctggtgccgcagggattcgccgcgcaggaagatctcgatcaggcgcgcaccgcggaaaaagccgcccgcgccgaactggaagctacgctgctgcaggctaaacaggctgatgccgcggtcaccggcgtcgatgcaatggtcgcgcagcgcgccgggatcgtcgcgcaaatcgccctggcggaactgcacctggagttcaccgaagtccgtgcgccgtttaacggcgtggttatcgccctgaaaaccaccgtcggacaatatgcttccgccctgaaaccggtctttacgctgctggataacgaccactggtatgtgattgcgaacttccgcgaaacggatctgcaaaacgttcggcctggcgtgccggcaaccgtgacggtgatgaccaaccacagccgcccctttgacggcgtcgtcgattccgttggttcaggcgtactgccggagggcggtagcgtcattggcgggctgccggtgattcagaagagcatcaactgggtacatgtgtcgcagcgcttcccggtcaaaatcgcggtgaaagatcccgacccggaactgttccgcatgggcgcctccgccagcgccgtgctgcaggcgaaataa

SEQ ID NO: 89298 - DNA, 1932 bp, Enterobacter aerogenes
atgcataacttctggttgtttctgcaacgggaactcgccgacacgccggggcgggccaactataccctgcgcctgacgctgagctgcgcggtgctgatcaccctgtttatgaccctgcagatcccgtttctcgccgtggcgctgatcgtggtgttttacgtcagccagccgaacattctgatgattaagctgggcagcgtcctgttttttgtcaccatcagcgttgcgctggggctggtgctgctgatcatcaagtggacctatgatttcccgctgattcgcctggtcgcttcggtatgcctgttctttggcgcgatgtatctgatgcgcgtgctgggcaaactcgggctggcgtttttcgtggtggcgctggcggtgatttatgcccagaccttcccgtcaatgaccagccaaagtgaagttctggtgcgcctgctgctgtggctttgggtggcgatcaataccgcaacgctggtcacgctcctggttaacgcctgctttcgccaggccttccccggctaccaattccgcgcccaactggtggtgatgcagcggcaggtcgccgacgtgctgacgcagaacgccgcgccgccgaccttcaaagagatcgccgggcgttttaatcagttgcaaggattgtttaagcaggcccgttttgcggcgccggaaattgccgccgatccgtcgcgctggcaggcgctgatggcgaccaccctgcgctgctatcacctcgcggcgctgctgcaaccgggcgacgatcacgccgcggcgcgccagcagatcgccgccgcgctacaggcgctggcgccgtcgatgaacgagggtacgccgttttcattctccgcgccggccattgatgatcgcggcgccaatacgctgattttacaagagatggcggatgtactggcgaagctggcgcgcggtgaaaccatcgacctgccgcagggtgaagccgagaagtcgccgctgctgctgccggatgcctggcgcaatcccgcttatctgcatttcgccctgaaaaccctgctggcgacgctgctgtgctacgtcttctataccgccgcggactggcaagggatccacaccatcatgctgagctgcgtgattgtcgcccagccggggctgggggcgacgatgcaaaaaacctggctgcgtatcggcggcgcgctgctcgccacgttgctggcgctattgttgatcgtctttgtacaaccgtggaccgagtccatcgtcggcctgctggcgatggttttgccggtaatggcgctctcggcgtggattgccgccgggtcagagcgtattgcctacgccgggatccaaatcggctttaccttctcgctggccttcctcagctggtttggcccactgaccaacctgaccgaactgcgcgaccgggtcatcggtattttgctcggcgtactggtctcatcgatcgtccatctttacctgtggccggatagcgaagcgccacagctgaaatcgcggctggcgcaactctatcgccaaatagccgacttcctgcgcacgaaagatgataagccgcagatggtgccgctgttccaggcgctgaccaccagcgaaacgctgatgcatcgggtcgccgccgagccgctgggcacctttgcgcatccgtggccgcaggcgaaatcctggccgagcaaagccacctggcagcaggcgcaggagatagtacgcctgagcgagggctaccggctgtatgccgcgccgggagaccccttcttaagccgctgcgccgaacagttacaggcgtatgccgataatattgaacgtcagcagccgagggcgcccgtcgcgccgctggttgtcgatccggctaatccgttcggcgaaccgctggcggctttactggccaccctgccggactggtcagacaaaccttctgaatttacgcgacaggcagaaccgtcatga

SEQ ID NO: 89299 - DNA, 1473 bp, Enterobacter aerogenes
atgataaaaatggatgccgcagcacgttttctgcgctactcaccgctggccttcgtcatcagcctgttgacaggatgcgcgctgattcaggacgatcctggcgaagtgccgatcgttaatccgcaacaggcgcagctggcgcaggtgatccacctggcgaatagcggctggccggcggcccgctggtgggaagggtatcacgatccccagctcaacatgctggtaaaccgcgcgctgcaaaattcgccgaccatgcaggcggcgcggctacgcatctcacagtcacaatccaccgtcgagctggcgcagtcggcaatgggcgtgcaggcgaccgccgtggcggcgcagaaccggatgcgtataaccgataaatcctttagctggccctactcctattctctgccggtggataaaaacggcccgtggtacacgctcaataccgtgggcgtcggcgcgacgctgaatatcgatttatggggcgccgaccgggcccgcgtcgcggcggctattggcgaaaagaacgctcgccaggcggaaaccgccggtatcgaactggacctcgccagcagcgtggcgcagctgtacttcgccatgcaggccaccttccagaagatcgttctgctgcagcagctagaagaaatagcgcggctgtcggtacaggcgcatgaacaccgcacccagcgcggcgtggaggatagcgtcgatatcgccaatgcgcaggcggaactgctgggcgcgcagcagcaggtgattaccgcccgcggcacgctaacccagtaccgtgaaacgttgcgggcgctgattggcgccgacgcgcagagtatgccggagatccacccggtcgccctgccggcgttgcaggaaacgctgccggattcactctccttcgaattgctggcgcgtcgcccggatctgcaggccctgcgcggttatgtgaccgcttctatgagccaggtagatgcggcgaaagcggccttttatccgcgttttgatattaaagccttctggggatataacgcgctgagcgttggcgatctgtttaagtcgtccttccagcagattaacctgctgccggggctgtatttgccgatattcgatggcggccgcctgaacgccaatctcaagtcggtacgtacggcgagcaatatcctgattaagcagtacaaccaggcggtgctggatgcggtacgggacgtggcgataagctccagtcagcttaacgatctcaaccagcaggtggcgctgcaggagctgaaggtgacggcagcgatggccaccacccgcagcgccagcgcccatcaccagcgcggcctgttaagccgctatgccgcggaagaagcgcggcgaccggccatcgcccagcagctgttattgctggatattcaggcccagcgccttagcaccgatatcacgttgattaaagccctcggcggcgattaccgcggcccggcggtgggttctgcaaaaccgtaa

SEQ ID NO: 89300 - DNA, 1551 bp, Enterobacter aerogenes
atgcattcctctgttaacaaaaatgaaagccggaccttctttggtcacccttaccctctgggatcgctgttcttcaccgaaatgtgggagcgattctcgttttatggcattcgcccgttattaatcctgttcatggcggccaccgtctatgacggcggtatgggcttagcccgtgagaacgcgtcggccatcgtcggcatcttcgcgggcgccatgtacctggcggcgctgccgggcggctggttggcggacaactggcttggccagcagaaagcggtatggtacggctcgattctgatcgcgctgggccatctgtcgattgcgctgtcagcgtttatgggcaacaacctgttttttatcgggctgatgtttatcgtgcttggttccggactgtttaaaacctgcatctcggtgatggtcggtacgctgtataagaaaggcgatagccgtcgcgatggcggtttctcgctgttctatatgggtatcaatatggggtcgtttatcgcgccgctgatttccggctggctgattaaatcccacggctggcactggggcttcggcatcggtggtatcggtatgctggtggcgctggtgattttccgccttttcgcggtcccggcaatgaaacgctacgacagcgaagtgggtctcgactctacctggaatagtcctgtggcgaagaaaaacggcgttggcgcctggctgctggcgctggcggtcggcgtggcggtggtgattacgctgattgctcagggggtgatagtcattaacccggtggcggtcgccagcatgctggtgtacgtgattgccgcgtcggtggtgctctatttcatctacctgttcgtttttgcgggacttaaccgtaaagagcgcgcgcgtctgctggtctgctttattctgctggtttccgccgccttcttctggtcagccttcgaacagaaaccgacctcctttaacctgtttgcgaacgactacaccaaccgcatgattggcgatttcgaaatcccggcggtgtggttccagtcgattaacgccctgtttatcatcctgctggcgccggtatttagctgggcatggccggcaatggcgcgcaaaaacgtgcgcccgagcagcatcaccaagtttgttatcgggattctgtgcgcggcggcgggcttcggcctgatgatgctggcggcgcagaacgtgctgagcaacggcggcgccggcgtatcgccgctgtggctggtgggcagcattctgatgctgacgctgggcgaactgtgtctgagcccgataggcctggcaactatgaccctactggcgccggaaagaatgcgcggccagatgatggggctgtggttctgcgccagcgcgctgggtaacctggcggcggggctgattggcggccacgtgaaggccgaccagctggatatgctgccggatctgttcgcccgctgctcgacggcgctgctgatctgcgctgcggtgttgtgcgtgctgattgtgccggtgcgccgtatgctggagaacagtaaatccgtcgagcaaaaaccggcgaccaatgcctga

SEQ ID NO: 89301 - DNA, 2199 bp, Enterobacter aerogenes
atgactgatttaaaaattgccgttagccgtacatgtccaaactgtttttctacccagcgtaatattgtcaatactagcgaaaccaactttattgatgtggccgcggtagtattaaccctggaagatatcgaatgcggtaaactcgatgagttaaaggccaccggctataacatcccggtatttatcgctattaataaagaagaggttgtcccggccgagtatatggcttcggtgcagggggtatttgaacacgacgaaacccgcaacgacttttacggccgccagctggaagccgctgcgcataaatatgaaaccgaactgcgtccgccgttctttagcgcgctggtcgattacgttaaacagggcaacagcgcctttgactgcccggggcatcaggggggggaattcttccgccgtcatccggccggtaatcagttcgtcgagtatttcggcgagacgctgttccgctccgacctgtgtaacgccgacgtcgccatgggtgacctgctgatccacgaaggggcgccatgcattgcccaacagcatgcggcaaaagtctttaacgccgataaaacctacttcgtgctcaacggtacctcctcttctaacaaagtggtgctcaacgcgctgctgaccccgggcgacctggtactgttcgaccgtaacaaccataaatccaatcaccacggcgcgctgctgcaggccggggcgacaccggtctatctggaaaccgcacgtaacccgtatggttttatcggcggtatcgacgcccactgtttcgaggagcgctatctgcgcgagctggtcggagaagtggcgccgaatcggaaacaggatgcccgcccgttccgcctggcggtgatccagttaggtacctacgacggcaccatttataacgctcgtcaggtggtcgataaaattggtcatctgtgcgattacatcctgtttgactccgcgtgggtcggctatgaacagttcattccgatgatggctgattgttcgccgctgctgctggagctgaatgaaaacgatccgggcattctggtgacccagtcggtgcacaaacagcaggccggtttctcccagacctcgcaaatccataaaaaagacagccatatcaaaggtcaacagcgctatgttccgcacaagcgtctgaataacgcctttatgatgcacgcctccaccagcccgttctatccgctgtttgccgcgctggatatcaacgccaaaatgcatgaaggcgagagcggccgcaacatgtggatggactgcgtcatgaacggtatcaaggcgcgtaagctgatccttgaaagctgcaaacacatccgtccgttcgtacccaaaatggtcgatggcaaaccgtggcagtcatatgaaaccgcgcaaatcgccgtggacctgcgcttcttcgagtttggtccaggcgaacgctggcatgcctttgacggttatgccgagcatcagtacttcgtcgatccgtgcaaactcctgctgaccacgccgggtatcaataccgccagcggcgaatatgacgccttcggcgtaccggccaccattctcgccaacttcctgcgtgaaaacggcgtggtaccggaaaaatgcgaccttaactccattctgttcctgctgaccccggcggaagatatggccaaactgcagcagctggtcgccctgctggcgcgcttcgataagctgctcgacgccgatgcgccgctacaggaggttctgccgtctatctacagccagcacaaagagcgttatgccggttataccctgcgccagctctgccaggaaatgcatgacctgtatgcccgtcacaacgtcaaacagctgcaaaaagagatgttccgtaaagatcacttcccgcgggtggtgatgaacccgcaagaggctaactacgcctatctgcgcggccaggtcgatctggtgccgctgccgcaagccgaaggccgcgtggccgctgaaggcgccctgccttacccgccgggagtgctgtgtgtagttccgggcgaagtctggggcggcgcggtgctgcagtacttcaccgcactggaagaagggatcaacctgctgccgggcttcgcgccggaactgcagggggtttatatccaggagcacgatggccgtaaacaggtctggtgctatgtcatcgcggaaagcgagaaacaaagcgcgctgctgaaaggggaaactgtatga

SEQ ID NO: 89302 - DNA, 1317 bp, Enterobacter aerogenes
atgagcaaatccagtaacaagatgggagtggtacagctcaccatcttaaccatggtcaacatgatgggctccggcatcatcatgctgcccaccaagctggcggaggtggggactatctccatcatctcctggctggtgaccgcggtaggatcgatggcgctggcgtgggccttcgccaaatgcgggatgtttagccgtaaatcaggcgggatgggcggttacgccgagtacgcgttcggcaagtctggcaactttatggccaactatacctacggcgtctcgctgctgatcgccaacgtcgccatcgctatctccgcggtgggttacggcaccgagctgttcggcgccaccctgtcgccggtgcagattggcctggcgactatcggggtgctgtggatctgtaccgtagccaacttcggcggcgcgcgcattaccggccagatcagtagcatcaccgtatggggggtcatcattccggttgtcggcctgtgcgtcatcggctggttctggtttagcccgacgatgtacgtcgagtcctggaacccgcaccacgtaccgttcttcggcgccgttggttcgtcaatcgccatgacgctgtgggccttcctcggtctggaatccgcttgcgccaacaccgatgtggtcgaaaacccggaacgtaacgtgccgatcgccgtactcggcggtaccctcggcgcggcggttatctatatcgtttcgaccaacgtcatcgccgggatcgtgccgaacatggacctggctaactccacggcgccgtttggcctggcgtttgcccagatgttcacgcctggcgtaggtaaagtgattatggggctgatggtgatgtcctgctgcggttcgctgctcggctggcagttcaccatcgcgcaggtctttaaatcatcgtctgacgaaggttacttcccgaaaatcttctcccgcgtctcggcttccggcgcgccgattcaggggatgctgaccatcgttatcctgcaaaccggcttgtcgctgatgaccattagcccgtcgttgagcaaccagttcaacgtgctggttaacctggcggtggtgactaacatcatcccgtacattctgtcgatggcggcgctggcgattatccagaaaatggccaatgtggaaccgggcaaagcgcgatccaccaacgtgattgcctttatcggcgcggtgtacagcttctatgcgctgtactcctccggcgaagaggcgatgctctacggcgcgatcgtgacctttatgggctggacgctgtacggcctggtatcaccgcgttttgagatgaaaaacaaacacagctaa

SEQ ID NO: 89303 - DNA, 273 bp, Enterobacter aerogenes
gtgtcgcatacgattcgggataaaaagaagctgcaggccagagccagcaagattgaggggcaggtgagcgcgctgaaaaagatgctggatgagccgcacgaatgcgccgccgtgctgcagcaaattgccgctattcgcggagcggtaaacgggctaatgcgtgaagtgatcaagggccatctgacggaacatatcgttcatgaaggcgatgaagtgaaacgtgaagaggatttggacgtggtgctgaaggtgctggattcctatatcaaatag

SEQ ID NO: 89304 - DNA, 1107 bp, Enterobacter aerogenes
atgaacgaattcttacctttacttcagcagggcaatgcctggttctttatccccagcgccattctgttaggcgcgctacatggcctggaaccgggccattcaaagaccatgatggcggcgttcatcatcgccattaaaggcacggtacgtcaggcggtgatgctgggcctcgccgcgaccctttcgcataccgccatcgtctggctgatcgcctttggcggcatgtattttagccagaaatttaccgccgaagcggctgaaccctggctacagctggtttccgcgttcatcattctcggtaccgcaatatggatgttctggcgcacctggcgcggtgaacgtaactggctgcaggccatgcaggatcgggatgcgcatcatcatgatgatgaaacgcaaatcgtcgacaccggccacggtcaaatcgccctttccatcttcgaagaaggagaaccgccgcgctggcgcattcgcacgctaagtggcaaccaatgggccgctggcgatgtctcactggcgacacggcgcagcgggagcagcttcgcgcagatgttctcttttgttgataaaggcgattatttagaatccgcgcagaccatcccggaaccgcatgactttaacgtacgcctgacgctcggccaccagcgccatacccacgattatgatctggcgtttcatgaacatcatcatcatgaactggacggccttgaggaaggaagtcaggcctatcaggacgcccacgagctggcccatgcgaacgatattcaacgtcgattcgacggccgggaggtcaccaactggcagatcttactgttcggcctgaccggcggattgattccctgcccggcggcgatcaccgtactgcttatctgcatccagctcaaagccctgaccttaggtgcgacgctggtcctctctttcagcatcggcctcgcgctgacactggtcaccgtcggcgttggcgcggcggtaagcgttcgccaggtggccaaacgctggagtggttttaacattctcgcccgtcgggccccctacttttccagcgtgctaatcggcgcggtggggatctatatggcgatccacggctatctcggcgtgagaggttaa

SEQ ID NO: 89305 - DNA, 657 bp, Enterobacter aerogenes
atgtccgagttccagcgcccacagctgacgttgcccaacggagccgataaactgctgctccactcctgctgcgctccctgctccggggaagtgatggaggcgattcaggcctccggtatcgactacaccattttcttctataaccccaacattcacccgcagaaagagtatgaaatccgcaaggaagagaatattcgttttgcgcacaaacacggtgtgccgtttatcgatgccgattatgacaccgataactggttcacgcgggccagggggatggaatgggaacccgagcgcggcgtgcgctgcacgatgtgctttgatatgcgcttcgaacgcaccgcgctctatgcctacgagcacggctttagcgttatcagcagttcgctgggaatttcacgctggaagaacatgcagcaaatcaacgactgcggcgagcgcgccgccgggcattatccaggcatggtctactgggattataactggcgtaaacagggcggatcctcgcggatgatcgatatcagcaagcgcgagcgcttttaccagcaggagtactgcggctgcgtctactcgctgcgcgatagcaatctgcaccgtaaatcccagggccgaccgctaattaagatcggcaagctctattatggcgatgaaggtgaatag

SEQ ID NO: 89306 - DNA, 237 bp, Enterobacter aerogenes
atgcgcataagatttttctgtttattaacttcttttttcatcgttctcttcccgttgggtgggctgttagattatttatcccggactagcaacgatttcttgaacagcaccggtttgggttttgccgatggggatgccgacccctctttcttgtgggttttgctgacgttgatgatgattgtgaccgtggggttgaactatctcatccgtaagattgtgccaggaaatagagtatga

SEQ ID NO: 89307 - DNA, 591 bp, Enterobacter aerogenes
atgattgagcatataaaaaacagccttgtgttaaatattgatgtggaaaaaaatcttgcgtcaatgagtccccgacaacttgagatggttaagcagcgattgaccgaatatgtaggagcaagagtcgggggacatacgctcagtattccaatggtgggcggaatactatttgctgttttttgctttgttatgccgcaaattaccgtgtgggaaattattttcaggcttaatggatggcctgattatgctatactggctgcggcttttccctcgggagttttgtatagcatattgatttgtattccggcgtttcttactgcacgaggccgattgataggtctgaaatctcttttatgtgtcattactgggacaggaatcattgcaatagcatttttattattcgctgttattactttcattatggggggaggtaatgatgcgggcgatctcctcggtgctattttaggagtgttttttatcgcgatcggcatcaaatgcctcaatacggttatgttcactaaaacaatcgcattttacttactaaatcgggtctcccgccagcaaataaaattgaaacactcgtctggttaa

SEQ ID NO: 89308 - DNA, 969 bp, Enterobacter aerogenes
atggttgaatattattttggccatgatggcctccacaatatctctccttttgatagaccagcaacatggggagggccaggtccagttgattttaattttcatgatctagcaaaacaattggactgttcgcggaatttcaatcgagttggtattatttattctaatggtgtgagccaatggttggtaagaccttcccggcggattgccaattcggtccaaagcatagcaagtcatgttattgtcacaaaggtttgcgatatctcacaagaaagttccacaaaagctattgttaagacacttcaggcaccatcactggccaccgaaattacatcaacggcactttcatgcggagcggctgcaatcacattagcccttactcttactggaacggcgatacttccccttacggcaggagcatcggtgctggtagccggagttattgctgccagcggcgtagctaccgttgggcaatgttttatcggtgcgggaaggttatggacaataagcagaggtagggaagagcgtttagcatggcttgattcgcaggattggtatcttactacgactactatccttgatatcatttctcttgcaggtgccggggctgggttagcgaaatctatcgaagtgtggaaaacgatgaaaaaaatatcttcagcagaagctttatcatggctaagaggcctaagtagggttgagcgtaagcggcttacttatgaaatcattcgtaatgaaaatccgggaatatctaactctggtataaaagctgctatagaaatggggcattatcctaaacgatttccatctgaagtattacaacgaactctacaaagggagttgatgcaagtgattgttaattcatcagcatttgcagggagcggcatttccggaactgttagaaatccacataatctaaaaaaaacaggacaatatgtgatagggataatacaatccttttcattaacataa

SEQ ID NO: 89309 - DNA, 1266 bp, Enterobacter aerogenes
atgatgcctgcaagacatcagggccttttacgcctgtttatcgcctgtgcgttgccgctgctggcgatgcaatccgccgccgcggcgaactggcaactggaaaaagtggtggagttaagccgccacggcattcgtccgccaacgcccggcaatcgtgaagccattgaagccgcgacccagcgtccatggaccgaatggaccacccacgatggggagctgaccggacatggctatgcggcggtcgccaataaagggcgcgcggaagggcagcattatcgccagcttggcctgctgcaggggcagtgtcccagcgcggaggatatttatgttcgcgccagcccgctacagcgtacccgggcaactgctcaggcgctggtggatggagcattccccggctgcggcgtggcgattcattatgtcagcggcgatgccgatccactgttccagaccgataaatttacggctacgcaaaccgatcccgcccgccagctggcggaagtgaaggcgaaagccggcgatctggctaagcgtcggcaggcgctggcgccgacgatccagttattaaaagccgcggtttgccaacaggataaaccgtgccccatttttgataagccctggcaggtggagcaaaaccaaagcggtaaaaccaccataagcgggctgagcgtgatggcgaatatggttgaaacgctgcgtctgggctggagtgaaaacctgcccttaagccaattggcgtgggggaagattacccacgccagccagattacagccattctgccgctgttaacggcaaactacgatctcagtaatgacgtgctgtacaccgcgcaaaagcgcggctcggtgctgctcaacgcgatgctggacggagtgaaagcggacgccacgccgcacgtacgctggctgctgctggtggctcatgacaccaatatcgcgatggtgcgcacgctgatgaattttagctggcaactgcccggttacagccggggcaatattccgccgggcagcagtctggtgatagagcgctggcgcaacagcaaaaatggcgaacgttatctgcgcgtctatttccaggcgcaaagcctggacgacctgcgacgcctgcagatgccggatcaacagcacccgatgctgcaacaggagtggcgtcagcctgattgccagcagaccagcgtgggcacgttatgcccgtatcagtccgcgctggaggccttaagtaaacagatcgataaaagcgcagtaccgccggtgaatatggttctttaa

SEQ ID NO: 89310 - DNA, 1359 bp, Enterobacter aerogenes
atgtctggaattattcattttttccgggcgtcgccgccgcaagcgggcgccgcgtttgatgaaaaacgttttcgccgggtacgttggcaaacgtttattgctatgaccctggcctacgtgacgttctacgtctgccgcttatcgttcaccgtggcgaaaagcgcgctggtggaattaggcattaccccaacggagttgggaatgattggttcgacgctattctttagctacgccatcggtaaactggttaacggttttatcgccgatcatgccaacgtggtgcgttacatgagccttgggctattgctcagcgccgggatgaacctgctgatgggcatgaccaccaatgccatgctgctggctatcttttgggggattaacggctgggcgcagtcgatgggcgtcggtccttgtgcggtttcgctggcgcgctggtacggctttaaagagcggggaacgttttacgccatctggtcgacggcgcataacatcggcgaggccatgacctacatggtgatcgccgcggtgatcgcgggttttggctggcaaatgggttacctctccacggctgcgctcggcgccgctggcgtggtgctgttactgctgtttatgcgcgattcgccacagagcagcggctttccctccattaacgtgattcgtgatgaaccgcaggaagagactgaagcgcggggatcggtgttcaaaaaccaactgctggcattgcgtaacccggcgctgtggacgctggcgctggcatcggcattcatgtatatcgaccgttatgcggtgaactcgtggggaatcttctttctggagcaggataaagcctattccacccttgaggcttcaggcatcatcggcgttaacgcgatcgccggtatcgccgggaccatcatcgccggcatgctctctgaccgctttttcccgcgcaatcgcagcgtcatggccgggtttatcagcctgctgaacaccgcgggtttcgccttaatgctctggtcgccgcataattactacaccgacatcctggcgatgatcgtcttcggcgcgaccatcggcgcgttaacctgtttcctcggaggattgatcgccgtcgatatctcttcacgcaaagcggcgggggcagcgctgggaaccattggtattgccagctatgccggggcggggttaggcgaatttctgaccgggatcattatcgataaaaccgcgatcctcgaaaacgggaaaacgctttatgatttcagcacgctggcgttgttctggataggcaccggattgggttccgcgttactctgttttaccaccgccgccatcgtcgcccgacgccatgccgtcgaacggcagacttcattctcctcataa

SEQ ID NO: 89311 - DNA, 810 bp, Enterobacter aerogenes
atgacatcactggattcctctgcgctacaggcccgctatcgcctggcctgcgagctggcgaaagcgggtgccgagctggctttcgaatactatcagcagcgcgaggcgctggcggtagagcataagggcaatgaccttcaggacgtggtgagcgtggccgataaacgcgtagaagcctttgttaagcagcgcattactgatgcgtttgcggaggatggttttctcggcgaagagagcggtacgcagatgccggacgccagggtgctatgggtggttgatcccattgatggcaccagctgttttttgaatgggctgcatacctggtgcttgtcgctggcgatcgtcgttgacggcgagccggtggttggcgtcgtctacgatcccaaccatcgtgaactgttccacgcgctacggggccatggcgcctggctcaatgagacgccaattcgcccacatcccgcagcaacggtcaaagaaggggtgatgggcgtcggaacgtcgcatcgggtgacgccggcgcaattcctgccttttcttgacgcgctgctcagcgatggcggcatgttcatccgcaatggctccggcgcgttgatgagcgcatgggcggccgccgggcgcctgattggctactacgaaccgcacatgaacccgtgggatgccttacccggtctggtgttgatgcgcgaagcggggggcgtcgccaacgactttctggcgcaagaggggattcgccatggtaaccccctcctgctggccagccaaacgctgtatccccaactcaaaaatatgattcttcaaccattacattaa

SEQ ID NO: 89312 - DNA, 990 bp, Enterobacter aerogenes
atgaacgataaaaaatggattaaagcagaagacgtggcgaaacttgccggcgtttcccgttcagccgtctcccgcgctttcacgcctggggcctcggtgtcgccgaaaacccgcgccaaagtgcaggccgccgcggaagctctgggctaccaggtcaatatcatcgcccgtacgatgaacaccggcagcagcaactttatcggcatcatcacttctgggttcgataacccttttcgcagtaagctactggcgccgctaatccaccagctggcgctgcatggatttatgccattgttgatgaacgccgatgatccgcagcagttagctccttcgctaaaacatcttctcagctatcacgtcgctggcgtcattatcacctctggcgcgccgccgctggagctggctgaggagtatcttgcgcgcaaaattcccgttacgcttatcaaccgtcatgctgaacttcccggttgcgaccgcgtcagcagcgataacgcgctcggcgggaaactggccgctgagctgttgcacgcaggccagtgccgggacgtcggttttattggcgaaaatcgtgacaatttcagcacccggcagcgctacgaggggtttattcaccatgccagcgggctggctgtcacggcgcatttctgcgaaacgggcggttatcagtccggttttgcggccgctcgccggctcgccgcggaaaggccaggattgcaggcgctgttttgcgccaccgatatgctggcgattggggcgatggatgggctacgagcggataatccagcggccgtccttccggcaattattggcttcgacgatattccccaggcggagtggcagccttatcaacttaccactatccagcaggacaccacgctgttggcttatcacgcggtggagatgctggtcagccggatcgccaaattcaatcaaccttcacgtcaccgcgaagtcgccgtgaaattaataattcgtaatagcgctaaatga

SEQ ID NO: 89313 - DNA, 1074 bp, Enterobacter aerogenes
atgtcaaaactggatttccgatccccaaatacctggcgcgcgctggcgtcgatcgcggtcatcgtcggggcaacggcagcggcattcgcctggacctcaggttggctgggttcgcgaaccaccagccagtcattagtccccgacccagacaagccgtttcctgccgggtttcgccgggcgcacggcaaagggatctgttttagcgggacgttcgagccagccgctccagccgtttcttattccaccgcgcggctcttttcacagtcggaaacccccgttgtcgggcgattctccattggcgcaggtaatccacacgcggctgataattcaacgaaaaccctgagcatggcgctgctactgaaaacggacgataaacagcagtggcgcatggcaatgaacaacgagccctacttcgccacccgaaacccggagggctttcttgccatgaagaaagccaccgccgtcgacccggccaccggtaagcccgatccgcagcgtcttgcggtatttttacaggactacccggaagccggtaaatatttacagtgggcggcgcaaaagccagcgccaggcggctttgccggggcgacattttatagtattaacgctttctatctcgtgaacgccgaccgccagcgccagcccgtacgctggatgatgcggccacacgatccatttgtctctatcgctgatgaacagcgacagaaagccgaccataacttcctgttcgaacaattacagcagcgactttctcagcatcctatttactgggatttggtattgcaactcgcccaagctggcgacgcggtggatgacccttcgcagccatggccaaacgatcgccagcaggtcatcgccggtacgctcaaagtcacccaactcgtcgcccaagccgaaggcgcctgccgtgacgttaactttgatccctccatcgtgcctgctggagtagaggtctctaacgatcccgtcttaaatgcgcgctctggcgcctattcgcattcctggagccgtcgcgaacgggaaattggctatggcaaagcaaccgaagccgtgcaaaaaccggaggttaaatga

SEQ ID NO: 89314 - DNA, 585 bp, Enterobacter aerogenes
atgaactctaatcaccacaagcaagcgcgcgcgccgcagcatttcaaccctctggcgagatatctgcattggctgatggcaatcatgatcctgaccatgctgttcatcggcgccgctatgatgacttcattacaccatcgcatttggttggtggatgtacatcggccattggggatcgctattttgctgctggcgctcatccgcctggccaaccggttttatagccggcagccacctcttcctgcggagctctcacgctggcaggtgcgggcggcaaaagcgtcacactgggcgctatacgcgctaatgctggcaatgccattgcttggctgggcgcaactgtcggcagcgggcgttccgattgttatgtttgaaggacttaaccttccggccattaccccgaccagcccgctgctttttgcctggtttcacgatgcccatcgcctgctagctaaactgctctttgcggtggtgttgctacatctctctgcggcattagtgcacgcatggatattccgcgacggcgtgtttgccagcatggcgaaaagtaccagccggtccagtaaaccacctgtagagcggtga

SEQ ID NO: 89315 - DNA, 1347 bp, Enterobacter aerogenes
atgggaagcgtcagcgcgggtactgcgcaaaaaatggggttaacggcactaacccttgtgaccgcatcaaatatgatgggttccggtgtttttatgttgccgaccaatctcgccggagtgggatatatttcactatggggatggttgtttactattattggcgtaattgcgttggcgttggttttcgctaaaaccagcctcattacccctcgcgcgggagggatcgtggcctatgccagcgatgcgtttggccctttcatcggttttcaaacgacgatttgctactggatcagcgcctggattggcaacgtcgcgctcctcgtcgccggggtcggctatctgagctacttcttcccggcgctgcataatccggtttacggttgtatcaccgctatcgctattctgtgggcatttattgccttaggcagcctgggggctaaaacggccgggcgcgcgcagtccttcaccgccagctgcatgctggtcgtcgtgctgggtgtgggcattgtcggctggttctggtttgacccgaaaatgttctctgaagtctacaacgggacgggcaacagcgacagctcagcgatcgtctccgcggcctccattgcgctatggggtttcttaggggtggaatccgccgtggtttccagcggacaggtggaaaatcctgaacgcacggtacctcgcgcaaccgtatatggtctgctgattgcctccgtatgttacgtcggtagctgtaccgttatcatgggcctggttccccacgccgaactggtcaaatctgccgccccattcgccgatgcggcacgctatatgtttggcgatatggccggcaacatcgcctccgcgctgagtattatcgcctgttttggctccatttccggctggttgattctacagtcagaagggccgcgggccggggcgaaacaggggttatttccgcagattttcgccgagaccaataaaaatgatgtcccgatgaaaggtctgattatttctggcgtgctgatgagtctggtgctgttattgacggcttcccccgatctcgccaaacagttccaggtggtgattctgatgtcggtatttgcctccctgctgccttatatgtatgccattatcgcgctacctatcatcatggtttctaaaaagctcaaccgtggacgtggttttatgttttattgcgtcctgactgtcatcggtatgatttacagtatattcgccctgctcggttcaggtaccgattccattttctggggcacaattatgatgatggtaaccattcctctgttttcttttgtcgcggccggacgtaataaaaaaggccaggatattctttaccttcaaaaataa

SEQ ID NO: 89316 - DNA, 1137 bp, Enterobacter aerogenes
atgtctttatctattgccgatcaaaataaactcgatgcattttggtcatactgtgtaaaaaatcgctactttaatattggctaccctgaatccgctgattttgattacaccatgctggagcgttttctgcgtttctcaattaataactgtggtgactggggggagtactgtaactatttactcaactctttcgactttgaaaaagaagtcatggagtatttctccggcatattcaaaatcccctttgcggaaagctggggctatgtcaccaacggcggcacagaaagtaatatgtttggttgctatctgggcagagaactgttcccggaaggcacgctctactattcaaaagatactcactattccgtcgccaaaatcgtcaaactgctgcgtatcaaatcgcaactggtggaatctcagccagacggagaaatggattatgacgatttgatcaataaaatcaggacctcaggcgaacgccatcccatcattttcgccaatattggcacaacggtacgcggcgctgttgataatatcgctgagatacagaaacgtatcgctgcgctggggatcccacgtgaagattattatctacacgcggatgccgcgctaagcggcatgatcttgcctttcgtggaggatccacaaccgtttaccttcgcggatggtatcgattcgattggcgtttccggacacaaaatgatcggctctccgattccatgcggcattgtggtagccaagaaagccaacgtcgaccgtatcagcgtagagatcgactacatctccgcccacgataaaacgatttcagggtcacgcaacggtcatacccctttgatgatgtgggccgccgttcgcagccataccgatgccgaatggcatcgccgcattggtcacagcctcaacatggcgaaatacgccgtggatcgctttaaagcagcaggtattgacgcgctgtgccacaaaaactccatcacggtggtctttccgaagccttctgaatgggtatggaagaaacactgcctggcaacgtccggcaacgtagcccatctgatcaccaccgctcaccacctggacagttcccggatcgatgcgctgatcgatgacgtgattgccgacctggcgcaacgggcggcataa

SEQ ID NO: 89317 - DNA, 1269 bp, Enterobacter aerogenes
atgagtgcaaagttaaaagccatacgtggtatgcgcgacgtactgcccgccgaaacgccaatctggcagtggcttgaaaataaattccggcgtctgacctaccgttatggttaccaggagatccgcttacccctgctggaaccggtcgccttattcgaacgtgctgttggcgaagccacagatatcgttgccaaggaaatgtacaactttacggataaaagcggcgaacagattacgctgcgacccgaagggaccagcggctgtatgcgtgcggtactggaaaataatctgtgttacaacaaaacccagcgcctgtggtatcagggcccgatgtttcgctatgaacgcccgcagaagggacggctgcgtcagttcacgcagttcggtgctgaagccttcggcatggccgggccggacgtcgatgctgaaatgatttttatggtccgtgatttgttccaggagctgggcctgaccccgcatgtcaggctggaaattaattctctgggcacgccggatgaacggcgggcccataaagccgcccttgttgactggtttaatgctcatcgtgagcaactggatgaagatagcctcaaacggctggaaaccaacccattacgcatcctcgacagcaaaaatccgaccatgcaacctatgctggaacaggcgccgcgattgctggattacctgtccgaagactcccgtcaccatttttcgctgctctgcgaactgcttgataaggccgacatcccctataccatcaatccgcgtctggtgcgcggactggattactacacccgcaccgtgtttgagtgggtgactgatgaactgggctcgcagggtactgtctgcggcggcggccgctacgacggcctggcggagttattcaatccgaaggcgttgccagcctgcggttttgccatcggtatcgaacgcctgctgttactcattcagaccgtcagccagaaagataatccgttgtggcattttcaccctgacgtggtcattaccagtgaatgtcaggatgatggcctgcgggcccagatgctggcggagctactgcgccaacgtattgaaaagttaagcgtgatggtggattgcagcggcaacaaacttaaacgccagcatcagaccgccctgcaaagtcagtgtcgcgcgataatcacgctgaataccgacaatgagatacggctgtgggacctcgccagctcccgtcaaatgtcgctcgaagagaaagcgctcattgactggctgcaacagcactgccagtaa

SEQ ID NO: 89318 - DNA, 1782 bp, Enterobacter aerogenes
atggcgcagcttcgcgggcataatggcgaggagttattccgccacgaggaggattactctgccttcgaacggtgtatgcaagacgcggcgcaacgttacgccgtgtctattcatagttggtcacttgccgtcccacgtatcctgctgctggtcagcgctccggataaacaggcgctaagccgttttattcagcatatcggacgcagctatgtgccttattacaatcgtcgttaccagcggcatggcgcattgtgggacagccgctacttatgcagccccctggaaccagaaacctatttcctggccgtgaagcgctttattgaatgtgacgaggacgggagcccggggtgccatagtcacggtaatctgccttcaggtttgatagtcccccatcctgtctggctcaagctcggtgagaatgagcaacagcgacaggcccacttccaggaattctgccggcaaccggtaaatcgggcgctggtgaccaggattcgccatgccctggcgcaaaattgcctgctcgcctcgccagcgttgagccagcaacttgaagcccagatggaaaggccgctgcgggcacgacattgcggccgcccgcgtaaatatgaatcctctccatcagaacagtggacctggctggaacttcaggctgaacagtttctgcgccagcatggctatcaacaaatcaggttacccttacttgaacatacatcgctattcgccccaggcggcccggtgatggccgacaagggaaaattacgtggcgatgggacaaccggatgtctgcgcctgatggccgataaccctcataccgcagtaatgagccggatttggtattcgggcgccatgttccgtcaacgctctctggatggagatatccggcaaaatcatcaaattggcgtcgaagccttcggcatgccgggggttgatatcgaacttgagcatctggttatgcaggcggttttcttcaggcgtattggcctcggtgaaatggcggaactgcatattaatatgctgggtgacgaggcctcgctggcggctttccgccgggcgttgcgcgattactaccagcccatctcgcgtttgctgaactcggagcagcagcactggctggagaaacatccggagtggttgatccatcatgaggatatccttcttcagcgtcttgctcctgcggcgccctgcctggcggattttattaccgttgactcccgtcatcgattccagcgacttcagcacgccctgacccaagccggtattgcctggcaatacgatcctgcgctgtttcccgccaatgactattgtcagctggtttttgaatggcgcagcattgccatggagcgcgagttaatcatcagccgtggcggccgatacgacgcctgcgccagccgtattgctgaaaaaccggtttccgcctgcggttttgcattcatgatggagccgattgtcactctgctcggttatcgtccccaacccgccagagcgcatccgccgaccgacattgtgattattgcaggccagcctcgcgtggctgctaaggcaatgctgctcgggcgtagcctgcgtcagcaatttccctatttaagcatcatcaacgactgctctccccaacgaatcagcacccgctataaaaattccagacgcctgggggcgagatttattcttgaaatcgaaggcgacggagaaacggttatcctctctgattcacgggaccatcgtattaagatttgcacgcttgataacatcaccgatcggctcgcgcaggtcgttctgtctcagtga

SEQ ID NO: 89319 - DNA, 1665 bp, Enterobacter aerogenes
atgaacgcattgcatcgtattgcgccgcagccggcgcagaaattattgctggttgtcagtctgtttttctggggtggggcaatgcatctctactggccgaataacggcggtagcggtttgtcgttgccgctaaatataacggcatggatttatgccgttgtgctggcagctagcgcattgatgctggtacctcgtcaacgttggcggataactatacccgccgcggggtttacgatgggggcgctcattctgacgttgctttgtctgttgacgcctgaggtttggcggtccgaggcgctgctggtcgcgggggcgttgctgggaggcgtgcttgtctatttggcgacgttgcaaattccgcttacgacaaacacgctgacagtactgctggctctgctctggggcgcgtgcgtcctcgaatgtctggcgtttacctatcaatactggcattggccgggggtgaattactgggagtttgcctggcggcgcggtacacgcccctacggtatttttcagcaggttaatctgatggccagcttcacggcgtgtggcgtgctgctgtcagcattgctttttttacggctacgtggcggatatcggattatcatcgggattgctctggtgataatgggatttgtactgcatgagtctcagtcgcaaaccggttacctgtctgtggcagtaggcgaggtcttgctgctggcggtttttcctgcgcagcgccgtacgctgctgttactcctgctgccgctggcgataggcatgatagcgggcgcacttgctcgccatttcttgtcggtggtgacgattaatcacctgacgacctcccaggtgcgctggacggtgttgaaagcatcgctggcattatttgccgagcgtccgtggatcggatggggcgtgggcagtttcgccgccgtgtttcttgaacgcgcggggccgttggggctgagcagcatctcgcatccgcataacgaactggcgctgtggctggtggagggagggctggttggactgctgggggcgctttgctttatggcgagtggtttatggctctggctgtacggcaatcgctggcatcgcgcctgcctggtggcggcgctacccgtggttatccatatgctgacggaataccccgtcaggcagtcaacgccacattggctactgctgattttgttgcttcgttgcgcagactgccggcgaaaagcggcccggctgccgctcaccctggcgtcgctgttgcgcgctgtggcattgatcgcggttgctgtcatcactccattgttgtttctcacgctgcatacgcaacagcaactgacgctggcggagcgacaatcaacacagtggcgtctggccgaatctctccctgtgggaggctggctgcttgccacccgctaccggtttgatgtccagatggggtatctacaacaatatcaacgtacccgtgatgagcgttggctggcagccgttcgccgctgggcgcctgactatatgcgtgttcaaccggacccgaatgtctccttcacgcagatcttgctggcgttacagcagcgagacctggccgaggcgcatcgtctggcgacacgcttttgtctgttatacccgaatgatatgcgtattccatggctgcaggatgcgcgacgtccttttaatcaaataatggagtga

SEQ ID NO: 89320 - DNA, 540 bp, Enterobacter aerogenes
atgagatttacgctgttaatcgccaccagcgcgctactgcttggcggcttggcgcaggccgacactaagctggtcggcggcgatatgtattttcacggcaccattcgagcgctggcctgcagccttgcgccaggaggcgacaaaatcgaggtcgaattcgggcaaatcgcgacccaggatctctatctctcggggcgcagtaagccgaaaaaattcagcattgagttacgcgactgcaacccggaggtttttcgcgggatctcggtcactttcagcggaagtgaagatgcggagctggcggatcatctggcgctggatagcagtgaacaaggcgcctccggaatcggcatcggaatgagcgaagaggatggtacggcaattcgccttgatgaaagcacgtcagtcaaagagattactgaaggctcgatgacgctgaactttttggcatgggtcgcggcggaaccgtcggcgttaaaaaatcagactctcgaatacggccccttcagcgccagcgggacctggacgctgaactaccagtag

SEQ ID NO: 89321 - DNA, 1065 bp, Enterobacter aerogenes
atgagcgtattgcacaaagcgctgctgtgggtcgtcctggctggctgtccgctggccgggcaggcatttaccctcggtgagggagaaccacagggcggatcgccgcatcagtacgatattgaactgaactcactggatgtcagcaaaaaccacgagggcggcagaacggatccgttcacctggaatttgggcagttggtatgtcgtggattttcattgtgagcaggccgacatctcgcgccagccgatttactacaccaccacgaccaccatgccgccctctaatcagggagcgaaccgttttcgtctgaatgattacctggatgtggaagtgaaggtatgggtcgctgggcggtataacgactacgttcaggcgccgttcaccaacttttcgaatcgctacaacgaccataactgcaaaaagcgcaaaggctacgagcgagccactaacattgaaagtggctctaaagggaaagtgacgtttattgtcactaaacccattattaacggcatcaatatcacttctcagtcgctggtggaggttgctggacgtctgggcagcgctggccctacgccgacaacgccaatttcccgtgtggtcattaaatccgggctcattaccgtgccggacaaatgcatctttaatcgcggagacaaaatcagcattgaatttggcgatctgccaggctccgccgcccggctcaacggcaccaactacagcaagtcgatccccattcatgtggtctgcgagggggggagcttcgatcagggcgcgttgaacattaatcttggcgtacaaactaccacggcgtcaggcacggcgggatttaacgatcatctcctcggcacgctaagcggcggccaaaaacgcgacgatctcggcattgtgattaaagacgcgagcggcggcaccgtcgtgcccaatcagttctacaacgtgaagggtttttaccagaatcagggcgactggaatcttaccgccgcgccggtggccaaaccgggcgtgggaagcgtcaaagaaggtgagtttgaagcctccgccaccgttgtcgcgcagtttcagtag

SEQ ID NO: 89322 - DNA, 606 bp, Enterobacter aerogenes
atgaaaaagatgctttgcgctctgctgatggcaggcatggcctgctcggttcaggccacaagcggccgccatgatatgagcaacgtttccggcgagtatggcaacgtccgctttcacggtcgggtattcgtttcgccgtgcgtgctggatatggcttcacgcgatcagaccatcgatctcggtgatatttccgccagccgctttcgccagagcggcgatcgcagcgatccggtattggtgacgctgcacctgaatggctgcttaaaaggctccgggcacacgttaaaggacttccctgggcagaccagcgagctccctgagctgtcgcacagtacggtggagcgtggcgtttcgatgacgctgatggccgaaagtgcgccggaaaacagcgatcttgggcggattcgcggcgatgtgcgcggcgcgggcattcggctactgaccgaacgcaaccagttgatccacctgaatcaaccgcaacgcatgtggatcctcaagccgggcgataacgcgattcactttcttgccgcgctggaatcttttgggcaggaggtgaccgctggagaatttaacggtctggtcagacttaagctggagtatctatga

SEQ ID NO: 89323 - DNA, 789 bp, Enterobacter aerogenes
atgaattttgtcatgaataatcaatctcttaaattcgcgcgccgttggcttaaacccgtggcctgtggcctgttttttattgcgcagatcaattcttcatgggcgggtattgcgctcgaccgtacccgcatgatcatcaccggtgatgcacgctcagtaagtgcgaatttaaccaacaccagcccgagcattccatttctggctcagtcgtgggtagaggacgcccacggaacaaaaattacctcgccattaatggtcttaccgccgctgcaacggattaatggtgggcagaagggaatcgcccgcgtgacgaaaaccagcggaattaacgcgttgccacaggatcgcgagagtctgttctacctgaacgtgcgtgaaattccgccaaaaccggataagccgaacgtgctgcagctggcgatgcagtcgcggatcaaattgttctatcggccgacagctatcgtgccggaaacgccgggggcggtgtggcaaaaccaactgatctttcacaagcagggtcagcgctggaccgtggataacccaacgccatacttcgtcaccttaatcggcttaagccgcaaacctgaagcccagggcggcggcagactgactgatttcccggggattatgatcccgccaaaatcctctctcgatttcaacgtctcggacgccagcgtcagccagttcagcatgatgtacgtgaacgattttggcggtcaccctgaattgaaattcagctgcacaggcaatgtgtgtaaagcattgccgatggagcaacagccccggtaa

SEQ ID NO: 89324 - DNA, 2472 bp, Enterobacter aerogenes
atgatcacgctgaaaacagataaaaaacgtctggcgctatttattgctctggtctgcgccgcttcatgggctgaagcggatgaggccattgaatttaataccgacgtactggatgccagcgacaggcataatgtcgatttacagcgtttttccgaaggcaactttgtggctcccggagaatatctgctggatgttcgtattaacagccaggagattcctcaacagtcaatccgttatatcgccgatcctgccaactcacataaatctatggcgtgtctgacggcgcaacaactcgagttactggcgctcaaagaagaggcgttgacccatattcatcccattagcgcaacctgctatgacatatcccgcctgccgggtgtggcgctgaataatagcgcaggcgtactggacattaccgtgcctcaggcatggatgaaatataccgacccagactggacgccgcctgagcgctgggataacggcgtcgccgggctgatttttgactacagcatctcaggacaggccacgcattacgaacagggtggcgatcattatcgctctctgtccggctatgggcagacaggttttaacctcggcgcatggcgttttcgtggccagtatcaggccaattacgcttcagatggtaatcatgggcgtatcgactgggatcagatctatgcttatcgcccgttaccgatgcaggcagcaaaactgacggtcggcgaaatctatctgaattctcaggtttttgattcggtgcgcttcaccggggtcaaccttgccagcgacgagcgtatgctgccgccaaatttgcagggctacgcgcctgaagtgcacggcatcgcccgcagtaatgcgaaggtcaccgtcagtcagcagggccgtgttatctatcaaaccaccgttcctgcggggccgtttaatattcaggatctgcacggttcggtacgcggtacgttggatgtgcgcgtcgaagagcaggatggcagcgtacaaactttccaggtcaatacggctgatatcccttatttgacgcgtccgggctatgttcgctacaacgccgcggtcggtaagccgtcgcgttataaccacgacgttcagggccctgcgttttatagcggcgatttttcctggggggtgagcaatgcatggtcactttacggcggcgcgttgctcaccggcgagcgctacaacgcctggtcgatggggataggacgggatttaagctggctgggagcgctgtcggctgatgcgacgcaatccgtgagtcgggtgaaacatcaggctgaacaaaaaggcatgtcctttaagctcagctacgccaaaacctttgatgagtacaacagcgcgattacctttgccggataccgcttttcacagcgtaatttccgtaccttctcgcagtttctcgacgagcagtatgaaagtaacaacagcgccggcaacgaaaaagagatgtacaccgttaccggcaacaaaaccttttttgctgacgatccgcatttagcgaccacgctctacctcacctatacccaccagaactattgggatcgcggttcccaggatcgttacgggttatcgatgggacacagtttttccttcgcgggtatccaggggatcagcgccaacctcgcggcttatcgctctgagtatcagggcaagcgggacgacagtctctcgctttcaatttcagtgccatggggtgatggtcgctctatggattatgaattacagaacagcggtaaccaaaccagtcaaatggtttcgtattccgataaccgcgatcgtaacaatccgtggcgtttgcgcgcaggggtttccggtgaaggacatacggcatttgatggctattaccagcatcgcagcatgatggcggaactggaatctaacgtcagctggcagcaatcacgctatttctccgttggcggcacggtacgcggcggctttacggcgacgcgtcacggcgcggcgctacataacagtcaggcgtcaatgaataccgccagagtgatggttgataccgatggcgttgccaatgtgccgcttaacggtgaacaggcgcattcaaatcgtttcggtattgctgttgtaccggacgtcgtcagttatcacagctttgatacccgtatcgatgtggacgccatggacgaggacatttccgcgaccaaagcgatcgtgactaacaccctgacggaaggcgctattggctaccagcgctttgccgtcgcgcaggggcaaaaaatgatggcgctgctgcgcctgaaggatggctcggtgccgccgtttggcgccgaagtgtttaacgccaacggcgtcagcgtcgccatggtgatggaaaacggcatggcctggattgcgggggtgaatccgtccgagcgtctttccgttgcctgggctggccgtgcgcagtgtcacttacaggtgccacaacaaatcaacccggaaggtaacgtgttgttgccttgtgaataa

SEQ ID NO: 89325 - DNA, 549 bp, Enterobacter aerogenes
atgcctggatggcgtattttactgctttttatcttcatatcgcctgcatgggtttcggctgacactcaccgtcttgtcagtacgcccggaaaaatgcgtatgcggggaaatattattgaggctgcttgttatgtcgatccgcgcgaccggtcgctactggttgaatttgatgacctctcagccagagatatttccgggaaacctgaaaaagtatctgcgcatgatttcagcattcatttgctgggatgctcactaggggattctcaacacccaggcaatttgtttcaacgcgccaatattactttttccggcgcccccgatagtgacaatccagattatctgagcgtgcaatcggaaactgaaaatttagcgatagaaatatacgacagcaaaggacagcaaattcacttgggcgaaccatcaccggactatgtacttaacccaggaaaaaatacgctcaaatttacggcttatttgatctcccgcgacggaagaatgacatctggcgaatttactgcggtcacgcattttgttgtgaattatctctga

SEQ ID NO: 89326 - DNA, 549 bp, Enterobacter aerogenes
atgaaaatgaaaaacgtggctgtggcctgtgcgctgatggcgggaatgacttttactgcatcttctgctttcgctgcaaaaaatgttgaaccgactaacggtaaaatccacttcaccggctctctcgttaattccgcatgtggtctggcgccagaatccagcccggtgcaggtgaatttcggcgagatcccaacttctcagttaaaagacaaccaacgtgctggcgttaaacatgccaaaatcgttctgcagggttgcgatacgactgtcgcaaaaaccgctaccgtgacttataccccggcaacgattgatgcagacaacaacgcgctagccgccttcacctctggtaccgccaagggcgcaggcatcggtatggttgacagcggcaaccaggatgttgagtggggtaaagccgcctctcaggtcaatattaccgatggcgaaaccgacattgatttcgtcgcttacctgcaggcaaacaacgcatctgcagcggtaactccgggtgatttcgaatctaccgttaatttccagatcgattatcagtaa

SEQ ID NO: 89327 - DNA, 789 bp, Enterobacter aerogenes
gtgatttctcatataccaataaacaaaattaaatccgtaattattggtgatggtttagttttcagaccacttaaaaataccctaaaagacgtggcatctggtgaaatagccacattgaataatgtggccacacaattactgctctatttgttgcaaaatggtaaagagatatcttcgcgcgatgaaattctgctgaatgtttttcagcagaatggcgccagagcgacggatgcgaatcttaaccagcacatttcatttttgcgcaaagccattacgtcgacaggtcatcctgcagaactcatcgttaccattcctcgtattggatttcggatgggcgacgtcaatatcaatattcagctacaggaagaagcgcaaacggccgccagagttgcctatgttgcaccgacgccgaggagaaagaaaccaaaccggtggcctgtcgctatcacagcgttaattacctgcatcgccgtactggcaacagcgtggttaacatggatacccaatcatatagccatgacggacgcagctatcttgcgaaccatcgactacgagcaatgccgtgtacatatattaggaaatgccctcacagacacgataaccgaaaagaaagcgctggatattttcaagtccgtggggattagccccaactgctcgcaccctaaagacctgtatcttaatacctgggcgagcaaccataacctggttgagtggtcgtttgccgcagaatgcggcctcaacctcggctattaccattgcatcagccagtatcgccatcatgaggaatga

SEQ ID NO: 89328 - DNA, 519 bp, Enterobacter aerogenes
atgaagcaggaaagcgatcactcttttttactctggtcagtcgtaatagtcattattgggctggcagctatcgcctatttgattatcactgggaatgctaaaaaacaagaaatcagtttttcctgctcctcggaattcacgtcgataatcgacatccagaataccaaaaaggaactccacggaatcatgttgattaccagctacaactccgggcatctttcattatcagtgccaggaaagctcaaaagcgatgacggcgagtttgctgtaaaccgaaaattgttctttcggtatgctcgtccgcttggacatactgccggcgttttcatgctcacccccgagggacgcgaaaaatcccccgatgataatgcaacggacgctgtcgattacctcttcttcgacgcttacgaacatgccgacaagctgtatatgttaaagcggctgaatgaggaaacggttcttattggcgataacttttcaccccgcttcgcctgcgtgatgaatcacttcgcagattaa

SEQ ID NO: 89329 - DNA, 543 bp, Enterobacter aerogenes
atgagcgcccaggcagaggaaggaacattacgccggatgacgttaggcgagatagcaatggctcgtagggtattcggtgattcgatagtttatagccgtgtctggattcattgcgacagctatttaccgttcggcctccagaaacagaactacgcgatgacttccaacggggagttgtggtacagaaaacagatgtacagggaagacttttccgcaaactcggttttcatcgaagataaatatgttttcatccatgaactggggcatgtctggcaacaccaacacgggcaatgggtgagaatgcgaggagcttttagctgggctgctgaatatacctacaagctggataaagaaaaactcaccgattactctcttgaactgcaagcctctattttagctgattactggttactgctggtttatgggataagtaagtggtcctactatcagagagcggggcgcatggggatgtactggggcgtagatatgttgcaggatgtcccttcgctttaccagaaaatcgtaacagggaaggggcgttaa

SEQ ID NO: 89330 - DNA, 720 bp, Enterobacter aerogenes
atgaaaacacgcttttatatcgcgataatgctgcttgctagcctgactttagccggctgttccagtacttccgattctgggtccacctataccgtgaaacgcggcgatacgctgtatgcgatctcccgtagtaccggcaccagcgtacgcgatctggcgcgcctgaataacatctctccgccatatactattgaagtcgggcagaagctgaaacttaacggcggttcgaaagcaaaaagcagcaccgccgggaaaaaatcctccagcacccgtactgccgccgtaacaccatcatcggcggtgccgcagtcctcatggccgccggtggggcagcgctgctggcgctggccgaccagcggtaaagtggtgatgccgtactccacccgcgatggcggcaataaaggtatcgatattgccggtacccgcggccagccggtttacgccgccggcgccggtaaggtggtctacgtcggcaaccagctgcgcggttacggcaacctgatcatgattaagcataacgaggattacatcaccgcgtatgcgcataacgataagatgatggttaataacggccagagcgtgaagattggccagcagattgcgaccatgggcagtacggacgctgattctgtacggctgcatttccagattcgctatcgcgccacggccatcgacccgctgcgttatctgccgccgcaaggcagtaagcctaagtgctaa

SEQ ID NO: 89331 - DNA, 915 bp, Enterobacter aerogenes
atggatctgaagcgcttacgctatttttgccgggtggtcgaacatggctcggttagccaggcggcgaaatcgctcaacatggcgcagccgccgctcagtaagcggatacaggagcttgaagaagagctgcaggtgtcgctttttgaacgccgcggcaaccgtattgaaccaacggaagcaggctattttctttatcgtaagggttgtgaaatattacgccaggtggaagataccgccagggaaacggccgatattgcgcaaaagacccgtgcggaagtgcgcgttggcttaactcatctttatcaaaactattttcagcctttattaatggagctctatcggcgaaatccagaaacggcaataaatatctcggtgaccgattcaagtcatctggaaacgttattaaatgaaggcgctatcgacctggccttaatacagcgaccctaccgtagtgagggtttcgattatgtctcctttgacccgataaaattggtagccgtcattaataaaaaatgtttgccgcagccgccgtctaaccccttcgattataacgcgctggcgacgatgccgctggtgctgcttcaccgggcgaaagattccggcacctatgagatgctgatggatctgtttcgtaaatccggcgtcagcgcgaaagtgattatgcatattacccaaccaggagtaattctcgactggctggagggcggactggaagcggcgacgttgttgccatcctcggaagtgaatgctgaaaaactgcctcattgctatgtggttgatgtcttcccctcgccgcagatattttatccggcgctggtgaaattaccgtcgatgtcgtatctcccggcgttgatggatattatcgccggaggctatccatttaacgcgccgaagggagtagaggtcgtagaataa

SEQ ID NO: 89332 - DNA, 1494 bp, Enterobacter aerogenes
atggcacactcagataaaaaagcgccgtcatcggtgcatgatttacgctctgccctggcgctactaaaaacgctacctggcgagtatgttgaaaccgatactgaagtcgatccccacgccgagctctccggcgtttatcgctacgtgggcgccggcggtacctgccagcgtccgacgcgtaagaacggcccggtgatggtatttaacaatattaagggcttcaatgacattagcgtagccatcggtctgaacggttcacgccagcgcgtcagccggttcctgcagtgcgaaccggcgaaactgggtcacctgttgaaagactccgttgaaaatgccattgccccgaccatggtgcagggcgcggcggtatgccaggaagtggtgcacctcgccagcgatgatgatttcgatctgcgcaaactgctgcctgcgccaaccaacactgaagaagacgctggcccgtatatcaccatgggcctgtgctatgcctccgatccgcaaaccggtgaatccgatatcaccattcatcgtctgtgcgtacagagccgcgatgaactctcaatgtggctgacgccgggccgccatatcgatgccttccgcatgaaggcggaagcggcgggacagccgctgccgatctcgattagtatcggcgtggacccggctatcgaaatcgccgcctgctttgaaccgccgaccaccccgctgggctttgatgagctaagtatcgccggcgcgctgcgcggccatccggtggagatggtgcagtgtaaaaccattaatgaaaaagccatcgcccacgctgaaatcgttatcgaaggcgaactgctgccgaacgtacgcgtgcgtgaagatcaaaacaccaataccggccgcgccatgccggagttccctggctataccggcgaagccaaagaggcgattccggtcattaaagttaaagcggttacccatcgtatcaaccccatctggcgcaccaccgtcgggccaggcgaagaacatgtcaacatggccgggattccgaccgaagccagtattctcgatatggtagaacgcgccatgccgggcaaattgctcaacgtcttcgcccactcggcgggcggcggcaagctgctcgcggtgctgcaattcaaaaagtcgtccccagccgatgaaggccgccagcgccaggctgcgctactggcgttctccgccttcccggaactcaaacacgttattctggtagatgaagatgttgatattttcgatagcgacgacgtgctatgggcgatgcaaacccgttaccaaggcgatgtcgataccgtggtgatccctggcgtacgttgccatccgctcgacccatcgcaggtgccggaatacagccccagcattctgcagcagggaatgtcgtgtaaaaccattttcgactgcaccgtaccgttccatctgaagcacaactttgagcgctctaagttcaaagcggttgatgtaaaacgtttcctgccggatttcgaataa

SEQ ID NO: 89333 - DNA, 579 bp, Enterobacter aerogenes
atgacaccacgcatcatcattggcattagcggcgcttccggattccagtacggcgtcaaagcgctggagcttctgcagccgcaggcggtagaagtgcaccttgtggtctccaaaggcgcggaaaagacctgcgagctggaaacggactaccgcttagacgaagtgatggcgctggctgacgtggtacaccctatcaaccatctgggcgcatctatctccagcggatcgtttaaaacgctggggatgttagtcgccccctgctcaatgcggtcattgggcgctatcgcccactgtctcaccgataatctgctcacccgcgcggcggacgtggtgctgaaggaacgccgtcggctggtgttgttagcgcgcgagaccccgctcaacctcggccatatacgcaatatggcggcggttaccgagatgggcggcatcatctttccaccggttccggcgctctatcaacgcccgcaaagcgcagatgacattattacccatagcgtgaaccgcgcgctcgacctctttgaccttgaggtcaataacatcccacgctggggtgaaggcgcgctgcattacgcgtaa

SEQ ID NO: 89334 - DNA, 717 bp, Enterobacter aerogenes
atgttaattggtccatatgtaaatggttccgccgtgatcatcggcggattgatcggcgccatggccggaggcaaacttccggaacgcgtcaaaaccgcgctaccgatgacctttggtctctgttccgtcggcctgggcatcaccctggtactgaaggtgaaatatatgccggcggtagtgctggcaatggtactcggcgctttcctcggcgaactgctgcatctggaaaaacgcatcggtagcgcggcgggttcaacgcgcggcttgattaataaagttctgccgcctgttcaggggttaggacatgaggagttcaccgaaaaattcgtcgctatcctggtgctgttttgcgccagcggtaccggtattttcggcgctatgaccgaaggtatgagcggtgatccgtcgatcctgtacattaaaacgatcctcgatctgttcaccgccgggatattcgcaactctgctgggttacgcggtgatgaccatcgctatcccgcagatcgtcattcaggtggcgctggcgatgctggcggtgtttattctgccgatgatcaccccgtcaatgatggcggatttctcctgcgccggtggattgctgatggtagcgaccgggttgcgtatctgtaacatcaagcttttcccggtcgccaacatgctaccagggcttgttttggtaatgcctttctcccatttatgggctaccctagtggcctga

SEQ ID NO: 89335 - DNA, 555 bp, Enterobacter aerogenes
atggccggggaacacgtcattttgctggatgagcaagataaacccacaggtatgctggagaagtatgccgcccacacgctcgatacccctttgcatctcgcgttttcctgctggttgttcaatgagcaaggccagttcctggtcacgcgccgttcgcttagcaaaaaagcctggcccggcgtgtggactaactcagtgtgcggacatccgcaacagggcgaaaccttcgagcaggccgtcacccggcgctgccgcttcgaactgggcgtcgagatcgctgatattgcccccgtccacccggcctttcgctatcgggcggtcgccccgaatggcatcgtcgaaaacgaagtctgcccggtttttgccgcacgcgtggtcagcgaactgcaaccgaatgatgatgaagtgatggattatcagtgggttgagctgccggaaatgttaagcgcgctggccgctaccccgtgggcctttagcccgtggatggtgctggaagccaaaaacaaaaacgcgcgtcaggctttaatagactttgtcgcgcgtttacgcgcgtaa

SEQ ID NO: 89336 - DNA, 1518 bp, Enterobacter aerogenes
atgtctgaacaacaagcacagggcgctgacgcggcaattgaccttaataatgaactgaaaacccgtcgtgagaagctggctgcgctgcgtgagcagggcgtcgcattcccgaacgatttccgtcgtgaccatacctctgaccaactgcacgctgacttcgatgccaaagaaaacgaagagctggaagcgctgaatgtcgaagtggccgttgctgggcgcatgatgacccgtcgtatcatgggtaaagcgtctttcgttaccctgcaggacgtcggcggccgcattcagctgtacgtcgcgcgcgatgacctggcggaaggcgtctacaacgatcagttcaaaaaatgggatctcggcgacatcatcgccgcccgcggtaagctgttcaaaaccaaaaccggcgagctgtccatccactgcaccgaactgcgtctgctgaccaaagccctgcgcccgctgccggacaaattccacggcctgcaggatcaggaagcgcgctaccgtcagcgttaccttgatctgatctccaacgacgaatctcgtaacactttcaaagtacgttcgcagatcctggctggcatccgtcagttcatggttggccgcggctttatggaagtagaaaccccgatgatgcaggtgatcccaggcggcgcttccgcgcgtcctttcatcacccatcataacgcgctggatctggacatgtacctgcgtatcgcgccggaactgtacctcaagcgtctggtggttggcggcttcgaacgcgtcttcgaaatcaaccgtaacttccgtaacgaagggatctccgttcgccacaacccagagttcaccatgatggaactctatatggcgtatgcggattataaagatctgattgagctgaccgaatccctgttccgcaccctggcgcaggacatcctcggtaataccgcggtgccttatggcgatcagactttcgatttcggcaagccgtttgaaaaactgaccatgcgtgaagctatcaagaaataccgtccggaaaccgagatggcggatctggataacttcgattccgcgaaagcgatcgctgagtctatcggcatcaaagttgagaagagctggggtctgggccgtatcgtgaccgagatcttcgaagaagtggcggaagcgcatctgatccagccgaccttcatcaccgaatacccggcagaagtttctccgctggcccgtcgtaacgacgtgaacccggaaatcaccgaccgctttgaattcttcatcggcggccgcgaaatcggtaacggctttagcgagctgaacgatgcggaagaccaggcgcagcgcttccaggatcaggttgatgcgaaagccgccggcgacgacgaagcgatgttctacgacgaagactacgtcaccgcgctggaacacggcctgccgccgaccgccggtctgggcatcggtatcgaccgtatggtgatgctgttcactaacagccacaccatccgcgacgttattctgttcccggcgatgcgtccgcagaaataa

SEQ ID NO: 89337 - DNA, 882 bp, Enterobacter aerogenes
atgacccagggtctggaagatgtcgccggactgctggagctggcggtagaagccgaagacgaagagaccttcaacgaagcggttgccgagctggacgggctggaagagaagctggcgcagcttgagttccgccgcatgttctctggcgaatatgacagcgccgactgctatctcgatattcaggccggttccggcggcaccgaagcccaggactgggccagcatgctgatgcgcatgtacctgcgttgggcggaagcgcgcggctttaagaccgaaatcatcgaagaatccgaaggtgaagtcgcgggcattaaatccgtgaccatcaaaatcattggcgattacgcctacggctggctgcgtactgaaaccggcgttcaccgcctggtgcgtaagagcccgttcgattccggcggccgccgtcatacctcctttagctcggcgttcgtttacccggaagttgatgacgatatcgatatcgaaattaacccagccgacctgcgcattgacgtataccgcgcgtccggcgccggtggtcagcacgttaaccgtacggaatccgcggtgcgtattacccatatcccgaccggattggtgacgcagtgccagaacgaccgttcgcagcacaagaacaaagaccaggccatgaagcagatgaaagcgaagctttatgagctggaaatgcagaagaaaaatgccgagaagcaggtgatggaagataacaaatccgacatcggctggggcagccagatccgctcttacgtgctggacgactcgcgtattaaagatctgcgcaccggggtggaaacccgcaacactcaggcggtgctcgatggcagcctggaccaatttatcgaagcaagtttgaaagcagggttatga

SEQ ID NO: 89338 - DNA, 1734 bp, Enterobacter aerogenes
gtgaaacaacagatacaactacgccgccgcgaggcggttgatggcgtcgacctccccgccgacctgccgccgctactgcagcggttgtatgccagccgcggcgtgcgcagcgcgcaggagctggaacgcggcgtcaaaggcatgttgccatggacgcaactcaccggcgttgaaaaagccgttgaaatgctgcatgacgctttccagaaagggttacatattgtggtggtcggcgattttgacgccgatggcgccaccagtaccgcgctcagcgtgctcgccttgcgcgcgctgggctacggtaacgtttcctatctggtgccgaaccgttttgaagacggctatggtttaagcccggaagtggtcgagcaggcgcacgcgcgcggcgcgcagatgatcatgaccgtcgataacggcatttcatcacatgccggcgtcgatcacgcccataagctcggtatcccggtgctggtgaccgatcaccacctgccgggcgatacgctgccggcggcggaggccatcgttaaccctaacctgcgcgattgcgacttcccgtcaaaatcactggccggggtcggggtggcgttttatctgatgctggcgctgcgcaccttcctgcgcgataacggctggttcgaggcccgcggtatcgccgcgccaaaccttgccgagctgctggatttagtggcgctgggcaccgttgcggacgtggtgccgttagatgccaacaaccgcatcctgacctggcaggggttaagccgcattcgcgccggaaaatgtcggccaggcattaaagcgctgctggaaatttccaaccgcgatccgcaaaagcttgccgccagcgatctcggtttcgccctcgggccgcgcctgaatgctgcggggcggctggatgatatgtccgtcggcgtcgcactgctgctgtgcgataacatcggcgaagcgcgggtgctggccaatgagctcgatgcgcttaaccagacgcgcaaagagattgagcaggggatgcaggccgaagcgctgactctgtgccagcagctggaacgcagtagcgacaccctgcccggcgggctggcgatgtaccatccgcaatggcatcagggggtggtcggcattctggcatcacggattaaagagcgcttccatcgcccggttatcgcttttgcgcctaccggcgacggcacgctcaaaggttctggccgctccattcaggggctgcacatgcgcgatgcgctggagcgccttgatacgctttatcctgggttaatcctgaagtttggcggccacgcgatggcggcgggcttatcgctggaagaggcgcgttttgaagagtttcaacagcgcttcggcgagctggtgaccgagtggctggatcccgcattattgcagggcgaggtggtttccgatggcccgctggcggcggcggagatgagcatggaagtggcgcagatgctgcgcgatgccgggccatgggggcagatgttcccggaaccgttgtttgatggccgtttccgcctgctgcagcagcggctggtgggcgagcgtcacctgaaggtgatggtcgaaccggttgacggcgggccgctgctggacggtattgccttcaacatcgatacttccatttggccggataacggcgtgcgtgaagtacagttagcctacaagctcgacatcaacgagttccgcggcaaccgcagcctgcagctgatcatcgatcacctctggccaaattga

SEQ ID NO: 89339 - DNA, 714 bp, Enterobacter aerogenes
atgaaaaaaggtttattgatgttcaccctgctggcggcttcactctccggcgcggcgcatgccgatagcgcggcgatcaaacagtcgctggcgaaactgggtgtgcagagcaccgatatccaaccgtcgccggtttccgggatgagcacggtgctcaccgacagcggcgtgctgtacgtcactgacgatggcaaacacattattcagggaccgatgtatgacgttagcggcgcgcagccggttaacgtcaccaaccagttgctggtcggcaagctgaacgccttaaccaaagagatgattgtctataaagcgccgaaggagcagcatgtcattaccgtctttaccgacatcacctgcggctactgccacaaactgcacgagcagatgagcgactataacgcgctggggatcaccgtgcgttatctggccttcccgcgccaggggctgcaaagccaggccgagcaggatatgaaagcgatctggtgtgcgaaagatcgtaataaagcgctggatgacgccatgaatggtaaaggcgtgcagccggcgagctgcagcgtagatatcgccaaacattataccctcggggtgcaaatgggcgtcaacggcaccccggcgatggttctcagcaacggcatggtgctgccgggctatcaggggccgaaagagcttaaagctttcctcgacgagcatcaaaaacagacaagcggtaactga

SEQ ID NO: 89340 - DNA, 897 bp, Enterobacter aerogenes
gtgaaacaggatctggcacaaattgaacagtttctcgatgccctttggctggagcgtaatctggcggagaacacgctcagcgcctatcgtcgcgatttgacgatgctcgtggagtggctgcatcatcgcgggctgtcgctggcgagcgtcggcagcgacgatctgcaggcgctgctggccgagcggcaaaccggcggctacaaagcgaccagtaccgcacggctgcttagcgccgtgcgccgcttcttccagcatttgtaccgggagaaagtccgcccggacgatcccagcgcgcttctggcgtcgccgaagctgccgcagcggctgccgaaagatctcagcgaggcgcaggttgagcgtctgctgcaggcgccgctggtggagcagccgctggagttgcgcgataaggcgatgctggaagtgctgtatgccaccggcctgcgcgtctccgaactggttggcctgacgatgagcgatatcagcctgcgacagggcgtactgcgggtcattggtaaaggcaacaaagagcggctggtgccgctgggcgaagaggcggtgtcatgggtagaaaattaccttgaatacggccgcccgtggctgctgaacggtgtggcttcggacgtgcttttccccagccagcgcgcgcagcagatgacgcgccagaccttctggcaccgcattaaacactatgccgtactggcggggatcgacagcgcgaagctctccccgcacgtgttgcgtcatgcgtttgccacgcatttgctcaatcacggcgccgatttacgcgtggtgcagatgctgttaggacacagcgatctctccaccacgcagatctacacccacgtggcgaccgaacggttacgacaacttcatcaacagcatcacccgcgggcgtga

SEQ ID NO: 89341 - DNA, 522 bp, Enterobacter aerogenes
atgaatataggtcttttttacggctccagtacctgctacaccgaaatggccgcggaaaaaatccgcgatatcatcggccccgagctggtgacgctgcataatctgaaagatgactcccccgcgctgatgagccagtacgacgtgctgatcctcggcatcccgacctgggatttcggcgaaattcaggaagactgggaagcggtctgggaacagctcgacgccttagatctgaatggcaaaatcgtcgcgctgtacggcatgggcgatcagcttggttacggcgaatggttccttgacgcgctggggatgctgcacgataagctggcgaccaaaggcgtgaagtttgtcggctactggccaaccgagggctatgagttcaccagcccgaaaccggttatcgccgatggccaattgtttgtcggcctggcgctggatgaaaccaatcagtacgacctgagcgatgaacgcatccagaactggtgcgagcagatcctcggcgaaatggcggagcacttcgcctga

SEQ ID NO: 89342 - DNA, 411 bp, Enterobacter aerogenes
gtggtcctgtggcaatctgatttacgtatttcctggcgttcgcagtggttctcgctgctgctgcacggggtggtggcggcgatagtgctgctcatgccctggccgttaagctacaccccgatttggctcctgttgctatcgctggtggtgtttgactgcgtgcgcagccagcggcggatccacgcctgccagggagaaattaagctgttgatcgattcccgtttacggtggcaaaaaacggaatgggatatcgtcgggacgccatgggttatcagcagcgggatgctgctgcgcctgaagcatgcggaaaccggccgtagccagcatttgtgggtggcggcggatagcatggatgcgggggaatggcgggatttgcgccggctggtgctgcaaaaaccggcgcacgactaa

SEQ ID NO: 89343 - DNA, 267 bp, Enterobacter aerogenes
atggacattaacaacaaagctcgcatccactgggcatgccgccgcggtatgcgcgaactcgatatctccatcatgccgtttttcgagtatgagtacgacacgctcagcgatgacgacaagcgcctgttcatccgtttgctggagaacgatgatccggatctgtttaactggctgatgaatcacggcaagccggcagatacgcaacttcaacggatgattaatttaatccagactcggaatcgggaacgtggtcctgtggcaatctga

SEQ ID NO: 89344 - DNA, 984 bp, Enterobacter aerogenes
atggcttttacaccttttcctccgcgtcagccctcttcttccgctcgtctgccgttaacgctgatgacgctggatgattgggcgctggcgacgattaccggtccggatggcgagaagtatctgcaggggcagatcaccgccgatgtcagccatttaaccgccgatcagcatctgcttgccgcgcactgtgatgccaaaggcaaaatgtggagcaacctgcgcgtcttccaccgcgacggcggtttcgcgtggattgagcgccgcagcctgcgcgaaacgcaactgaccgaactgaaaaaatatgctgtcttctccaaagtcaccatcgccgcaaacgacgatctggtcctgctgggcgttgccggtttccaggcgcgcgccgcgctggcgccgctgttcgccgctctgccggatgccggtaaaccggtggtcaccgaaggcgtgaccagcctgctgtggtttgaacatcctgctgaacgcttcctgctggtgaccgatgccgacaccgccaaccgggtgacggaagcgctgcgcggcgaagcgcagcttaacaacagccagcagtggctggcgctgaacatcgaggccggtctgccggttatcgacagcgtaaacagcgcgcagttcattccgcaggcgaccaacctgcaggcgttgggcggtatcagctttaagaaaggctgctacaccggccaggaaatggtcgcccgggcgaaattccgcggcgccaataaacgcgcgctgtggacgctggcgggtaccgccagccgggtgccggaagccggggaagatctggagctgaaaatgggcgacaactggcgccgcactggtacggtgctggcagccgtacagttggatgacggaagcctgatggtccaggtggtgatgaataacgatatggaaccggacagcgtgttccgcgtgcgtgatgatgccggcagcctgagcatcaagccattgccgtattcgctggaagaagattaa

SEQ ID NO: 89345 - DNA, 660 bp, Enterobacter aerogenes
atggttcgcaaaccattaatcactcagggatattctctggcagaggaagttgccaacagcatcagtcacgggatcggactggtgttcggtattgtcggcctcgtgttgctgttggtgcaggcggtagacacgaacgccagcgcgacggcgatcaccagctacagcctgtacggcggcagtatgattatgctgttcctcgcttccacgctctatcacgctatcccgcatcagcgggcgaaacagtggctcaagaaattcgaccactgcgccatctacttgctgattgccggaacctacacgccatttttgctggtgggattgaattcgccgctggcaaaggggttgatgattgtcatctggagcctggcgctactggggatcctgtttaagctgactatcgcgcaccgctttaaaattttgtcgctggtgacctatctgacgatgggctggctgtcgcttatcgtggtctatcaactggcggtgaagctggcggtgggcggggtaacgctgctggcggttggcggggtggtgtactcgctgggggtcatcttctacgtctgcaaacgtattccttataaccacgctatctggcacggcttcgtgctcggcggcagcgtgtgtcacttcctggcgatttatctttacgtcggccagtcctga

SEQ ID NO: 89346 - DNA, 312 bp, Enterobacter aerogenes
atgcaggctaatgacattaccttttttcagcgttttcaggacgacatcctggccgggcgcaaaacgatcaccattcgcgatgcggcggagtcgcactttaaggccggtgatgtgctgcgcgtcggacgctatgaagatgacggctacttctgcactatcgccgttaccgcgacctcaacggtgaccctcgacacgctaactgaacagcatgctcaacaggagaatatgaccctcgaacaactgcggcaggtcatcagtgaaatctatcctgcggaagatcggttttatgttattgaattcaaacgtctttaa

SEQ ID NO: 89347 - DNA, 756 bp, Enterobacter aerogenes
atgaattgtgagttcgccactgtgagtatgttctcccacgccgctgtcgctagtctcaataatcttgagatgatggtctaccactacgtcattaagaatcgtgacaaagtgatgtacatgactattcgcgaactggccgaggccgccggggtctccaccactaccgtgttgcgcttctgccgcaaactgcagtgcgagggctactctgaatttcgcgtacgttttaaattatatcttgagcagaatgagcctcaacaggcaaatatcggcgccagcgaaataatgagcttttttaaaagcgtcaataatgacgagttcgatcaattgctcgaacaagccgtcgatattattctgtcctccgagcgtattattttcgtcggcgccggtacttccggcgcgctggcgaaatatggcgcgcgcttcttttccaacgtcgggaaattcagcaaccatattgacgatccttatttcccggtcaccaatgacatggctcgcaacgcgctggcgattgtgctttccgtctccggtgaaaccgaagagatcctgcgctttgccagccagttcagcctgcatcactgtagggtgatgtcgattaccagccatgaacattcgcggctggcaaaactggctgatttcaatctctcctggcacgtgccgcaaacgcgcatcggcggcgtttacgatattacaacacagattccggtgatatatattctcgaatccctggggcgtaaattagcgcgcaaaatcggctaa

SEQ ID NO: 89348 - DNA, 1434 bp, Enterobacter aerogenes
atgaaaaaattgactcttcccaaagactttttatggggcggcgcggtcgccgcgcatcaggttgaaggcggctggaataaaggcggcaaaggccccagcatctgcgatgtgttgaccggcggagcgcacggcgtgccgcgcgaaatcacccaacaggtcgaagcgggtaaatactaccctaaccatgaagcggttgatttttacggccactacaaagaagacatcaaactgttcgccgagatgggtttcaagtgcttccgcacctctattgcctggacccgcatcttcccgcagggcgacgaaacccagccgaatgaagaagggctgaaattctacgatgacatgtttgatgaactgctgaagtacaacatcgagccagtgatcaccctttcccactttgaaatgccgctgcatctggtacagcagtacggcggttggaccaaccgcaaagtggtcgatttctttgtgcgcttcgccgaggtggtcttcgagcgctacaagcacaaagtgaaatactggatgacctttaacgagatcaataaccagcgtaactggcgcgcgccgctgttcggctactgctgttccggcgtggtctataccgagcatgaaaacccggaagagaccatgtaccaggtgctgcatcaccagttcgtcgccagcgcgctggcggtgaaagcggcgcgccgcatcaacccggaaatgcaggtcggctgcatgctggcgatggtcgccctctacccttactcctgcaaaccggaagatgtcatgtttgcccaggagtcgatgcgcgaacgctatgtctttaccgatgtccagctgcgcggctactacccgagctatgtgttgaatgaatgggaacgccgcggcttcaacatcaagatggaagacggcgacgcgcagatcctgcgtgaaggcacctgcgcctatctcggcttcagctactacatgaccaacgcggtgaaagccgaaggcggcaccggcgatgccatttccggcttcgaaggcagcgtgccgaacccgcacgtgaaagcctccgactggggctggcagattgacccggttggcctgcgctacgccctgtgcgaattgtatgagcgctaccagaagccgctgtttatcgtggaaaacggctttggcgcctacgacaaagtagaagccgacggcagcatcaatgatgactaccgcatcgattatctccgcgcccacgtcgaagagatgattaaagcggtgacttatgacggcgttgatctgatgggttataccccatggggctgcatcgactgcgtctccttcaccactggccagtacagcaaacgctacggcttcatctacgttaataaacacgacgacggcaccggcgacatgtcccgctcgcgcaagaagagctttaactggtacaaagaagtcatcgccagcaacggcgagaatctgtaa

SEQ ID NO: 89349 - DNA, 360 bp, Enterobacter aerogenes
atgattaagcgacaacgcaaagccattcttcttgtactccttgcctgcctggtggtgctgatctgcaccgcccagagaatggcggggatgcatgcgttggtgatgaacgtcacggccgccagccaatccgctcaacctggcccggataatgccgaggcgccggtttccccctgcgaactcagcgccaagtcgctgatggccgttccgccgatgctgtttgaaggggcgctattagcgatcgctctgctgctggcggtgctggcggccatcccgccgcgcatcgagcgaatctggcctccccgcgtcatttctcccccccgattgcgggtgcatctacgattatgcgtcttccgtgagtga

SEQ ID NO: 89350 - DNA, 2010 bp, Enterobacter aerogenes
atgtttatggtattcaggcgactgctggtctgcctgctttggctatggctgcccgtcagccaggccgccgatagcggctggctgcgcgtcgccgacaatcaacacgccagcgtgcgcctccgggcacaaagcgaaagcaatggcgacacccgcctgcttttagacgtagcgctggaaaagggctggaaaacctactggcgttcgccgggcgaaggcggcatcgcgccggctatcgcctggcgcacaccgctggaggtgaactggcgctggccgacgccgcaacgctttgacgtcgcgggtatttccactcaggggtatcacggcgacgtcagcttcccgatgaccctgcgcgggaaaataccgccgacgctaagcggcgtactgacgctctctacctgcagcaatgtctgcattctcactgactaccccttttcgctggatatgacggctccggcgggagagcgttttaattacgatttcacccgcgcgatgggcacgctgcccctgcgcgacggtctcacctcggcgcttagcgccagctacgtcagcggtaagctgacggtaaccgcccgccgcgatgccggctggcagcagccagcgctgtttatcgacagcatggaggatgtcgatttcggcaagccgagctttaccagccgcggcgatacattgaccgccaccgtaccggtcaccgatagctggggcgaagcggcgccggatctgagcggcaaaacgctgtcgctggtgctggctgatagcggccaggcgcaggaaagccatatcgccatcgccgccggcagcgccgcgccggggctggcgttaggctgggtgctgctgatggcgctggccggcgggcttatcctcaacgtcatgccttgcgtgttgccggtgctggcgatgaaactcggctcgctggtgcaaaccgaacgtcgcgaacgcggcgcggtgcggcggcagttcctcgcctcggtatgcgggatcgtcgtctccttcctggcgctggcgctgatgatgaccgcgctacgtttaggtaatcaggcgctcggctgggggatccagttccagaacccatggtttatcggcgcgatggcgctggtgatggtgctgttcagcgccagtttattggggctgttcgaaatccgtctctcctccagcgccagtaccttcctcgccacccggggcggtaacggcttaatgggccatttctggcagggcgccttcgccaccctgctggcaacgccctgtaccgcgccgttcctcggtaccgccgtttcggtggcgctggtggcgccactgccgctgctgtggggtattttcttcgccatggggatcggcatgagcctgccgtggctgcttattgtcgcctggccggggctggcgcaacgacttccacatccaggccgctggatgaatcatctgcgcgtggtgttggggctaatgatgcttggttcagcactatggctggtcagcctgctgacgatccacatcggccgcacgccggtgcttaccctgctggtgattctggccatcggcctgctattggccaccgcctggcgctaccgctggcgtacggcgctgcgcgcgggcactctggccatcgtggtggcgggcgccgtcgcctttgtcgcacaacaggacggccagggcccgcgccgcgaccgggttaactggcagccgctcagcgagcaggctatcgctaacgcccttgcggagcataaacgggtatttattgatgtcaccgccgactggtgcgtgacctgtaaagccaataaatacaacgtgctgctgcgcgacgacgtccagcaggcgctatcagcgccagacgtggtcgccttacgcggcgactggagccgcccctccgctgacattagtcagtttttaaccgctcgcggcagcgccgcggtgccgtttaaccagatttacggaccgggattgccgcagggacaaattctgcctgcgctgttagaccgcgaacaacttctcgccaccttgtccgccgctaaaggaaaataa

SEQ ID NO: 89351 - DNA, 612 bp, Enterobacter aerogenes
atgagagctatcaccgccttattactgctgtgcgtatcggccttcagcttcgccgcaccggcggaagaaccacaatcgaacggtaatgaccagttagcccagctgctgtttaacgatccgaatagtccgcgcaccggcgcgaaagagccaaaactcacaatcgtctcgtttaccgattacaactgtccttactgcaaacagtttgatccgatgctggaaaaaatcgtccacgataatccggatattcagctcatcgttaagctgctgccgtttaaagggcagagttcggtgaatgccgctaaagccgcgctctccacctggcgtcaacagcccgataagttctgggcgctgcatcagcggctgatggcgaaaaaaggctatcacgatgacgccagcatcgccgccgcgcagaagaaaaccgccaccgatagcgtgaatattgatgacaagaccatggattcgctgaagatgaacctgattttgtcgcaggtgctgaatattcagggcaccccggcgaccatcatcggcgatcagatggtggccggcgcgatccctgctgaagagctggaggggctggtgaaagagcagctggcgaaagcccgtggccagtaa

SEQ ID NO: 89352 - DNA, 504 bp, Enterobacter aerogenes
gtggccagtaaaatcaggcgctggctgcgcgagctggcggtgtggctgctgattggcgcggcggtgagcctggcggtggattactttcgccagcccgcgctgccgcaaaacttcagcgccacatcgctgcagacactcgacggcaggacgctggatctgaacgccatgagccagcaaaagccgctgctgctgtacgtctgggcgacctggtgcggagtttgtcgctataccacgccgtcggtggcatcacttgccgccgacggcggcaatgtgctgacggtagccctgcgttccggcgataacgccgcgctggagaagtggctgaccaggaagaaaatgacgctgccgacggtgaatgatccgagcggccagttggcgcggcagtgggatatccaggtaacgccaacgctggtggtcatttctcaaggtgaggtgaagtcggttaccaccggctggaccagcagttggggaatgcgcctgcggctgtggctggcctcctggtag

SEQ ID NO: 89353 - DNA, 744 bp, Enterobacter aerogenes
atggcgatagctctgattagcggcgcgagccgcggcataggccgggcgacggcgctgctgttggcgcaggaagggtataccgtcgcggtcaattaccatcacaacattaaagccgccaccgaagtggtcaataccatagttgaatctggcggcaaagccacggcgctgcgggcggatatcagcgatgaagcgcaggtgatggcgatgtttgaggcgattgaccgtatgggcgaaccgctgacggcgttggtcaacaacgccgggatcctgtttacccaatgtacggtggagagcctgagcgccgagcgtattaaccgcgtgctggccaccaacgtcaccggctacttcctctgttgccgtgaggcggtaaagcgcatgtcgcatcggcatggcggcaagggcggggcgatagttaacgtttcgtcggcggcctcgcgccttggcgcgccgggagagtatgttgactatgccgcgtcgaaaggggcggtagataccctgacgaccgggctggcgctggaagtggcggcgcaagggattcgagtaaacggcgtgcgtccggggctgatttataccgagatgcatgcttccggcggcgaaccgggacgcgtggatcgggtaaaaaattcgctaccgatgcagcgcggcggccagccggaagaggtcgctcaggccattgcctggctgctgagcgacaaagcgtcgtatgtgacgggtagcttcctcgaactggcgggcgggaaataa

SEQ ID NO: 89354 - DNA, 2874 bp, Enterobacter aerogenes
atgactcagactttaagtcagcttgaaaaccgcgacgcctttattgaacgtcacattggctcggacgctcagcagcagcaagagatgctgaagaccgtcggcgcggattcgcttaacgccctgattggccagattgtgccgcaggatatccagctggcgaccccaccacaggtgggcgacgcgactacagaattcgccgcgctggcggagctgaaggcgatcgccggtcgcaacaagcgcttcaagtcttacatcggcatgggctacaccgccgtgcaactgccgccggtcattcagcgcaacatgctggaaaacccgggctggtacaccgcctataccccttaccaaccggaagtatcccagggccgtctggaatcgctgctcaacttccagcaggtcactctggatctgaccgggttggatatcgcttccgcttcgctgcttgatgaagccaccgccgccgccgaagcgatggcgatggccaaacgcgtgagcaaactgaagaacgccaaccgcttcttcgttgccgctgacgttcatccacaaaccctggatgtggttcgcacccgtgcggaaacctttggcttcgacgtgattgttgatgacgccgacaaagtgctcgatcaccaggatgtttttggcgtgctgctgcagcaggttggcaccaccggtgaaatccacgattacagtaaactgatcgccgagctgaaagcgcgcaaagtgattgtcagcgtcgccgccgactttatggcgctggtgctgctgacggcgccgggcaagcagggcgccgatattgtcttcggttccgctcaacgtttcggcgtgccgatgggctatggcggcccgcacgcggccttcttcgcggcgaaagatgaattcaaacgctccatgccgggccgtattatcggcgtatcgaaagatgcggcgggtaataccgcgctgcgcatggcgatgcagactcgcgagcagcatatccgccgcgagaaagcgaactccaacatttgtacctcgcaggtcctgctggccaacatcgccagcctgtacgcggtattccacggcccggcgggcctgaaacgtatcgctggccgcattcatcgcctgaccgacattctggccgacggcctgcagaagaaagggctgaagctgcgccatgctcactacttcgacaccctttgcgtcgaagtggcggataaagccgcggtgctggcgcgtgccgaagcgctgcagattaacctgcgtagcgatattcacggcgcggttggcattacgctcgatgaagcgaccacccgcgaagatgtgctgaacctgttccgcgccatcgttggcgacgatcacggtctggatatcgataccctggataaagacgtggcgctggatagccgttcgatcccggcggcgatgctgcgcgatgatgcaatcctcacccatccggtgtttaaccgctaccatagcgaaaccgagatgatgcgctacatgcacgcgctggagcgtaaagatctggcgctgaaccaggcgatgatcccgctgggctcctgcaccatgaaactgaacgccgcggcggagatgatcccgatcacctggccggaatttgccgagctgcacccgttctgcccggtcgagcaggcggaaggttatcatcagatgatcgcccagctttcagactggctggtgaaactgaccggctatgacgccgtctgtatgcagccgaactccggcgcgcagggcgagtatgctggcctgctggcgattcgccactatcacgagagccgcaacgaaggccatcgcgatatctgcctgatcccaagctccgcgcacggcactaacccggcttccgcgcagatggcgggtatgcaggtagtggtcgttgcctgcgataaaaacggcaacatcgatcttgccgatctgcgtgaaaaagcagagcaggcaggggcgaatctctcctgcatcatggtcacctatccgtcgacccacggcgtgtatgaagagaccatccgtgaagtgtgcgagatagtgcatcagttcggcggccaggtttacctcgatggcgccaacatgaacgcccaggtcgggatcacttctccgggctttatcggcgctgacgtttcgcacctcaacctgcataaaaccttctgcattccgcacggcggtggcggtccgggtatgggccctatcggcgtgaaagcgcacttggcgccgtttgtaccgggccacagcgtggtacagattgaaggtatgctgacccgtcagggcgcggtttccgccgcgcctttcggcagcgcttccattctgccgatcagttggatgtatatccgcatgatgggcgcggaagggctgaaacaggcgagccagaacgcgattctcaacgccaactatatcgctacccggctgaaagatgcttacccggtgctctataccggtcgcgatggtcgcgtggcgcacgaatgtattcttgatattcgtccgctgaaagaagagaccggcattagcgagctggatattgctaaacgcctgatcgactttggtttccatgcgccgaccatgtccttcccggtcgccgggacgttgatggttgagccgacggaatcggaaagcaaggtagagctggaccgctttattgacgccatgctggcgatccgcacggaaatcgatcgcgttaaagccggtgaatggccgctggaagataacccgctggtgaacgcgccgcacacccagggcgagctggtgagcgagtggaaccatccgtacagccgtgagctggcggtattcccggctgggttgcataacaagtactggccaacggtgaaacgcctggatgacgtgtatggcgaccgtaacctgttctgctcctgcgtaccgatgagcgaataccagtaa

SEQ ID NO: 89355 - DNA, 390 bp, Enterobacter aerogenes
atgagcaacgtaccagcagaactgaaatacagcaaagaacacgagtggctgcgtaaagaagcggacggcacctataccgtcgggatcaccgagcacgcgcaggagctgcttggcgacatggttttcgttgacctgccggaagtgggcgccaccgttgaagcgggcgccgattgcgccgttgccgaatccgtgaaagcggcttccgatatctacgcgccgattagcggtgaaatcgttgccgtcaacgaagagctgaacgactctccggaactggtcaacagcgacccgtatgccgacggctggatcttcaaaatcaaagccagcgacgaagcgcaggttgccgcgctgctggatgcgacagcctatgaagctctgttagaagacgaataa

SEQ ID NO: 89356 - DNA, 1095 bp, Enterobacter aerogenes
atggctcaacagactccgttgtatgaacaacacacgctgtgcggcgctcgcatggtggatttccatggctggatgatgccgctgcattacgggtcccagattgatgagcaccacgcggtgcgcggcgatgcagggatgttcgatgtgtcgcatatgaccatcgtcgatttccacggcagccggatcagagagttcttgcgctatttgctggcaaacgatgtggcgaagcttaccaccccaggcaaagcgctctacaccggcatgctaaccgcttccgccggcgtcatcgatgacctgattgtttatttcctttctgaagattatttccgcctcgttgttaactccgccactcgtgaaaaagacctcgcctggatttccgaacaagccgaaccttacggtcttgaaattaccgttcgcgacgatctgtcgctgatcgcggtgcagggtccgcaggcgaaagcgaaggcggcgacgctgttcaccgacgctcagcgccaggccgtggaaggcatgaagccgttcttcggcgtacaggccggcgacctgtttatcgccaccaccggttataccggcgaagcgggttatgaaatcgctatgccgaacgagcaggcggcggatttctggcgcggtctgctggacgccggcgttaagccttgcggtcttggcgcgcgcgacaccctgcgcctggaagccgggatgaatctgtacggccaggagatggacgaaggcgtctcgccgctggcggcgaacatgggctggactatcgcctgggagcccgccgatcgtaacttcatcggccgcgaagcgctggaaatgcagcgcgaaaaaggcaccgagcagttggttggcctggtgatgaccgagaaaggcgtcctgcgcggcggcctgccggtacgttttaccgatagcgacggtaatcaaaaagaaggcattatcaccagcggcaccttctcgccgacgctgggctacagcatcgcgctggctcgcgtaccggccgggattggcgacaccgcggtggtgcaaattcgtaaccgtgaaatgccggtaaaagtgactaaacctggttttgtacgcaatggcaaagccattgtgtga

SEQ ID NO: 89357 - DNA, 1203 bp, Enterobacter aerogenes
gtgcaaagtgttgatgttgccattgttggcggcggaatggtgggactggcggtggcctgtggtttacagggtagcggcctgcgcgtcgcggtgctggaacaagcggcgccgcagcctcttgacgccgatgcgccgccagcgctgcgcgtttcggcaatcaatgccgccagcgaaaagctgctggataagctgggtgtctggagcgagattattgcccagcgcgccagttgctatcacggcatggaagtgtgggacaaagatagctttggccgcattagcttcgatgaccagagcatgggctttagccatctgggccatattattgaaaatgccgtggtgcatcacgcgctgtggcagaaggcgcagcgctgtgctgacgttaccctgctggcgcctgcgcaactgcagcaggtagcgtggggcgaaaacgaagcttttctgagcctgcaggacggtagcatgctgaccgcgcggctggtggtcggcgccgatggcgccaattcgtggctgcgtaataaagccgatattccgctgaccttctgggactatcgccatcatgcgctggtggcgacgatacaaaccaccgagccgcatcaggcggtggcgcgtcaggcgttccacggcgaggggattctggccttcctgccgcttagcgatccgcatctgtgctcgatcgtctggtcgctgtcgccggaggaggcgcagcgaatgcagcaggccgatgcagccgcgtttaaccaggcgctgaatatcgcttttgataatcgccttggcctttgccagcttgagagcgatcggcaggttttcccgctgaccggacgctacgcgcgtcagttcgccgcccatcgtctggcgctggttggcgatgccgcccacactattcatccgctggccgggcagggggtgaaccttggctttatggacgccgccgagcttatcgacgagctgaagcgcctgcacgcgcagggtaaagatatcggtcagcatttgtacctgcgccgctatgagcgcagccgcaagcacagcgccgcgctgatgctggcgggtatgcaggggttccgcgaaatgttttccggcagccatccggcgaagaaactcctgcgcgatatggggctcaaactggccgattcgctgcctggcgtaaaaccacagttgattcgccaggcgatgggcctcaacgatctccccgcctggttacgttaa

SEQ ID NO: 89358 - DNA, 1179 bp, Enterobacter aerogenes
atgagcgtgctgattgtcggcggcgggatgaccggcgcgacgctcgcgctggccatctcccgtatgaccggcggcgcgctgccggttcatctgattgaagcgcaggatccggcgtcgtcacgccacccaggttttgacgatcgggcgatcgccctcgctgcgggcacctgccagcagctggcgcgcatcggtatctggcagaaccttgctaaacgagcgacgcctatccagcgggtacacgtcagtgaccgcggccatgccgggtttgtaaacctggcggcggccgattacggcctgtcggcactggggcaggtggttgaactccacgatgtcggccagcggctgtttagcctgctgcgcgaggcgccgggcgtcaccctgcactgtccggcgaaagtggaagcggtcaaccgcagccaggacagcgtcagcctcaccctcgatagcggcgaaacgatcaacggtaagctgctggtggcggcagatggttcgcgttcgtcgctgggcgcccgctgcggcattagctggcagcagcagccctatgagcaactggcgattatcgccaacgttagcaccgcgttgccgcacgaaggccgcgccttcgagcgctttaccgagcacggtccgctggcgatgctgccgatgtcgcaagggcgctgttcgctggtgtggtgccatccgcagtcgcggcgcgacgaggtgcttagctggtctgacgaacgtttttgccaacaattacagcaggcgttcggctggcggcttgggcgcattacccatgccggtaagcgtagtgtttatccgctggcgttaaccaccgccatccgttcggtgtcgcaccgtctggcgctggtcggcaacgcggcgcagacattgcacccgatcgccgggcagggctttaatctcggcctgcgcgacgtgatgagcctggctgaactgcttgccgacgcccacgggctcggcgaggatgtgggcaattattctctgctgtgccgctaccaggcgcggcgagcggatgataaagccgccaccatcggcgtgaccgatgggctggtgcatctctttgccaaccgttgggcgccgctggtggcggggcgcaacgtcgggctgatggcgatggaattatttaccccggcgcgcgatgcgctggcgcagcgtaccctcggttgggttccccgttaa

SEQ ID NO: 89359 - DNA, 1317 bp, Enterobacter aerogenes
atgacacagcaggagtttctttctcgtcgccaggcattattggcgcagatgcagccgggcagcgcggcgctgatttttgccgcgccggaagcggtacgcagcgcagattcggaatatccctaccggcagaacagcgatttttggtacttcaccggcttcaacgaaccggaagcgctgctggtgctgatcaaaagcgatgaaacgcacaatcatagcgtgctgtttaaccgcgttcgcgatctgacggcggaaatctggtttggccgccgtctgggccaggatgccgcgccgggtaaactcggcgtcgatcgcgcgctggcgtttagcgaaatcaaccagcagctgtatcaactgctcaacggcctggacgctatctattttgcccagggcgaatatgcctatgccgatgaaattgtgtttaacgccctcgaaaaactgcgtaaaggttcacgtcagaacctgcaggcgccgaactccgtcatcgactggcggcctgtggtgcatgaaatgcgcctgttcaaatccgcggaagagctggaagtgatgcgccgcgccggcgaaatttccgcccttgcccatacccgggcgatggaaaaatgccgcccgggcatgttcgaatatcagctggaaggcgaaattctccacgaattcaaccgccacggcgcgcgtttcccgtcttataacaccatcgttggcggcggcgaaaacgcctgcatcctgcactacaccgaaaacgaatccgaactgcgtgatggcgatttagtgctgattgacgccggctgtgaataccgcggctatgcgggtgatatcacccgcaccttcccggttaacggtaaattcagcaaaccgcagcgtgaaatctacgacatcgtgctggaatcgctggaaaccgcgctggagctgtatcgtccgggtacctccatttatgaggttaatcaggaagtggtgcgcattatgattaccggcctggtgcggctggggatcctgaaaggcgagattgacgagctcatcgccaacaacgcccaccgtccttacttcatgcatggcctgagccactggttgggtctggatgtgcacgatgtcggtaattacgacaccgaccgttcgcgggtactggaaccgggaatggtgctgaccgtcgagccggggctgtatatcgccaccgacgccgacgtaccggcgcaatatcgcggcatcggtattcgtattgaagatgacatcgtgattaccgaagatggcaacgaaaatctcaccgccagcgtggtgaagaaggcggatgagatcgaggcgctgatggcggcggcgcgccagtcatga

SEQ ID NO: 89360 - DNA, 585 bp, Enterobacter aerogenes
atgcgcatgtctatacagaacgaaatgcctggttacaacgatgtagaccagttactgaaccaacaaggggtgggattaaccccggccgaaatgcacggtttgataagcggcatcctttgcggcggcaacaccgacagcagctggcagccgctggtgcatgatctgaccaacgaaggccttgcctttggtcatgaactggcccaggcgctgcgtagcatgcattccgccaccagcgattcgctggaagatgatggtttcctgttccagctgtatatgccggaaggcgacaacgtcagcgttttcgaccgcgccgacgcgctggcgggttgggtaaaccatttcctgctcggccttggcgtgacccagccgaagctggataaagttaaggatgagaccggcgaagccatcgatgatctgcgtaacattgcgcaactcggctacgacgaagatgaagaccaggaagagctggaaatgtctctcgaagagattattgagtacgtacgcgtcgccgcgttactgtgccacgataccttcgcgcgccagcagccaaccgcaccggaagtacgcaagccaacgttacactaa

SEQ ID NO: 89361 - DNA, 330 bp, Enterobacter aerogenes
atgtctgcacaacccgtagatctccaaatttttggccgttcactgcgagtgaattgcccgcctgaacaaagggatgccctgaatcaggcagctgaagaccttaatcagcggttgcaagatttaaaagaacgcactagagtcacaaatactgagcagctggtcttcatcgccgcgttgaacatcagctatgagttgactcaggaaaaagcgaagacccgcgactacgcctccagtatggaacagcgcattcgcatgcttcagcagaccatcgaacaggcattgcttgagcaaggtcgcataagcgaaagaccggggtcgaagtttgaataa

SEQ ID NO: 89362 - DNA, 597 bp, Enterobacter aerogenes
atgactatacagcccgatatcccgctctccagacagcaaattcgccagcagatccgcgagcgtagacgcgcgcttagcgccgaacagcagcagcgcttcgccctgcaggccgctgagcgaatgatggcgtatccgcccgtcgttctcgctcataccgtggcgctgttcctctccttcgacggcgagctggatacccaaccgctgatcgagcaattgtggcgggcgggcaagcgggtttatctgccggtactgcatccgtttagccccggtaatctgctgtttttgcattaccatccgcaaagccagctgattttcaatcgcctgaagatttacgaacccaggctcgacgtgcgcgatgtcctgccgctggccgagctcgatgtgttgattaccccgctggtcgccttcgatgccagcggtcaacgcctggggatgggcggcggtttctatgatcgtactttacagaactggcggcagtatcgcctgcagccggtaggctacgcccacgactgccagcaggtggatacgctgccgagcgaacagtgggatataccgctgccggcggtgattacgccaggtaaaacctggcgctggtag

SEQ ID NO: 89363 - DNA, 1233 bp, Enterobacter aerogenes
atggctaaggtatcactggaaaaagacaagattaaatttctgctcgttgaaggcgtgcatcagaaagcaatcgataaccttcgtgcggcaggttacaccaacatcgaatttcacaaaggcgcgctcgatactgaagagctgaaagcgtcgatccgtgatgcccattttatcggcctgcgttcccgtactcatctgactgaagagatcttcgccgcggcggaaaaactggtggcggtgggctgcttctgtatcggcaccaatcaggtcgatctggatgcggcggcaaagcgcggtatcccggtatttaacgccccgttctcgaacacccgttcggtggctgagctggtcatcggcgagctgctgctgatgctgcgcggcgtgccggaagctaacgccaaggcccatcgcggcgtgtggaataagcaggcggtaggcagctttgaagcgcgcggcaaaaaactggggattatcggttacggccatatcggcacccagctcggcattctggcggaatcgctggggatgcacgtctatttttatgatatcgaaaacaaactgccgctgggcaacgccacgcaggttcagcatctctccgacctgctgaacatgagcgatgtcgttagtctgcacgtgccggaaaacgcctccaccaaaaacatgatggggccggaagagctggcgctgatgaagccgggcgcgctgctgatcaacgcctctcgcggcacggtggtcgatattccggcgctgtgcgatgcgctgtcgcgtaaacacctggccggcgcggccatcgacgtcttcccgacggagccggcgaccaacagcgatccgtttaactctccgctatgcgaattcgataacgtgatcctgacgccgcatatcggcggttcaactcaggaagcgcaggaaaacattggtctggaagtggctggcaagctggcgaagtattccgataacggttctacgctgtcggcggtgaacttcccggaggtttctctgccgctgcacggcggacgccgtctgctgcatattcatgaaaaccgcccgggcatcctgacggcgcttaaccagattttcgccgcgcagaacatcaacatcgccgcccagtatctgcaaacgactccgcagatgggctatgtggtaattgatatcgaagccgatggcgacgtcgcgcagcaggcgctgctggcgatgaaagcgatcccgggcaccatccgcgcccgtctgctgtactaa

SEQ ID NO: 89364 - DNA, 663 bp, Enterobacter aerogenes
atgacgcaggatgaactgaaaaaagcagtcggctgggcagcgctgcaatatgtacaaccgggcaccattgtcggtgtcggcaccggctccacggcggcgcattttattgatgcgctggggactatgaaagggcagatcgaaggcgcggtctccagctccgacgcctccaccgagaagctgaaaagcctcggtatcccggtattcgaccttaactccgttgaccgcctcggcatctacgttgacggcgcggatgaaattaacggccacatgcagatgatcaaaggcggcggcgcggcgctgacccgcgaaaagatcatcgcctcggttgccgataagtttatctgtatcgccgacgcctctaagcaggttgatatcctcggcaacttcccgctgccggtggaagtgatcccgatggcgcgcagcgccgtcgcgcgtcagctggtgaagctgggcggccgcccggaatatcgtcagggcgtggtgacggataacggcaacgtgatcctcgatgtacatggcctggaaatcctggacgctatcgcgctggaaaacgccattaacggtatcccgggcgtggtgaccgtcggcttgttcgccaaccgcggcgccgacgtggcgctgatcggtaccgccgacggcgtgaagaccatcgtcaacaaataa

SEQ ID NO: 89365 - DNA, 933 bp, Enterobacter aerogenes
gtgcgggttaacgaaaagttatgggggtacgccagaatagtgaaacgaccggactacagaacattacaagcgctggatgcggtgattagggaacgtgggtttgagcgcgccgcgcagaagctatgcattacacagtccgccgtctcacagcgtatcaaacagctggaaaacatgtttggccaaccgctgctggtgcgtaccgtaccgccgcgcccgaccgagcaggggcaaaaactgttggctctgctgcgccaggttgagctgctggaagaagagtggcttggcgatgagcagaccggctccacgccgctgctgctgtcgttggcggtcaacgccgacagtctggcgacctggctgctgccggcgctggccaacgtgttatccgactcccctatccgcctcaatctgcaggttgaagatgaaacccgcacccaggagcgcttgcgccgtggggaagtggtcggcgcggtgagtattcagccgcaggcgctgccaagctgcctggtcgatcaactcggcgcgctcgattacctgttcgtcgcctcgaaggagtttgcgcaacgctacttccctaacggggtaacgcgttctgcgctgctgaaagcgccggtggtcgccttcgatcatctcgacgatatgcatcaggcgttcctgcagcaaaacttcgacctgccgccgggcagcgtgccctgccatatcgtcaactcgtcggaggccttcgtgcagctggcgcgccagggcaccacctgctgtatgatcccgcatctgcagatcgagaaagagctgaagagcggcgagcttatcgacctgacgccggggctgttccagcgccggatgctttactggcaccgttttgcgccggaaagccgcatgatgcgccgggtgaccgatgcgcttattgattacggccacaaggtgttgcgccaggattaa

SEQ ID NO: 89366 - DNA, 768 bp, Enterobacter aerogenes
gtgaagttaaaagtcttagccctggcggcagcactcggattcagcactatggcggcgcaggcaagtgaattgccggatggcccgcacattgtgacttcaggcacagcaagcgttgcagcggttccggatatcgccactctggcgattgaagttaacgtcgcggcaaaagatgcggcatcggcaaaaaaacaggctgacgatcgcgttgcgcaatatctctctttcctcgaaaagagcggcattgccaaaaaggatatcagctcggcgaacctgcgtacccaacctgattacgactatcagaacggcaaaagcatcctcaagggctatcgcgcggtgcgtaccgtcgaagttaccctgcgtcagctcgataagctgaatggcctgctggacggcgcgctgaaagcggggctgaacgaaattcgttccgtatcgctgggcgttgcgcaacctgacgcctataaagataaagcgcgtaaagcggctatcgatgatgcggtacatcaggcgcaggaactggctgctggcttccacagcaagctgggtccggtctatagcgtgcgttaccatgtttccaactatcagccgagcccgatggttcgcatgatgaaggcagctgacgccgcgccggtctccgcgcaggaaacctacgagcaggcgaccatccagtttgatgatcaggttgacgtggtctttgaactgcagccagcacaggccgccgcgcctgccgcgccggcgaaaccagctgaagcgccgaaaccggctcagtaa

SEQ ID NO: 89367 - DNA, 642 bp, Enterobacter aerogenes
atgctatcttattactttcaagggcttgcgctgggcgcggcgatgatcctgccgctcgggccgcaaaacgctttcgtgatgaatcagggtatccgccgccagtatcatttaatgattgcgctgttgtgcgcgcttagcgatctggcgttgatctgcgccggaattttcggcggtagcgcgctactgatgcagtcgccgtggctgctggcgctggtcacctggggcggcgtcgctttcctgttatggtatggcttcggcgcgctgaagacggcgatgagcaataatctcgagctggccagcgccgaggtcatgaagcaggggcgctggaaaatcattgttaccatgctggcggtgacctggcttaaccctcatgtgtatctcgatactttcgtggtgctgggcagtcttggcggccagctggcggtcgagcccaaacgctggttcgcactggggacgattagcgcgtcattcttatggttcttcggcctggcgctgctggccgcgtggctggcgccgcgtttacgtaccgcgcgggcgcagcgaatcatcaacgtgcttgtcgggctggtgatgtggtttatcgccctgcagttggcaaaagatggcctgcaacatatacagatgctcatcaaccaggcttag

SEQ ID NO: 89368 - DNA, 858 bp, Enterobacter aerogenes
atggaagatttgaacgttgtcgatagcatcaaccatgccgggacctggctggcgcgcaaccaggagttgctgctgagctatgccgtcaacatcgttgccgctatcgttatcctgatcatcgggatgatcgtggcgcgcatcgtttctaacaccgtcaaccgcctgatgctggcgcgtaagatcgacgcgactgtcgccgattttctctccgcgctggtacgctatgcgattatcgcctttacgctgattgccgccctgggccgcgttggcgtgcagaccgcctcagtgattgccgtgctgggcgccgccggtttggccgtgggtctggcgctgcaggggtcgttgtcgaaccttgccgcaggcgtactgctggtgatgttccgcccgttccgcgccggtgaatatgtcgatctcggcggcatcgcgggtaccgtgcagaacgtgcagattttctccactaccctgcgtaccgttgatggcaaaatcgtggtggtgccgaacggcaaaatcatcgctggcaatatcattaacttctcccgtgagccggcgcgtcgcaatgagtttattatcggcgtctcctacgatgccgatatcgataaggtgaaacaactgctgaccgcgattatcgaatccgacgaccgcattctgcgcgatcgcgaaatgaccgttcgtcttaacgaactgggcgcctcttcggtaaacttcgtggttcgcgtatggagcaaaagcagcgacctgcaaaacgtctactgggacgtgctggagcgcattaagcgtgatttcgacgccaatggcatcagcttcccgtatccgcagatggacgtacatatggtgaatcagcaggaaaaagcgcagtaa

SEQ ID NO: 89369 - DNA, 1080 bp, Enterobacter aerogenes
atgtctaaaatttttgatttcgtaaaaccgggcgtcatcactggcgacgacgttcagaaagtgttccaggtagctaaagaaaacaactttgctctgccagcggtaaactgcgtgggtactgattccatcaacgccgttctggaagctgctgcgaaagttcgttctccggttatcgtacagttctctaacggcggcgctgcgttcatcgcgggcaaaggcgtgaaaactgacgttccgcagggcgctgctatcctcggcgctatctctggcgcgcatcacgttcaccagatggctgaacactacggcgtgccggttatcctgcacactgaccactgcgctaagaaactgctgccgtggatcgacggtctgctggacgcgggtgaaaaacacttcgctgccactggcaaaccgctgttctcttcccacatgatcgacctgtccgaagagtccctgcacgaaaacatcgagatctgctctaagtacctggctcgtatggccaaaatgggcatgactctggaaatcgaactgggctgcaccggcggtgaagaagacggcgtggacaacagccacatggacgcttccgcactgtacacccagccggaagacgttgattacgcgtacaccgagctgagcaaaatcagcccgcgcttcaccatcgccgcttccttcggtaacgtacacggcgtttacaagccgggtaacgtggttctgaccccgactatcctgcgcgactctcaggaatatgtttctaagaaacacaacctgccgcacaacagcctgaacttcgtcttccacggcggttccggttcttccgctcaggaaatcaaagactccgtcagctacggcgttgtgaaaatgaacatcgataccgacacccaatgggcgacctgggacggtatcctgcagtactacaaagcgaacgaagcttacctgcagggccagctgggcaacccgaaaggcgaagaccagccgaacaagaaatactacgatccgcgcgtatggctgcgtgccgctcagacctctatggtgacccgtctggagcaggcattcaaagagctgaacgcgatcgacgttctgtaa

SEQ ID NO: 89370 - DNA, 1164 bp, Enterobacter aerogenes
atgtctgtaattaagatgaccgatttggatctggctggtaaacgcgttttcatccgtgctgatctgaacgtaccggttaaagatggcaaagtgaccagcgacgcgcgtatccgcgcctccctgccgaccatcgaactggcgctgaaacagggtgctaaagtaatggttacttctcacctgggtcgtccgaccgaaggcgagtacaacgaagaattctctctgttgccggttgttaattacctgaaagacaaactgtctaacccggttcgtctggttaaagattacctggatggcgttgacgttgctgccggtgaactggtggttctggaaaacgttcgcttcaacaaaggcgagaaaaaagacgacgaagaactgtctaagaaatacgctgcgctgtgcgacgtattcgtcatggacgctttcggtaccgcgcaccgcgcgcaggcttccacccacggtatcggtaaattcgccgatgtcgcttgtgcaggcccgctgctggccgctgaactcgacgcgctgggtaaagcgctgaaagagccggctcgtccgatggttgctatcgttggcggttctaaagtttccaccaaactgactgttctcgactctctgtccaaaatcgctgaccagctgatcgtcggcggcggtatcgctaacaccttcgttgccgctcaaggccacaacgtcggtaaatccctgtacgaagcggacctggttgacgaagctaagcgcctgctgagcacctgcgatatcccggttccgactgacgttcgcgtcgctaccgagttctctgaaaccgccactgcgaccctgaaatccgttaacgacatcaaagatgacgagcagattctggacctcggcgacgtttccgcacagaaactggctgaaatcctgaaaaacgccaaaaccattctgtggaatggcccggttggcgtattcgaattcccgaacttccgtaaaggtactgaaatcgtcgctaatgctatcgcagacagcgaaggtttctctatcgcaggcggcggtgacaccctggcggcgatcgacctgttcggcatcgctgacaaaatctcctacatctccactggcggcggcgcattcctcgaattcgtggaaggcaaagttctgccggcagtagcaatgctcgaagagcgcgctaagcagtaa

SEQ ID NO: 89371 - DNA, 1020 bp, Enterobacter aerogenes
atgaccatacgcatcgcgattaatggcttcggtcgcataggacgcaacgtggttcgcgctttgtatgaatccgggcgtcgtgcggaaatcaccgtggtggcgatcaatgaactggcggatgccgcaggcatcgcgcatttattgaagtacgacaccagccatggccgtttttcctgggatgttcgccaggagcgggaacagctgtatgtcggcgatgacgtcattcgtctactgcatgagccttctatcgccgcgctgccctggcaggagctggcggtagatgtggtgctggactgtactggcgtatacggtagccgtgaacatggcgaagcccatcttcaggctggcgcgaagaaagtgctcttttcacatcctggcggcaacgatctcgacgcaacggtagtcttcggcgtcaaccatgatgaactgcgcgcggagcaccgcattgtctccaacgcctcctgcactaccaactgcattattccggtcattaaactgctagatgatgcctacggcattgagtcaggaacggtcacgacaatccactccgcgatgcacgaccagcaggtgatcgatgcctatcatccggatctgcggcgaacccgtgcggccagccagtcaattattccggttgatactaaacttgcggcggggatcacccgtattttcccgcagtttaacgaccgttttgaggcgatcgcggtacgtgtaccgacgattaacgtcaccgcaattgacctgagcgtgacggtgaaaaaaccggtaaaggcctgtgaagtcaaccagttgctgcaaaaagcagcacagggagcatttcatggtatagttgactatacggaattaccgttggtctcgacagattttaaccacgacccgcacagcgccatcgtcgatggtacgcaaaccagggtcagtggcgcgcatctgatcaaaacgttggtctggtgcgataacgaatggggctttgctaaccgaatgctcgacacgacgttagcgatggccgcgcaaggtttcaggtaa

SEQ ID NO: 89372 - DNA, 240 bp, Enterobacter aerogenes
atgcagcagccgcagccgcagtatcagaacaaaattcatctgcgtcagaaacatcagcagcccaatcagcagaagatgccatatctgcaaaaaatgatgctgaggctgctgctggcagtgcttccgagtatgctgaaaataaattcacgttttataagacagctgatgatcctgatggaacgatcgctggccttgctgctactgtcagcgggcagtcgttccgtgtcgcgcagggggtag

SEQ ID NO: 89373 - DNA, 1143 bp, Enterobacter aerogenes
ttgaacaattcagccataccatcgagtctgtcggtggttttttctgttgatggtgacaagaatacaataccgacaaatgctacatcggataccctctctcaggggttggcagcgatggactccggttttccacctttaacccgaacagcgctttctgctggtggaaaaccaccacagggacaggatttcaatggaatatttaacgatgtttatacccgcttacagtggtgtggcgcgggaatggggtacccatttaatgcttcattcagcgcagcgatatcaggttacccaaaaggggcgctcattccttcatctgatctttctggtcaatggctaaacctaaacaatggtaataacacgccaccagaatcctcagtaggcgctacaacaggatgggttccgcaaaacaactatggtattacccaaattaccggcttggccggaagcagcatcacaatgtcttcattgcaggctgcgaaggacaggatcattcttacaggcacgctgaccgccaatatcaatcttactttccctgcatggatcaaaagctgggtggttcataacaactgcacagggaatttctctgttacttgtaaaaccgcatcaggtaatggtgtcgtcgtcattcctggccttgtgagtcgtatattttgtgatggcgtcaatatcactgatgaaaccatgtccacgcagacagatctggtcggtagtgtagtcggttttgctgttaataaagctcctactggttggttagccgccagtgggcaggctgtaagccggaatgtttatgctcgtcttttctccagaattgggacgacgtggggagctggtgacggctcaacaacctttaatcttccggatgcgcgggcggagttcattcgtggctgggataatgggcgtggtgtagatactggccgtgtttttggtagccagcaatctgcttcttcgctttcaccatttgttgggagtgccagtggcactactcaggtttatggcgttggaattagaaatgctgaatacgcaagcaccgaaagcggataccagacatataaaattcagtctggtagcgaaggtcctatcggaactaacttcatggcagtcaggccaaggaatatcgcattgctgtactgcatcaaatactaa

SEQ ID NO: 89374 - DNA, 588 bp, Enterobacter aerogenes
gtgaataatgttgaatggactatctacgcggagtacgtcaactctgagcggctaaggtcgcttattgataccttcaatgcttctgtcgcgccagaggactggatagacactttctacgacattgttttcaacattgagacctgcgaggactacgggctgatgtgttgggggaaaattgttgatgtgagccggttgcttacggtgacgccatcacaacaatatttcggtttcggggaagcaaccagcaccccggcagaacttactgatccccggccatttaaccaggcaccattttataccggtgcgcaggacacaaacacggttgttctgaccaatgacgcttaccgaaaactcatcatgtgtaaggccatggcaaatataacggactgcaccgttcccgtgatgaatcgcatgctgatgtacatgtttagtgagagtggccgggcttatgttcgcgatgatggcaaccatgtaatgagctacgtctttgaatttgctctttctgagtcggagctggctattgtgcaaagctcgggtgcgcttccatccccgccaggggtaaaagttaatattgttcaggaggtttga

SEQ ID NO: 89375 - DNA, 1233 bp, Enterobacter aerogenes
atgaccacaatttctaccgcggtaccatcggtaaccttctctacaagcgggctggatgttcctgatgaaggcgatatcctcgcgggtcgccaggctgacattagttctgcattcggttccgcgctaagtaacaacttaaaaaccccacagggacaacttgcagtaagcgacactgccattatcgccgacaaaaacgatcagttactggccgtcgtgaataacatgaaccctgatttttcttccgggcgatttcaggatgggatcggacgcatttatttaatcgacagaatcgctgcagttggtacggttgtaacggctacctgttccggtgctgttggaactctcatcccggcaggttcctatgcaacggataacaacggctacatgtatgtttcgcttgccgacggaacgatcggagcagacgggacagttaaaattgaattccagaacctgaccactggccctattgcctgcccgattggctccctgacaaatatctatgttgcggtgagtggctggtcgagtatcacgaatgagaccgcaggtgttgcgggttcggacgttgagagccgtgcagcatttgaatatcgacgtcggcagtctgttgcccgtaatgctttcaacactgccgccgccgtgcgcgcgcagattctggaggtagagggcgttctggatgcgtatgttatcgacaacaaggagcctaaccccgtaaataaaggctctacgaactacccccttcttgccagctctatttatatcggcgtttacggtggttctgctgaggatatcgcggccgccataaacaaaaaactcccacctggcactgtcatgaatggtgataccactggcacggtatacgacacggaaaactacgatgcgccgtatccggattacacctacaaatggaaaacactggatgctgtcagtgttcatatcaaagttgagtatgaggctaacgacggacttccgtcagatattaatgatcagattaaaaaagctgtactgaatgcatttacgggcgcggacggcggtacgcgtgcgcgctgtggagcccggatttatggaagccggtttatcggtccgattcaggcgctagatgatcagaacatgaacgttctttcggtacaggtctctctcgatgggacaacgtggtccagcgccctgaccatcggtattgatcaggagcctacgctcgacgaaacaaacattatcacggaggcagtcagtgaataa

SEQ ID NO: 89376 - DNA, 465 bp, Enterobacter aerogenes
atgaaaaaattaatagtcatttcagcctttattattttttccttatctcctcctgctatgtcaaagcagataacatcgcatttaaagatggttgatggtcatattaatggaaccctcaaagcaaatgatgacgagccgatatggtttggaatctttgaatatgactttttaggaagtcagcacctaacctgtcgaatggactctatgcatacctccggagatgtgccggatagattgacgtcagtaaattatcgttgccaaaatgggttctctgtccagttatcaaaaaaagaaaatgataggtatgctactttaagccttcaaaacataaactttgaaaatggagaggagatttcgttaggtagttacaaggttacatcatcaattcccttaatgatgattgaaaataataaatataatgatgatctgttcaataagaaaaatgcggaaagagagcatgggtaa

SEQ ID NO: 89377 - DNA, 588 bp, Enterobacter aerogenes
atgttaacgaaccaaagtcctgagagtgtctcttgtcaggggaataccattgcggtattactttcctctatattaaaggggttctcatttattgatatagtattggtaaaggagctagaaggtgacaccctgacggtacttccccttgtaaatgatgtagatgtatcaggtagaacaatcgctaatcagaatgtataccagataccatatctcaggttacaagcaggaagcagcgcaataaaaatggaaccaagagttggtgatatagggcttgttgctatttgtgacaaagatactactaatgtcagagataccagtaaaggtggaccatcaccgactcgaagacggcactcttacgctgatgcagtgtatctgactgcaattgccagcctgaacggagagcctaccgaattcgcggaatttactggtgatggcattaacatcaaaagccccggagtggtgagcattaatggtgtgaaaatccatcctgacggtaaacttcagttggttgacggttcgatcgttgatggtcatgaccatggcggggtagaatcagggggaagccgaaccgatcctatggaaccgtga

SEQ ID NO: 89378 - DNA, 882 bp, Enterobacter aerogenes
atgagttataagcagagggaattaacggtatctttcacgctggcaaatggaacgtttgacggggatgttggtaatacgctaacggttaaaggttttaaatgcgaagcggctatctctgcttttggtggggcaacgggaacgatactggagctcagtctttgggggctttctctggttaatatggctaagctgaccactaacgcacaaaagataattgctgaagagcagaatgctatcagggtatatgctggtgatgatcgtgttttttccggatcaattacttcagccagaatcaatcttaaccagatgccggatgctccgattgagataaccgcagccgcggcaggtagagagcgcctgattccttgtgagccaacttctatccgtggcgacgtgtctgttgccgacatgattagggcattggcattcaaggttgggctgaaattcataaatgtggatgttaaaagtactgaaagaaatccggcctataaaggaaatgcaataaaacagatactggagatagcctcagcacataatattactgcaaatattgactttgggacggtaacaatttacacagggaaaaatccatccgactcagtagtgcctttaatttctccagagcatgggcttatcggatatccaatattttatgatatgggtataaatttcagatgtatatattcaccagtgttaaagttgaataccaaaataattcttgaaactatgctgcctcatgctagtggagaatggataattcaggccggaacaactcattatctatcgtgtaagatacctggtggtttatgggaaacattcgttgtagcagctcccggctatctaatcgaagaggatgtaaatgttaacgaaccaaagtcctga

SEQ ID NO: 89379 - DNA, 306 bp, Enterobacter aerogenes
atgcaggagataagtttaaaaccttctctctcgcagaaggtttatgtcacgcttggtggtcagaattgcgctattaaacttcatcagcgttctactggtttttatgctgacctttatgttgatgaaaagcctgttatgcagggggttctgtgcctgaactgtacttaccttgtcagatataaatatttaggcttcagcggtgatcttatctttgttgatacaaaaggggattccgatccttcttatgatgagattggaacccgattccgtttgtattacgcaacaagtagtgaggttggaagatga

SEQ ID NO: 89380 - DNA, 840 bp, Enterobacter aerogenes
atgtcgttctctttaaatgtctcgacagtgctctctgccattcagggcgggagcctgttatcaatactcaacagcgcattatccccaacttataaaatcacctataacaccgtcgatgagtcattattgaccgtggctgccgggcaggaggttttctctccttccggttgggtaaacgttgataggtctggtgatgcgatggtgacgaaaggtccggtagagaagggccagtattcgtcctataacaaggtcagacaaccttcagagctccggatcatctttgcccttgaaggatggactgctttctctggtgctcttcctaacctgacgaatttctcacttcttagccgaagcaatttcattcaaaaactggatgagatgaaaaatacggccagtacctttgatattgaaacgccggatacggtgtattacgggtacgacttgacccactttgactattttgttggtccgtatcgcgggcaaacaatgcttatggcgaattgcacgtttgaagagatcatgaacggcggggaagtcatgctaactaatgcagtgatcgaaaaaccgccgaccaacaacaaaaaaacgaataatggtggtgccgcatcgactgatataatcaccggttcgactaaagaagtttcattgagcgacgttaaaaatgcctggtccagtgctaactcgtctttatcaagcgctctacagtccacagggggcgcgatagtctccaatgttaattctgctgctgagtctgtatctcaggtatgggacagcacatctacggcggtatcaaagcagataaaaagtacggtctcagattttctggaaaaggtaatgtga

SEQ ID NO: 89381 - DNA, 1899 bp, Enterobacter aerogenes
atggcggcaacggtaattgatgcactcatggtcacgctgggccttgatgcctctaattttcgtaagggtcagaaagaagtcagcgatgatctgaagaaacagcgtgaaaatgcccagaaaacagctaaggagatggcagagcaggggaaaaaagccgcgtccttctttggcagtattaagactgagatcctggccctggctggtgttaccgttactgctggcggcctgatgagttttgttaaaaacacaacttcaggcctgatggatctctctattcagtcgaaggcattgggtctttctgctaaggagcttgatggttggtcgaaggctgcagatgcagccgggagttctgccgcaaaaattggtacatctctacaggggtttcagagcgcaattcagggggcgagggttggcgattataacagcccgatttttaatggctttaaacagctgaatgcccttaccggacaaaattttgatgtatgggggcaagatgccagctctttgatgaagacagccctcgaagcgcttcgaaaaatcaaagatccaaatttacgccgtcaggttgggttgagtctcggttttgatgatgcagtgattcaacgtaaccaggaagggaaactccttcctgatgttgcgaaatataccgcaaactcaggaaatactgaggcttcaataaaaggcgcaaaggaatttactgaggcatggacggttctggatcagaatcttgaaaccacaaaaaaccagttttatacattcctgatcccgtacatcaggatgtttaataaccagcttattgagctttcaaactggatgaaatcgcaccctaaagaaatgaaagatgcgatcgattccattttgggtgcgctaaaagacctgattggcctcgccaacaaagcagctgatgccgttggaggatggaatacggtgatcatggttctgttggggctgaaagtcgcttcatggttccgtggaattgcattagctattaatggccccggcggcctgattttcgcaataactgccctatatccgattattgatggattgttatccagaatcatcagcaaggaaaataaagaatggatgcaaaaccacggtgtcttctttacctcaaccggcgagttcttttttaacaaaaaagctgctgaagaaaggcagaggcagattgattctggcgctgctcaaaatggatcccaaagaacaaccccaaacgcctaccagcagggcatgatcaatgctcaaatggacctttcaacggcaatgaggttggatgtagggcaatatcagccaaatattcctttaaacgccaaagccgccaaattaggggcaaaggggaaagctttcctgcaggctatggctggcgaattcggcgcgctggagggtaaatatggcctccctgcagggttactttactctgttgctgccactgaatctggtggagacccattcgctcaatccggtgccggggccaaagggctattccagttcatgcctggaacggcaaaggatatggggctgaaaggccgtgatgtttacgatcctcacaaatcggcagaggccgcggcaaaatatctccgttatcttcaggatgcaaccggcggggatctggaagccacattagcttcgtataactggggattggggaacgttaagaagaaaggtctcagcaatatgcctgaggagacccggaattatgttcctaaagtcatggctgggatgcggccgggggcggggatggcggttgaccgtgaaatgccagggcaatcaggtgcaacctatcagttctatggtaccaaaattactacccaggcgcagaccgtggagcaactcaccagcgatatcaaaaagcacggcgataatcgtgtgatgctcctggctggctattcaggacaataa

SEQ ID NO: 89382 - DNA, 477 bp, Enterobacter aerogenes
atggcgcgtaaaacgattgtctttacggtagaagctgataaccgtgataaaggaaaaaccttcaaaattaccgagatgccagcaagaaaagccgaggaatgggcaattcaggtggcttgcgcggtgatgggggcgggtgtctctgttcccgatgatgttatgtcggctattggtgctgctgttgccccagctcctgctgttgaagatcaagcagcacttgagctttatgaaagtgtcatggcaagtggaatggctggtctggctaaatgggggcttacctcgcttgctaaggtgccatttgcacagtcgaagcctcttctggatgagttgcttacctgtgtgaaattcgtcggtgggaatggcatagaaacccctctggttgatgaaggccagattgaagagatcagtacctggactcgcctgaagatcgaagcctttaagctccatgtcgcttttgtcaaagccaccgcaaattaa

SEQ ID NO: 89383 - DNA, 444 bp, Enterobacter aerogenes
atgtccaatcaaaatattacgtcggctgatgcgatcgttgagctcgttgtcgccgagctttatccgtcaggtttcaatctggagcagttcgaagcccaaaacatctttgaaatgggcgatacggatgctgctgaaacacagcgtactgctgatggtaagcttctggccggttttatttatggtgatcttccgtggacattccacctcgcggcgtcctctccatcaattcagtattttgatacctggctgactacccagatgacggccagaacaatccttcggtgtaatggaacggtcattcttccctctctcggtaaaaaatacaccatgacgaatggagtcctgcaacgtgctaagcgtatgccttctgcggggcgtgttcttcagcctgtaacgggtgtaattcaatgggaaaccattaccccttccaactattctgcatga

SEQ ID NO: 89384 - DNA, 1482 bp, Enterobacter aerogenes
atggcaatttcgctatctaaaatcgcccagatgctgcccggcgttctgaaggcgacggggacggctattgatttaaatggcctgtttctgactgacagtccttatgcgcctgttggtgcagtaccttcgttttccagtgctgatgaagtcaaaagctatttcggtagcgtctcgacggaatacacagcgtctgtggtgtacttcgctgcatatgcgaataaaacccagatgccggggaaacttttcttcagccggttcaatgacgccgcggttgctgcgtttctgcgttccggctcccatgcgactactacactagcgcagattaaattgatgaccgggactcttaccctgaccgttgacggtacagaggtaacatccgagacgattaatctcagtgctgcgaccagctttgataatgctgcagaacttatcgaaaccgggatcggagcatcggttacggtcgtgtgggatagtgtgctgaaaaaatttatcatcacgtcggcaaccaccggggaagcgagttcgatcaccttcgccaatgatgagacctttgctcagtcgttaaaactgacggaggctactggcgcggtgatctctcagggggctgtacccgctgtcgtggatgacatttttaccgcaatcctcgccgctgaacaggactgggtaaccttctccactacctttgccgtcgataaagaccaggcgaatgagttcgcgcagtggacgaacggtcagaatcatcgctttgcgtacgtgccgtgggacgcaaccggcgcggctgtcgtctccggaagcacaaacgcgctgacctacgacattatcaatacgtacgcctacaacgatacctgccctgtttatggctatccaaaccatgccgctaacgcgatggggtttgtggctgctctgaattttaaccaggcgaacgggcgttgttccctgaatggtcgccagtgctcgggtttgttgccgatgatcaccaacgacaccgattacgaagccgctaaagccaatggatataacttttacggtaagtacgccgcgaacgccgttgaaactaaccagtgggcgccgggttccatcacgggtgattttgcctggcttgatgcatgggcggggcaggtgtggattaacgcgcaattgcaggcggccctcgtcgcgcttttccagcaggcaaccaacttaccctatgccactgcgggtaaagcacgtattgagtcgtgcatgaagccgtatatcgagcagtttaaaacgtggggcggtttaacagccggcaccgaccttgatcagtcccaactggaccagattaaggcgattacccaggtggatgtttctgatgcgctaatggcagacggttattacatctacatcggccccttcacggcagccatgcgttctcagcgtaccaagccaaccgtttatttctggtacacggatggcggcattattcagggcattaccgttaacagcgtggaggtgcagtaa

SEQ ID NO: 89385 - DNA, 555 bp, Enterobacter aerogenes
atgtcagcaactgacgtagaactccaggtaaccgatagcgacctgtttaaagccactggcgatttcctttcttccttgtttccagccgttgaagtccttcagagccaacaaaaccaaacatccatgtcgaaaggcggattcatcaccatgacgccgctgtttctgactgatctctctaccaactccatcacctacgagtacgacggtgtgagcgagtacggaaaagagcatttacgccgcgtggatgaatggcaatgccagctcgatttttacggtaaacaggcgcagaacaacgcgacaatattttctcgcgtcgttcgatcggaattcgcctgcacctggttcagggagaacgcgaatgttctcgttccgctttattctggcccaccccggcaaaccacaatgatcaacggcgaaaaccagtgggaatcccgctggacgcttgaattccacgcaaacccgctgacggtcgtcagtgttcctcagcagtttatgactggtgccaatgtcatatcggagccagttgatgtgagatttcctccggagaaaaaataa

SEQ ID NO: 89386 - DNA, 369 bp, Enterobacter aerogenes
gtgaaccttcattcgatcgttagcggtgcaattggtgctgtaaacccgcatgttgaagcgaaaatttatcgttccgttggtgcggttaaaaatcctgattattccaccacacccggttttgctgagccggtaacgatgatggtccagaaacaggcactaagtcaggccgatatccggcacatggataacctgaatattcaggggattctggtcaatatctggaccaatggcaattggtgtggtttggatcgggataagcagcaggggggcgataagttcgttatcggtgatgaaacctggctggtggttgcggttcctgaaatctggcccgactggacgagggttattgcatgtcagcaactgacgtag

SEQ ID NO: 89387 - DNA, 570 bp, Enterobacter aerogenes
atggctgcattttctggcggtgatgcgttgacgcaaaagctactggagatagaaaaaaacctcggcaaaggtgaattgttgaaagttggatttctggagggggcgacatatccggatggaacgcccgttgctcaggtggctgcgacgcaggagttcgggggggaaatagacgtcccggaacagacgcgggaggtttattttaaccagaataaaaatggcagtgttggcaataagtttgttcgaaaagaaaaggcgaattttgctcaggccgttttcattcctgctcatactatcgttattcctccacgaccatacttccgcaaaatgatctgggctcagtcgccggggtggggtgcgctggtcaataaggcgctcaggagtagcgactacgacacaggagttgctatgcagaaggttggcgaaattatcaaaggccagttgcagaattcgatccgacagttatccgatccgcctctggcgcaatccactattgataagaaagggtcagataagcctcttatcgaaacggggcatatgttgaactctgtagattatgaggtgagcgagtga

SEQ ID NO: 89388 - DNA, 441 bp, Enterobacter aerogenes
atgggggtcgttgtctttgatgttgagaaattccggcagcgctatccggagttttcctccgtttctccagaactgctgaccgattatttcaacgaggcaacgatctacctcgataacactgatcagagccgtgtgcaggatgtagcgcagcgagccgtgttactgaacatgctgacggcacatatcgcgaaactgaactcagggagtaacggtgcggcggcatctgatttggttggtcgtatcagtagcgcttctgagggatctgtttctgtatctgccgatatggggccagtctcaggctcagaggcctggtatcttcagacaaaatacggtgctgcatactggaccgctacagcgccatacaggacgatgcagtatgtacccggccggagttactcacctgcaggctatcgttcggtcctacgtttccggcggaggtaa

SEQ ID NO: 89389 - DNA, 357 bp, Enterobacter aerogenes
atgagcgaaaagaatacttccggcggtaccgtcatcgtcggctgcaaactaccgtgcggtcttgttatcagccacggtggaaaatccgttgagttgaagggctcccgtgagtccaaaattcttaatggctttggtatgacgccgggtgtagacgctgaatttttcgaagcatggaaaaaagtacataaaaacatgccttacgtaaaaaacgagctgattttcgcctacgccgatgaacgtagtgcggcagacatggccgacgagcggatcaaggaaaaaactggaatggaaggtctggatccggataaaccgggcaaagaccttgagcgcgttcctgaagaagaagaggacgaataa

SEQ ID NO: 89390 - DNA, 1044 bp, Enterobacter aerogenes
atgcctaagcatcaagatttagtttacgccgaacgcgagtacggcattgttctgccgggtgaggatgccgattttctggacgcccgatttgacgtctaccgaaacaatcactctctggcaatggatgccgcgccgcaactggttactaccagtaacagcgggatcccggcttatctgaccaactattacgatccggaaatcatcaacgtactggttacgccaatgaaagccgcggttatcctgggtgaaaccaaaaagggcgactggactacggcgaccgcatcgtttccgatgattgaatccacgggttttgtcagctcctacggcgactactccaacaatggccgcaccagtgctaacgctaactgggaatatcgcgaaagctaccattaccagaccgttactaaatggggtgagaaagagctggcgcgctacggtgaagcacagatcaactatgcagccgagttgaacgtctccagtgcgttgacgctggcgaagttccagaacaaatcgtacttctttggtattgccggtctgaaaaactacggaatgttgaacgatccggcactgagtgcgcctatcacgccgctggacgacggcaacggtaatctgcagtgggatgataaagacgcagaagcgatttataacgatatcgctcaggggctgtataaaaagctcgctgcacagcttcagggccaccttgagcgcacggatgctatgacactgtcgctggatcctgaaacggaagtaaatatgactaagaccaacatgtataaggtcaacgtctccgatctgttgcagaaaaacttccccaacctgcgtattgaaactgctgttgagttcaatactacggcggggcgtatggtgcagctcaagcttgataaagtggacaacaaaaccactggttacggcggtttcaccgaaaaaatgcgcgctcatcctgtagtgacgggcctttcttccttcaaacagaaaaaatctggcggtacctggggtgcgatcattcgcttcccgctcggtttcgcaaccatgctgggggtttaa

SEQ ID NO: 89391 - DNA, 492 bp, Enterobacter aerogenes
atgtttcagacccgaatgaaccaagatttgcccattggcgttgagggcgattttgcgagtgataacccgtactccacctggtttgcgggagaaggggcgttagtcgccagcgctgatggtgtaaccgtcgggcgttttgcgtgggttgatgctgataacgtcattgcctccaataaaggcactggcgtacctcagggctttgtgagccgtgaaggtcaggcgctaatcactgactggatgggaaatgcctccatggtcattcctgaaggtatgcccgttgacctgaaaactcgcggcgatttcttagcgaagaccactacggccgcaaccgtaggtcagaaagtttttgccagcctgactgatggaacgatcgctactggtgacgccggggccacgatggctggctttatcgaaaccattttcactgttggtagtgccggtgctgctaacaccattattgcaattggaacctggggaaacagctatgcctaa

SEQ ID NO: 89392 - DNA, 1362 bp, Enterobacter aerogenes
atgaaaagaaaaaatcctgatcgcctcgcattcgatcgggcgagcgtgcgcacgtacagcaaagatggtgtgttgcacgtatccgtaagccctatatcaaaagcgatggtatgcccctattacgggcgcgaaattccagattctgaggcgctaggccttgaacctaacaaaatttattacctgtaccgcgatcctgaagaactgaaaaaggcggcggcaacatttaataatttgccgttgctgaataagcatatacccatctccgctcatgatctgccgaaagaaaacattgttggtaccaccggcagtgaagcgtcgtttgaagcgccttatctgaataacagccttgctgtctgggaggctgacgctatcgccgggattgatagtgaagagcaaagcgaattgtcttcttcttaccactaccgggcagatatgacaccaggcgaggcagagggcgttaagtttgatggcgtgatgcgggatctaaaaggaaaccatgtagctctcgtcccggaagggcgcgcgggcgctgacgtcgttgtaggcgacgaactcccagaggaaatgaagcaaatgaagaaaaaaatgaacgcgaaaaatattgcgcgtcgtgcggcgctcagtgtttatctgcgcccgcgccttgctcaggatgccgcgattgataaagcagaccttacggcgctggttgtcactcatgcatcaggtaaagcgctggcggccgctgtcgctaaaaaatacggtaaccgtcttgctcaggatgccgagctgaacgaagaggagatcgaagaaacgacggataccgccgcagatgaggcaggcgaagaagaaaaggataaacccgctcaggatgacgatgaaatcctgcagacggtgcttgccgcccttgaggggaaagtaaacggcgacgttctggcgaaaattaaatctgctctcagtggtcaggcccaggatgatgatttggatcctgataatgcccctccgtctcagggggccgatcctgaagatgacaaagtggctaaacccgcgatggatgcggccattaagtcggcaaaggctcaggcaagaaaagatgccgtgaaagatttcaacgccattcgccaggcagagatcgacgtgaaaccgctggtgggtgatgtggtggcgatggactctgctgaagatatttatcgctacgcgctggaacaggaagaagtggatatcgaaggcgttcacccttcggcgttccgttccctggttaaagcgcaaatcagcacccatcaggcgcgtaagccgggtaaaacgccactggcgatggatggcaagaccgtaaccgggtttgcttctcgcttcccgaacgctaccaaattagtaaggagctaa

SEQ ID NO: 89393 - DNA, 669 bp, Enterobacter aerogenes
atgtctcaggcctacaccagcagcgatgcaggtattgcccaggatgccagtcctgcggtggcgcttcgaaatgccgcccggcgtggccgtaaaaaatggctgaagaaatacgatgaggccgccgaagttctggcgagagagtttgctgataaaacgcttggtgcttctgacaggtcaatgcgtaaaaaactggatgatatcgggtttaatgtcaggtttacgatgaatgacgctatgcgtgacgcgtatcaggccacgataggcgagaacgtcggtcttattcggagtatcccggagcaatatttcactcagatcgaaacgatggcgatgcagtcagtgaccgcagggcgtgatgttggcgcactgaccgataacatccagaagcagtttcacgtcactaaacgccgtgcagcgctcattgctcgtgaccagaacaacaaggccacctcggacatggtatcagcccgccagcgctctcttggcgctactgaggggatatggcggcacagtcacggcgggaaaacccaacggcctgaacatgtcgccgctgacggcaagcggtttgatctttcgaaagggcttctcatcaaaggtaaatatgtcatgcctggcaaagaaattaactgcaaatgcggttgggaaatggtgctgcccggctttaacgactga

SEQ ID NO: 89394 - DNA, 1533 bp, Enterobacter aerogenes
atgaaattttttaaattccgggaaagaaaaaaagcggaacagccaacgccatcgccgccacctcaacccaagaagatgaaaattaatccagtgttgctgactatggcaaaactggagaaggccaaaaagaaaaaatacatccacgctatcgaacgctacgagccgccagcaggagttatcccggaagagatcagagatgccgtactggcaatggattcaacgccatacgggacgcctgcattctcctctatgaccatggggcagagtggttttcccggttatccctatctggcccagctcacacagcgcccggagttccggaagatggtcagcgtcaacgcaaaggaaatgacccgtaaatgggtaacattaaccagcgtcggcgatgaggataaaagtgaaaagatcgctctcttggaaaaagccatggagcgttacaacgtccgtgagctctttaagctggcgatggaacatgatggtttttttggccggggacaaatttatatcgaggtcaggacaccaaaaggaattgcggcatccacagacccggttgagttagagacccggcttttccggtctaacaaaaaaataacgaaggggagtctcgttgcctttcgctgtgttgagccaatgtggacatatccggggatgtataacgccagcgatcctcttgctgccgattactacaaaccgcagagctggtatgtcatggggaaagaggtacacgcttcacgattcctgtcgttcgtgtccaggcctgtccctgatgttctaaaagctgcttataacttcggtggcctgtcgctgtcgcagattgctgagccttatgtcgataactggatccgcacgcgtgacagcgtcggcgacatggttcactcatattcaacatctgggttcaaaactaacctgcaatcgacattagcaggcggttccggctcagatatttttgaccgcgcggagctgtttaataaccttcgtgataatcgtgggttgatgatccttgatcaacagagtgaagagttttttcagttcaacacaccactatctggcctcgacaccctacaggcgcaatcacaggagcatatgtgtagcgtcagtgggcaaccgttggttaagttcactggcatcacccctaacggcctgaatgcctcctctgacggtgaaatacgggtgttctacgacgatattcacgcggagcaagaagctgtattccgggataacctggtggaagttctcaatatcatccagctctcagagttcggtgagatcgataccgatatcagcttccgctttgaagcacttatggaactcagcgccgaggaaaaagccaatatcaggaaaacagaagcggaaacggacgacattctcgttaacaacgttggcagtctgtcgccggatgattctcgcgaacgcctggcaaatgatccggatagtccgtatcactctctggagaccaattccaatgacgagctcgaagacgaagaggagtcagaagaaaacaccgacgaaaactttgaaacgggttcaacctaa

SEQ ID NO: 89395 - DNA, 1515 bp, Enterobacter aerogenes
atggccgtcgcagaaaccagcttgaagaaaaactcgacgattcttaaagcatataagaagcgggcaattgaacaggccagaaatggtctgatggattttacgctgtataccaacccccgttatgagacgggatggtttaacgagttgctttgcgctgagctggataatttccttcgtgaagtcgaagaagggaaaatgcctcgcctgatgattttcgctcccccgcgttccgggaagagtgaactggcttcccggcgatttccggcgcgggtacttggaaagcaccctgactggaacgtgatttcttgttcctattcttcagaccttgcaaaccgtatgtctcgcgatacacagcgtatcgttgagggtaagcgttacagtgaggtgtaccctgatacgagaatgggcggtgccagaagcggggcaataaaaacctctgagctttgggaaaccatcaacagcgctggaaagctgaatgaaggctcgtatcgtgctgctggtgtcaacggcggtatcaccggtcaggggatgcacatcggtattattgatgaccccgccaaagattataaaaccgcatcgtctaaagcctaccaggacacggtaatcgactggtacgacaccacgttttttacacgtgctgatccaaagctgaacgggatcatcattatcctgacccgttggcataaagatgatcttgccgggcagttgctgaaaaaagcagaggaaggcggggaagactggcgcgttatcagttttccgatggaggccgaaaaagacgaggtccacgagctgaacgggaagaaatataaccttcgcaaaaaaggtgaaattcttttccctgagagaatgcctctctcattcgttgctaaatgcaaacagcgcggatcccttgtctggaatgcgctttatcaacaacgcccgtctccaaaaggcggcggcctgattaaatccgactggttcggtcagtataaagtcctcccgcttctcaaatggcgcgccatctacgccgacaccgctcagaaaataaaggaagttaacgactactccgttttcgagcattgggggcttggtcaggatggccgtatgtacctcatcgacatgatccgcgggaagtgggaagccaaagagctcaaacgtcgtgctacagcgttctgggcgaaagccagagcaatgcagaacggaccgcttcgctacatggccgttgaagataaatcatcgggaacaggtctgattcaggatatccgcgatgaggctatttgccccgttaaagccattcagcgagacaaggacaaatacacccgcctgatggatacgcagggctatatggagtcagggtttatttatctccctgaaagcgaagattttgtgaatgattttctggtggagatggaaggcatcaacaccgaatttaacacccacgatgaccagttggatccgatgatggacgcgatcgacgatatgttaattgtcgatgcaccgataaggatcagcaaagaggcgctcaggagacgctga

SEQ ID NO: 89396 - DNA, 1047 bp, Enterobacter aerogenes
atgagcaaaccggaagatagcggccttgagcgcgattactgtgccgggctgctttccctccgggatatggcagagatatacggcatcagtgaaggggcgatacgtaagcgcgctaaaaaaaatggctgggtacgcaacaagccagaaggtacgcaaaaaagtacgcaggtacgcaaaacaggtacgcaaaaaaaagaagtgcgtaccgtcgagaaaaaagcggttaaggaaataaaaaaaaatcctgagccggatcctgaacctccagcacaaatattattcgatgccgtgcaattcgggcttaaccagcaacagggaatttttgctgaaaacattgcgatggggaaaacacggatagaagcatatcgactggcgggatattcctgtgagggcgatacggcatatgcagcagcaagcaggctgtatagaaatgttaaggtcgcgaaagccgtgcgctatcttcgtgacaaattccagcagcgttattccgcagaaatcgacgaggtaattcatcagctcgttgcgatcaccagagcaaacccaaatgaactttcacagtaccgtcgcgtgaactgtcgttattgctggggagagcatcatctttaccagtggcgtgatattgctgaatttgacagagcagcagccgcggcagaaaaagacgggaaaaaagctcctgaatatggtggcctgggattttgtgataccgctgatcctcatcctgaatgtcctaaatgctttggtgaaggatccgggcaagtttttatccctgatactcgcgatctcgacggtgacgctcgctggctttatgccggagtgaagcaaacaaaatttggtatcgaggttcagtcattcagccaggaatcagcacgacgcgatttaatccggcttcttgaaatcaggactggcaagaaagattcagatcctgcaactggtgacaatccgcgtgaagatgatgatctgaccgacgaacaactgcacgatgcattacaggagctggggtatggccgtcgcagaaaccagcttgaagaaaaactcgacgattcttaa

SEQ ID NO: 89397 - DNA, 231 bp, Enterobacter aerogenes
atgacttttcttggcatggttatttacctattcgaatatggggaccagacgatatgcatctacgttatcggcgcgtataccaatgatcgtatctggatcgtcgagcgaaaatacctggaagtaaccgtctaccacccgcaaatcatcagcgaacttgacggtgccgggaatatgttcagtgttgttctttacgtcaacaacgtggaactcgtggtgtttaagtatttttga

SEQ ID NO: 89398 - DNA, 258 bp, Enterobacter aerogenes
atgaggatgttcgacaaaatcaaaaaggctattttcacagaagtaccggaagcttttcgggaaaacacatttgattctgtgattaaaaatattgagctgcttgcaaaagattcacccgaactgaaagctgttgctaaagagtttcggagcggaaagctcactcaggagcagtatgttgcaacgagcatagcgataattacacaagagctacttgaattccgagaagaaagagtaaaggcagaattgcaagcctggtaa

SEQ ID NO: 89399 - DNA, 378 bp, Enterobacter aerogenes
atgtcccgtcactttgtcataggttcgctcgcagctgttgccggagacataagcgctgtcagcctcttttgcatagattcccgctctgcggtcagattctccaagcaactcggcaagcactcgagcggtctcggcttttgccgcgcctgctgcggcaactgcggaaatgcggccggtttcacttcctgcgagctggctgcgaagtttggcgagctgctgttgcaggccgtcgccagcacgctgagcagcatcagcattggcttgtacttttgccagttcttcatttgctcgtttctgctcctcgtctgcggcctgctggcggcgctgttctttggcccgttctgcaacctctcgatgaagaattgctgtcgaatctga

SEQ ID NO: 89400 - DNA, 411 bp, Enterobacter aerogenes
atgtctacagctcgcggtattcgcaataacaaccccggaaacattcgctggggcgatgactggaaaggcctggtgccgacagctcagcgtacagataaatcattctgccagttcacgtcacctgagtatggtgtacgagcgatggttatcatccttcgcaactatcaacagaaatataagctgaacacggtaagcggaattatcaaacgctgggcaccgccgaacgaaaacgacacgcaggcttatatcaacagcgttgctcaggctacgggcgtttcaccagagcagcagataaacacctatgacagccgctttatgatgaagctgctgcaggcgatcattaaacatgagaacggcgaacagccatactcgtttgatgtgtttgttcaggcgatcaatctcgcggggtaa

SEQ ID NO: 89401 - DNA, 348 bp, Enterobacter aerogenes
atgaaaatgcacaatgatcctcatacctggcccgatctgcttgagttgctgcagagctggtggcgcggagatacgccgctgggagctgtgctgctatctgtggtaatggctggtcttcgaattgcctacggcggcggtggctggaagaaaatgttgcttgaggggcttctgtgcggagcgttgacccttactttcgcatcaggacttgaatacatggaattgccaaaatcactttctatcgcaatcggtggaggggtgggctttgttggtgttgatgcaatcagggcatttgcaatgaaatacattggcaaccggtttggtatcggtggcggtaacgataaggcgtaa

SEQ ID NO: 89402 - DNA, 573 bp, Enterobacter aerogenes
atgatttacccaacggcaaccggcaaagccggagagattattcgactgaatacccttgaaagcacaatggtgcagggacgtttaaaaatgtgggggcgctggtcgttcatcggcggcggtagctcagggaatatgtttaaccaactgctagccagcaaaaaaatcaccaaaaccgcaattaacgaagcgcttcgtcgcatgaaaaaggcgggtatcagcaagccagagcttgaagcgtttctgcgagaaatgatggacgggaataaaaagagccatcttgctcactgtaccgatagtgaggcgctgattattgatcgtgtagttggggaaacattcattgataacccggcaatgattgcgctgcttcatgaacgttatgacgggaaggggaaatccaagaaggcaatggcgcgggatctcaatgaaaagcatcctgaatggtgtttgcgtacctgcgaaagtcgtattgacgtatggctgcatgtggcagaacgggcactatacgcaccgctatgtgatgcgttcggtgttaactccgggagattcagtgacagtaaagcggaaaaaccttaa

SEQ ID NO: 89403 - DNA, 294 bp, Enterobacter aerogenes
atgagaaaggtcgatctccgaaaatctgcccgtggtcgggaatgccaggtaagaattcctggtgtatgtaacggcaatcctgaaacgtcggtattagctcattaccggcttgctggaacctgcggcactggttgtaaacctgatgaccagcagggcgctatcacctgcaattgctgccacgacgccatagatggcagaaccaaaaccgaatatacccgcgacgaactccggctgatgcatgccgagggcgtattgcgcacgcaacaaatctggagagatgaggggctagtatga

SEQ ID NO: 89404 - DNA, 594 bp, Enterobacter aerogenes
atggcacagattcaactgataaaaacttcatcaacgacactgaccacggcgaacgctgaggccagcgagtttttgcaacgtataaaaacgggtatctggcttaactgcaacgtaacgcaggccagaaattacttgttccataagcgcttctttgcgctcctcaatcttgggtttgaatactggacaccgacaggcggtacgattacccctgcggaaaagctgtacctgaacggctatattcgatacctgatctccatcgtcgggaacgacgaaactctctatcaaactgagctcgattataacgaacgggccgggaatcgtcgtgccaatggacatgccatcgtcaaatcatttgaagccttccgtaaatgggcgacggttgaagctggcttctacgatgaatttattcttccggataacacccgccgccgggaggcgcgttcgatctcatttgccaatatgagcgagcaagaattccatgaggtttacaaagctgtttttggggttttgtggaatcacatcctctttcgtacgttcccatcccaacgagaagccgaaaacgtagccatgcagctactggagctggccgcatga

SEQ ID NO: 89405 - DNA, 237 bp, Enterobacter aerogenes
atgaaaatagaactcacaattgctaaggacaaaaaactcccaactggcgcagtacccgcacttgaaaaggagctgttgcgccgtctgtccaagtcctatgacgattgcaaattaagaattcgaattaccagcaatgatggcctgagcgttttgggcggcgctgacggcgataaaaaacgtgtagagcaaatcctgcaagagacgtgggaaagcgcagacgattggtttttgaactag

SEQ ID NO: 89406 - DNA, 330 bp, Enterobacter aerogenes
atgggattcccgtcacccgcaaaagactatgtagagcaaacacttacaatcaacagactttgccagattgatgctaattgccgcgtactggagacgagttcgggttatgccgttatcgatgtttcccggcgacccaagcagggagatcacgtgctcgtttctttctgcgggataattcagtttggcatcgttcgcggtcgcgcgctgattacttccgatggtgaagcaatcgagggtgacgccctggacgacgtggaggtgaagggcgttctgacgttcctgattaaccgtgcaacttacgttgatgaagaccctaaccccgttatctaa

SEQ ID NO: 89407 - DNA, 243 bp, Enterobacter aerogenes
atgtctgcgcacctggaaaagtcagaagagctttacaacgaagcatgtcggatagtaggtcagtgttgtcttgcgcttgccaacaatggctctgaaacccaccgtgaccagcttgtgcatcaactaaagcggctgtactggctttacatgcaagagaccaatgaatcaaatctggcaatgctgcttgctattgagcaattagccacaagtgaagactggaagaaaccatacctgggcgattaa

SEQ ID NO: 89408 - DNA, 270 bp, Enterobacter aerogenes
atggaaatgatagtcaggaagaaacccgctttcactgagctttaccagactggtgttctgacgcgaattgcagcgattaaaagccttgatggcggcgggtggcggttatttggaatatggcgcaataaggatatcgtggtatttgtagaggctgctcgtggtggtgtcagagagtggtccggccttgaccatctcgctaacttttgtgcgagctgtggcattagtttgtgggaaattcacaataaagtcgcagccagaacaccacagtga

SEQ ID NO: 89409 - DNA, 678 bp, Enterobacter aerogenes
atgatcaaatcaaccataaccagagaacgcctgcaggaaatcgccgaagatgggttcctgaagcatggcgaaagcaaagaactggctcgcatggcgctggccgcaatggacagcgagccggtggcgtggactgatgaagaagagttgcgcgatgcgaatgaaagcggaagcggttatttgtttggtattgagcgtgatgcaaacaaattcgccgacccgcgacgccagataatgctctatcgccacgcgcagccagcgccggtagtgctggatgaacgcgcagctttcaacgcatggaacaacgaggacaatctaccaatcgcatgggttggttccaataatgccgcgtggctggctcgcgcctcgttgtgtagaaattcagtaccggacgttcctcctgaacgccctgcggattcgtcgagcggtgacgatgttgaagcatggtttgatgaggactggaacgcctgccgcgccgccatgctccaggctgaacctgtaacgacggctaacaagttgggcaactctccggtaattccggatggttggaaactggttccggtcgagccgaacggcgacatgctggcggcggctcaagatgcatacggcgaaactgatggcgatatcgcaagcacgctccgcgccgccatcgctgccgccccacaggaggtgaaaccataa

SEQ ID NO: 89410 - DNA, 483 bp, Enterobacter aerogenes
atggcagagcaaactattctcgatatgtgctgcggctcccgcatgttctggttcaacaaacgagatactcgcgcggtattcgctgacattcgagccgaagagcacaagctgtgcgacggccgccgtctggttatcagtcctgacctcgttgctgacttccgtgcgctgccgttcgctgatgcctcatttccggttgttgtgtttgccccgccacatcttgagcgagtcggacagaccgcgtggatgggtaaaaagtacgggcgcctgaacaaaaaaacatggcgtgccgacattcgtgcaggattcaaagaggcgtttcgtgtactgcggccacatggtgtgctcatcttcaaatggaatgaaacccaaatccccgttagccaaattctagctctaacagacgagaaaccggcgatcggccagcgcaccgggaagaacgataaaacccactggatcatcttcgtgaagggagccaaccaatga

SEQ ID NO: 89411 - DNA, 579 bp, Enterobacter aerogenes
atgactgatatcaacagactgttagcaagcctcaaacgccgctcagcccacgcaaaagagtttggggacagcattacgtttgtaaagctgaaagacatcgacgcgctggtagaggcgctggagaaggcgcagcagcggaacggcgagcttgagacctatagcaaaacagcgctcgaatttagggaagcggcgagagatgaaaaccgacacctaaagttagagctggaaatagctgaaaagcgcatcgccgggctggaagaaagccacgctcaggtaatcaagtctcgagaccattacaaacgcatgctagaggaaggattggagcaactggctgagtcccgcaccgtcaccattgagccatttcgttcgtttgtcactggtgctgatttagcagcactgcaccgcttcgcagaatgctgcgatgaccctgaatctggcggtcatgatttggacaaagaacaggtgcggcggcttgagagtatcggcgcgttacagcgctctgggcgtattagctacatcaccggctttggtgatttccttatttcgattacggctggaatcaagtgggaggctgaatag

SEQ ID NO: 89412 - DNA, 345 bp, Enterobacter aerogenes
atgagcaagtcgcttaacgcacgttgtatccgtcgctgggaagttgaatttaaagggcgctgcgattcgaaatatagcccgtattggcgtaaacgcgacctgcgtgggtatatccgggaggccgcgcttactactgctgactgcatggttgagcgcttagctgaagataatgccagggtggctttttgcggatattcatatggctggtcccctgaattctcagcctggtacgccgaccgccgagaggcatacctggccgcagcccgccgcgacctcaataagagcgctaccaatgacgaaatcgacgacgaaatagagagcgaactggaggcttggaatgactga

SEQ ID NO: 89413 - DNA, 735 bp, Enterobacter aerogenes
atgactgatatcaacaaactgattgccagtatcaagcgccgttcagcccacgtaaaagaatttggcgacgatattacgtttgtaaagttagaagacctcgacgcgctggtagcaactatcgagaagagcaaagaggaatcaggctgcccggctggcgtagacctgcaggactgggtgaagcaactggcggcggagaatgcgtacttgatacctaaagccgctagcgaactgtcaaatgcctgggtgcttcataagtacctaatcggcattcaagcggcgattatgtatctggataatggaaacaagaaggccgcgcaggaatggctgtatggaactatagctggtccgggatttgagttccctgacgaggttgacgatatcgacgcatgggcaactcatcagatgcgcggcagcatcagccatccgcacgcacttgaaatcatcaaggaagaaactcctgccaccgatcgcatcgtagccgggattaaggctgatggggtagcagaacgtgaaaagaccatcacattcaccgcagctaaaaagcgcacgcaggatggcgtagcgttaatcgctatcggtaagccttataaaattcacaacgatgatgtgatcggtgagttcttcatcggtgagcgcgggcgctacggcgtaatcaccatggactgcctcgactacttcacaacgtctgacgaatacgcatgggagttttcgctgcgcgagggggccgacaaatga

SEQ ID NO: 89414 - DNA, 162 bp, Enterobacter aerogenes
atgagtctccctatttcgaataaagcccttcgcgagctgcgcaaagataccgaatacatgctgggccttcgtggtccagccattgataaagaatggtgggaaagagtgcattcagtcgttattgaactgcaggaacgccgggctaaggaatcaggaaaatga

SEQ ID NO: 89415 - DNA, 741 bp, Enterobacter aerogenes
atggctaaaaactcaatagacgcatatggcgccagcgggaaaaccaacgtacttaactttgagcccgaaaatttgtacctggtcaccgataagacgcacccgctttacgacgagcggatccatctgcctatcaatgagccgatggtactgaacatcatggaccagggcgttcttgagccgatcatcgtaaagcgggtgcgccacaccattgaggcgaacaagcgtttagcgaaagaggggaaaccgctgctgatggttccggcagtcaccaaacgtggctctgccgttcgtatggcacaggcgatggtaagcgctaacgaaatccgtcaggcagatacgccgctgggccgcgctaaaaaaatggctgatgcgctggaacgtggacacgacgagcaagacctctctctgatgtttggctgcagcgttcagaccgtacgcgcaacgctgtcgcggctggacgccacccaagctgtaaaggatgccgttcaatcaggaacggtcaccgttacccaggctcgtcagctcgcatctctggaaccagaagcccagcgcgagaaggtgaaagagattgaaacggcaactgcgggtacctctggtcatgaaaaagctcgtcgtcagcgtcaggttctgggcgacgctaagccacgcctgaaaacccgtaaagaaattaacaaagcactggagtccgcagacggcgagtatgcgagcgctctccgttgggtgctgggggaggcggtatga

SEQ ID NO: 89416 - DNA, 750 bp, Enterobacter aerogenes
atgaaaaatattgttggtaccggcagtgcgcttgagcgcctgaagagaattattccggcatcagtgcagccaaaattcaccaccgtcaaagagtggcaggactggcaagctgctgaaggccgcaagcgagctgaagaggtcgaacggcagaatcaccagacccgcaccgtaaatattctcggtcgttctggtattcaggaacttcaccgtaattgctcatttgcaaactaccaggtgaaaaccgacggacagcgccgggcattcaccttagcgaaaagttacgcccagaacttcggggaaggttttgcgagcttcgttttcagtggaacacctggaaccgggaaaaatcatctcgctgctgctatcggcaattttcttatcgctaaaggccgctctgtgctggtagtgacgctgtcagacctgatgttgcgtgttcgggcttgctatgacggcggccagtctgaagcccagctactggatgaactttgccgcgtggatctactcgtcctggacgagataggcattcagcgtggtagccagggtgagaaagtcattctgaaccaaattattgatcgccgactggcagccttacgtccggtggggatccttacgaacctgaaccatgaagcgctgactgaaacgctgggggaaagggttatggaccgcttacagatggatggcggtatgtgggtgaattttgagtgggacagttaccgcgcaaatgtgcgtcatccacgagcagtgaaataa

SEQ ID NO: 89417 - DNA, 891 bp, Enterobacter aerogenes
atgccaaacgctaagcctaagaccaaggctaataacgagccttatcgcaaggtcaaaataacaatgtgggatgaccctaaattcagggcgttatctccattgccaccaagtgggcagagcttgtttatttaccttctgacaagtcctttcactggaattatacctgggctatttaaagccgggcgtgctgctatggctgaagaattgaattgggatgtcgaagacttcgacttagccttagacgaagccttgtccttaggtctggtaaaagccgacctgcaagccagagtgttttggcttccgaatgctgcgaaacataatcctccagcttcggtaaacgtcattaaatcgtgggccaatgcattcaactatttgcctgaaagccctctcaaatgggaagcatgggaagcgctcaaagccgcatgctacggggtttctaaggctatgggtgaggctttcgagaaggttatgcctatgcctaagtataagcctacgcctttgccttcaggtatccagaaagcagtaagcagtaaacagattttaaaagatccccccttaaatccccccgaggggaaagcggggaaaaataaatttgatccactttcggttgaattaccggaatggctatcccctgcgctttgggcggagtgggtggattatcggaaacaacttggtaagccaattaaaacccagcaaggggtaagtggttcgataaataaactttcggcctatcgcgataaggggcatagccctgaatacgttgtgaggctgacgatggaaaacgagtggcgaggcttaatcgttcctgaaggaatgacaagtaataaaccgcgtgacgtaaacgcaatttctcaacctgatggttttatcccgaaagggttccgggggtag

SEQ ID NO: 89418 - DNA, 648 bp, Enterobacter aerogenes
atgcaattaccgacgcttaagaagagccaggagattttcagcacccttaataagaatttcgggggaatgaaatttgtaaaaaccatcaacataaccgccgcaattttcacaggcctcctcatatgcaatgaaggcctggctgagcctttgcgctttcctgtagctgaggactctcccaagttcggcgatatcgctcgagctaatttgcacaatgttgagctgcccctttctggcaagtctaattttctgcatcagctcgacagcgattggatcggcaatcgtgttgaattccttgcgtctgtctcggttcacagccagccaatggccgatgtaagtaccaagtgcaaaggtaataactgtccagatgaacgagatgagagcggggtttgtgttgaacagaagaatgaactcactccagagggtattcataagtttcgacagatcctattaggtttattacttggcacccttactgcggctccgttgtgcatgtacttcagcatggtcattagtccgaggctacgtgagaaaagccgacgccggaggcgttaccacacaatcaaagcaattcgttggcatcggacccatggtcgggatgaaccctacagagagccaagaaaaacgctttgccaatggttttggatttaa

SEQ ID NO: 89419 - DNA, 426 bp, Enterobacter aerogenes
atgaaaatcaagcatgagcatattcgcgaggcgttaaacgcatgggcgctttatccaggcggccgcaaaactcctgtttccgctattactgaagcttatttctcaatgggattgcgatccctagaattattcgacgatagccacccggatgcactgagccgcaacactcagaaaattttccggtgggtagagagtgattctccagcagctgttcaaaaaatacagattctgctcccggcgatagagcgagctatgccgccattacttctggcgaaaatgcgtagctattactcagtaacgttccgcgaactggtttcccgaaaagagcgtatcgacaacgaagttgaagcgctgttcggggccatgatcgcgctatctgatcggattactagcagtggcccggccggaaatgcgctggttcattga

SEQ ID NO: 89420 - DNA, 228 bp, Enterobacter aerogenes
atgctaaaaaaagacgtcattgaattttacgggactagggtaaaggtcgcccgagctgctggggttgatccttctgctgtctcgcaatggggagagctggtgcctgaaaaaaatgcagctcgcctacagctagattccggtggagttctccaatatgacccggaaatttatatcagacatgctaaggcaaaacgtgcgactgaggtgaatcatgaaaatcaagcatga

SEQ ID NO: 89421 - DNA, 207 bp, Enterobacter aerogenes
atgaaacaccagcattacggcactgaagaaagacagcgtaataaagtcatccccggcaccatgattaaacatcatggcagaatttacagagcatccgccaacgttgaaaaaggtctttatgttcattcagtaatggaacaaaccattatcaaaactgaatatgtcgagatacttttaaacggacatggtgaagcgttaattaattaa

SEQ ID NO: 89422 - DNA, 306 bp, Enterobacter aerogenes
atgtttggtacagttgaaatcaaatctacagaattcgaattacgtcgtgttaataatgtcattgcaactttcaaatgtaatgactctgtatctggcgtcatgcattgcccgtcaaatggtccgattactatcgttcttgatggtggttatgttctgggtgaattccactgcgaggtttgtgcaatacgtgaaatcagtctactcaccatcaatattgaggatggtaataaacattacggagccacctactcgcgatacaaagaactctatggaatcggtgcatcctgtcgttctgtttatgcctaa

SEQ ID NO: 89423 - DNA, 297 bp, Enterobacter aerogenes
atgctgtcactatcaaactttgacgccgttgaagaacggcgtattcaagacgatatgcgcaaaaccattctgagagagaaagaggctgagttatctgaatggttttcacagtcaattaagcctcgttttattcaggaagcagtaattgaatcattaggcggaaaggctgatgaactggcagtaaataacgccttcgatgtttgtcatgttgaagagcgtatagcggagtttatcgattatttatctgatgaaatcgcgcgccaacaagtaattattaatagcaaatttatagactga

SEQ ID NO: 89424 - DNA, 2337 bp, Enterobacter aerogenes
atggctcaatatactttttacgccgtggaaaaaggtgctgatgatattcagccgacatttaaaaccaccctcacatttgaagctgcaaacattcgccaggctcgcgcaatttctacaatgaagttcgtagaagaatatccagaaattgacgatgaagcttgcgacactgttgtttacgagaccgcagacgaagccgttattgttcatgcagctattgacacatgggatgctgaaattctgaatgattacggttgggattttgagaataagcgtccggtaaaactggagaatgatactaacgaagttgactttgacaagctgtcaaagccaatgcaaaacgcagttctggtgaaatacgactctacgattattacccaggatctgctcgccgatgcactggagctcctgcaggacgacgccgctacttttgaaggccacatagtcgaggcgctcaacaagactcctgaaattaatgcgatgtatccggagcgtaagctcttcgccattggctgggtgaagcacaaatgtacgcctaacaaaaaatggcctgaaattaaggccgagctgcataactggaaaaaacgtcaggactctgaacgcaaggaaactggcccttctaaatcagtggtggatattgcgcgcgaaaaagctgccacccagacaattcagcaaacaaacagtacagcgcaagcgaaagccagcggcgctgatacggatcgttttgacattgtgttagccatgctggtgatgggcgtcaacccggaaaatgccagcgcatctgacgtaaagaatgcaaaagagattattaaaattcgcgactctcactggtgcgcatggcatgaaacgctgagtgagattccaggtattttcaccctgcctgagagcgaactttactctttaactatcgaagggatgaaagatctcaaattagcaaaagatgatgctggccgtctcgcttacgttcgcgagcgttttgcagggcatcccctgctcccggattatcaggtaaatgaaaatgacgacgaacaagaaccgcagaacggccctgaatcagtggcagatgaacaggaagaaactggcactgatgatccggaacagtcatctgtcgagccagagacgacgcaggaagaacaggtagagcgtcaggggccattctatttcctgcttgccgacggcgagaaagtcgggcgcgctaacaaaatcaccgggcttgataaagcattggccgacggtgcaaaggaaatcagccaggaggaatatcaggcccgtaaaaatggcacatggcaatctgaggaattaccaaagcgcgaggacgttgataagcaacttgcagctgaccgtggcgagtatatcgaggggatcagcgacccggaggataaaaattggattactgaagatctaaccaagtcaccagctaaaaattctgatgccgtagaaacggaacaacctcaggcaccagcacctgttaatgactatcagggggtcggtgccagccttgaaaaagaactggctgagaaaccagataccgcccgtgaaaatatggctatctggcgcagtgtgatgcgcacagatccgcgcttcacaaaacagatgacaggtacaggctttgaaggaaccagtatcaacgccgagtacatgatcatgcgagccactgaaatttttggtcctatcggtagccgctggggatacgaaattcaggaagacaggatgatcccaggagccccgttctctgaaccggtttataaggacgataaatttgttggtacgcgcatgctgcgtgatggtgatggcacccttctttatgaacagaaccatagcatccggatccgtctctggtaccagaacggcgatgaagaagggtcggtgatcgcttacggtgcgactccttacatgtttaaaacaaagaatggcatcaagtgcgacggcgaagcacagaaaaaatcactcactgatgcgttgaaaaaagcgctgtctctgctcggattctctgctgatgtctggttggggctgtatgacacgcctgaatatcagatcgaaaacaaacaggaattcgacattaaaaacgccagcgataaggccgaggacgttacccgtctccgtaatgagctggatgaaaaaatgagtcgtgtggctaacaccatggaaaaaggtgtcacgcctaatgaagtgaaaaagactttcgacacgatcgctcgtgaagtcgaggtgcatcgtaaagccgctgaggctaaaggtgaccttgatcatgcgaaatatctttccggtcgcctgcgccgactggcacaaattaaagacaaacgtgttacagaattaaccaatcaggagcaatcagcatga

SEQ ID NO: 89425 - DNA, 504 bp, Enterobacter aerogenes
atgagccagaacactaccgcaattagtatcgccgacaacatgaataagcttctggctcttgtagagtcaggtgaatttacccttgatgatatctccgacacgattgaaggtgaagagctggcgcttggcgataaattcgatgggatcatgtctttggttagaaatctggaaggtcaggccaagactttggatgatgaacttaaacgcctcagcgatcgtaaaaaatcattcacaggacaggccaaaaatctgaaggattacattctgaaatgtatgcaagctgccgatttgaagaacttcaaaaccgaacgcaatacgctaacggttagaaaaggctcactgtcagtaatcatcgacaatgttgaccaacttccggatgaattggtggacgtggcaacagtcgttgcaccagacaagaagaaaatcaaagaagcaatcgaagccgggcaagatatacaaggcgcgcatcttgaagttggccccgagtctctgcaggttcgctaa

SEQ ID NO: 89426 - DNA, 423 bp, Enterobacter aerogenes
atggagggcggccgaaaggccgctattacaatgacgctttcagtaaaagaaaaaatcgcaaattacatccactactatcccggcgcgcgggtttctgaaatcgccgaaaatgtcgggctgaatgatcgctcatgctatgactttctgaaaaagcttgttgaaactggcgttgcagtcatgacgaaagacggtcgagctggcgtttactccgcggctcccgattatgtcccggcattctccaagccagcgccaccgtccaggttctctctgtgcgaaattcagcagtgtgaacagaccatacagaaattaaaggaacgtgggttgcaccgtagagcattaacggagttacgccgcctgtcgagcatgcaagaaaccgcgcgcggagttgaagccgtatcacgacaatcagcacggctgagctga

SEQ ID NO: 89427 - DNA, 273 bp, Enterobacter aerogenes
atggcacatattaaactgacaacctgggccgctaagcattatccggatgacactccgccgataggtactcttcgccgctgggcaaggaatgggaatatctacccggcaccggaactacacggccgtgagtaccgtgtcgatcctgatgctttctatatcaagccgaataaacctggcaagatcctttcacagcaccaccccaacgggcgacctggcacaaagagccctttactggagaagttgatcgatgagtcgaaaaaaatacgatgctaa

SEQ ID NO: 89428 - DNA, 1080 bp, Enterobacter aerogenes
atgagtcgaaaaaaatacgatgctaatttaccgaaaaatcttacctttcgaaaatcaagcaaagcattttactggcgcaatccgatcagtgggaaagagtttccgcttgggcaaatctcacgccgcgatgcaatcgcacaggccatagaagccaacaattacatcgcgcaaaatttcacgccggttgcgcttatagagaaattaaaggggcttgattcgctaactgtcagcaagtggatagacagttattacgagatccttattcgtcgcaatttggcggcccatacctacaaggccagaggaaaccagctagcaacaatcagggaacagatgggagggatgatactggcggaggtgacaacccggcatgttgccgaatttctacagcagtgggttgcggcaggaaaaaataatatggcggcatcaatgcgctctgtgctttctgacatgttccgagaggcgatcgtaaatggtcatgtaacacagaacccggtagagccgaccagaacgccgaaaattatagtggagcgtgaccgattaagatttgatgcctatatagccacgagggataaagccgatttacttccagactggttcgggctatcgatggacctggcacttatcaccgggcagcgccgggaggatatcgttagtttccagttcagccatatttacgatgaccggttacacgtaacccagaagaaaacaggaatgcgcattgccattcccctttcactcagtttgccagtagccgggctacgactggataaagtgatcgaccgctgcaggaagttgagtaacaccgattttctgattagcgccggtgcatggaagaacagtcctacggggagcttgcaccctgacggtttgacaaagaattttgttaaggcaagaaaattggcaggaatagagacgagcgataacccgccaacatttcacgagatccgcagcttatcaggccgtctttttaaggagctacacggggaagagtttgcgcaaaggttgctggggcatacgtcagaaaatacgacaaaattgtatctggacgaaagagaccaacattcgtacgttatgatctga

SEQ ID NO: 89429 - DNA, 342 bp, Enterobacter aerogenes
atgatgaaaaaaatcgttctgacaatgttgttactggcaagctcaggcgccgcgctagcggcgccacaggtgatcaccgtgagccgttttgaagtgggcaaggacaactgggcgttcacccgtgaagaagtgatgttaacctgccgtccggggaatgcgctgtacgccattaacccgagcaccctggtgcagtatccgctgaatgatgtcgccgagcaggaagtgaaggccggcaagaccagcgctcagccgatttctgtcatccaggccgacgacccgcagcatccgggacaaaaaatgagcctggcgccatttatcgaacgtgcgcaaaagctctgctga

SEQ ID NO: 89430 - DNA, 870 bp, Enterobacter aerogenes
atgctgtcgggagtgtatgtcggcctgcggtttgtccacttcatctcattgatgacggccttcggttgcgcgctgtacggcgcatggtgggcgccagtctcgctgcgtcgcctgttgatgcagcgcttttatccactgctgcgctacctgctaatgattagcgctatttcagctaccttgatgctgatggcgcagggcgggttgatgggcgatggctggaatgatgtctggcaacccacaatctggcgcgctgttatcgggacgcagtttggcggcgtttggctgtggcaggtggtgctggcgtggattgcgctggcggtcgcgtggatcaaaccccgtcgcccggcgcgtctattgttactgctattttgcgcgcagttgttgttgatggctggcgtggggcatgcggcgatgcatgatggttgggttggcgcattacagcgcaccaatcacgcgttacatctgttttgcgtctcggcatgggccggcgggctgttgccatttgtctactgcctgcgactggcgcgcgggcgctggcgtcaggtagcgataaccgccatgatgcgtttttcacgctatgggcatctggccgtggctggcgcgattgccagcgggattggcaatacgctgttgatacagggacaactgattggcgactcaccgtggggaacggtgttgttgttcaaatgtgcgttggtcgccgggatggtagcaattgcgctggtgaacaggtatgttctggtaccgcgaatgtcaggtaacggctcctgggcggaacgaactattttacgcactacacagctggaaatggcgcttgccgcgctggcgatacttgccgtcagcctgttcgcgacctggcaacctaattga

SEQ ID NO: 89431 - DNA, 375 bp, Enterobacter aerogenes
atgcgaaccatcgccggacgcgcgctaagtgccgccgtatttctcagcgctatgttaaccaccgccagcgcttttgctcatgctcatctgcaacaacaaatcccggcggccgattcgacggtctccgtttcgccgcaggcgcttacgttaacgtttagtgaaggcgtcgagctctccttcagcggcgtgaccctcaacggcccgcagaataaacctgtcgctaccggcaaactggcccgcagcgacggtaataaagcgcaattaacgttgccgctgaatgaaccgctggcggcgggcgagtacaccgtagagtggcatgtggtctccgttgacggccataagaccaaagggcaataccacttcagcgtgaagtaa

SEQ ID NO: 89432 - DNA, 231 bp, Enterobacter aerogenes
atggcaaataatctggcaaaaatttcgcaagatgaaatggacaaggtcaacgttgacctcgcagcggccggcgtcgcctttaaagaacgctacaatatgcccgtcgttgccgatctcgtcgagcgagagcaaccggctcacctgcgcgactggtttcgtgaacgattgatcgcgcaccgtctggcatccgtgtcactttcccgcctgccgtatgaaccgaaagcgaaatga

SEQ ID NO: 89433 - DNA, 660 bp, Enterobacter aerogenes
atgctgcgcgtaatcgataccgaaacctgcggtttgcagggcggcattgttgaaattgcctccgtcgatatcatcgacggccggataaccaatcccatgagtcatctggtgcgccctgaccgcccaatcagcccgcaggcaatggcaatccatcgcatcactgaagagatggtggccgataagccctggattgaagaaatcgtgccgcactaccagggcagcccatggtatgtcgcccataacgccagctttgatcgccgggtattaccggaaatgaacggcgagtggatttgtactatgaagctggcgcgccgcctgtggccggggattaagtacagcaatatggggttgtataagtcgcgcaagctgagcgtagccaccccgccgggtttgcatcaccaccgcgcgctgtacgactgctatatcaccgccgccctactgttggatatcatgcaggtttccggctggtcgccggatgaaatggccgacataaccggccgcccggcgctgctaactacctttaccttcggcaaatatcgcggcaaagcggtgtcggaagtggcggaaaacgatccaggttatttacgttggctgttcaataacctggaccggatgagcccggaactgcgtctgaccctcaaacactatctcggcgaataa

SEQ ID NO: 89434 - DNA, 2061 bp, Enterobacter aerogenes
atgctaccgaaagctaaacggatcccccacgccatgacgctacatggcgacactcgcatcgataattactactggctgcgcgatgacgaacgcgcgcgcccggaagtgctggactatctccatcaggaaaatgactacggtaaaaaggtgatggactcgcaaagcagcctgcaggagcgggtgctgaaggaaatcatcgatcgcattccgcagcgggaggtctccgctccctatagcaaaaatggctaccgctatcgccaggtttatgaaccgggctgtgaatatgcgatctaccaacgtcagtcagtgctcaaagaagagtgggatgaatgggagattttgcttgatgccaaccaacgggcggcgaaaagcgaattttacaccctcggcggattaggcgtcgcgccgaacaaccaactgatggcggtggcggaagattacctttcacgacgtcagtatggcttacgttttaaggatctgagcagcggcgaatggtcggcggagatcctggaaaacgtcacgccaggattcgcctggagcaatgactctcgcttcttgtggtacgtgcgcaaacacccgacgacgctgctgccgtatcaggtctggcgacatgccgttggtaccaccgcagataacgatgtactggtctacgaagagaaagacgacacgttttatgtcagcgtgcataagaccacctcccagcagtttgtggtgatttaccttgccagcgccactaccagcgaagtgttattacttaacccggagcttcccgatgcggagccggtgtgttttttgccacgacgcaaggatcatgaatatagcctcgatcattatcagcacgcgttttatctgcgttctaatcgcgatggcaaaaacttcgggctttaccgcaccgtgctccgcgacgaagaccagtggcagacgctgatcccggcgcgtcccgatgtgatgctcgaaggttttactctattcaccgactggctggtggtcgaggagcgtcagcggggcttgaccagcctgcggcagatcaaccgtaaaacgcgggaagtggttggcattgcctttgacgatcccgcttacgtcacctggcttgcctataatcccgaaccggaaacgtcaaggctgcgctacggttattcatcgatgaccaccccggatacgctatttgagctggatatggataccggcgagcggcgggttatcaagcaacaggaagtgcagggctttgacgccgcctgttatcgcagcgaacacctgtgggtgaaagcgcgtgacggcgtggaggtgccggtatcgctggtttatcaccgcgaacactttcgcaaaggggccaacccgttactggtgtacggctatggctcttacggtgccagcatggacgctgattttagcgccagccgtttgagcctgctggatcgcggctttgtctttgcaatagcccatattcgcggcggcggcgaacttggacagcagtggtatgaagacggcaaattcctcaacaagaagaatacctttaacgattatctggacgtctgcgatgcgctgctggcgcagggatatggcgaccctaaattatgttatggcatgggcggcagcgccggtggcatgttgatgggcgtggcgattaaccaacgaccggatttgttccacggtgtggtggcgcaggtgccgtttgttgacgtactgaccaccatgctcgacgaatctattccgctcacgactggtgagtttgaggagtgggggaatccgcaggacgaaacctattatcactatatgaagagctatagcccctatgatggcgtctcagcccaggcttatccgcatatgttagtgaccaccgggctgcatgattcgcaggtgcaatattgggagcccgcgaagtgggtggcgaagctacgcgagctgaaaaccgacgacaatctgctgctgttatgtaccgatatggattccggacatggcggtaagtcgggacggtttaaaagctacgagggcgtggcattggagtacgcctttttaatcgccctcgcgcaagggactttgcccggcaaggtggaagtgtag

SEQ ID NO: 89435 - DNA, 672 bp, Enterobacter aerogenes
atggctaactggcttaatcaactccagtccctgctgggccagcagggcaatcccgtctccgctgaaaaatcttcatccgctaaaaacctgctgcccggcgccttgggcggccttgctggcttgttggtcgccagcaaatcatcgcgtaagctgctggcgaaatatggcaccggcgcgctgctggttggcggtggcgcggtggccggcagcgtgctgtggaataagtatcagcaaaaaatgcgcggccagcaggcagatatcgcgacacagacatcaacagcgtctacccaggaaccggttgtgctcgatgcgcgcagcgagcggctgattaccgcgttagtcttcgccgccaaaagcgacggtcatattgacgagcgtgaacgtcagcatatagaagagcagttgcgagcggcgaacatcgacgtgcagggccgggtgttgatcgacagggttttaacccagccgctcgacccgcaacggctggcgcaaagcgtgcgcgatgggcaagaagcgctggaaatttactacctcagctgcgcggtaattgatatcgaccattttatggagcgcagctacctggatgcgctcggtgacgcgcttaaactgcctgaagatgtccgcgaagagatagaacgcgatgttcaggcgcaaaagcaggcgcttgattcttaa

SEQ ID NO: 89436 - DNA, 360 bp, Enterobacter aerogenes
atggcggttgaaatcaaatacgtcgtgatccgtgaaggtgaggaaaaaatgtcttttgccagcaaaaaagaggccgatgcttacgacaaaatgctcgatttggcagaggtgctcaatgactggctggtcacgtgcccgctggaattggatgaagctcagcgtgacaatatgtcgatgtggctggccgagcgcaaagacgccttacaccacattctgaagtcagggaaattgccggaagcagaagagcatgctgaggcggcggcagaaatgccggagtctgcgcctacagaggatgaagctcagcctggtgccgccgaagaaggcgccgcgaaaaagccgcgcaaagcaaaggccgcctga

SEQ ID NO: 89437 - DNA, 1179 bp, Enterobacter aerogenes
atgactttattaggcaccgcgctgcgccccgcggccacgaaggtaatgttgttaggttccggcgagctcggaaaagaagtcgccattgagtgccagcggttgggtattgaaaccatcgccgtcgaccgctatcccgatgcgccggcgatgcaggtggcccatcgttcgcacgtcatcaatatgctgcacggcgacgcgctgcgtgaactgatcgccttagaaaagccggattatatcgtgccggagatcgaagccattgccaccgacacgcttgttgagctggagctggccgggcaaaaagtagtgccgacggcgagagccgcaaaactcaccatgaatcgcgaaggcattcgccgcctcgcggccgaagagctgcaaattcccacctctgcctatcgttttgccgacagtgaagaggggttccgcgctgccgtcgacgaaattggtttgccttgtatcattaagccggtgatgagctcctccggtaaaggccagagctttatccgctcggctgaccagctcagcgccgcctggcaatacgcccaacaaggcgggcgcgcaggcgccggacgcgtcatcgtcgaaggggtggtaaattttgattttgaaattacgctgctcaccgtcagcgccgtcgacggcgtccacttttgcgccccggtaggccatcgtcaggaagatggcgactaccgtgaatcctggcagccgcagcagatgagcgatctcgcgctgcaacgcgcgcaggagatcgcccgcaaagtggtgctggcgctggggggatatggactgttcggcgttgaattgttcgtttgcggcgatgaggtgatcttcagtgaagtctcccctcgcccgcacgataccggtatggtcactctgatctcgcaggatctttcggaattcgccctgcacgttcgcgccttcctcggcctgccgatcggcgccatccgccagtatggaccggcggcatcggcggtgattttaccgcagctaaccagtgagaacgtgacctttagcaatctacaggccgccgtcggcgcgggtctgcagttgcgtctgttcggtaaaccggagatcgccggcgcgcgtcgcctgggcgtgaccctggcggttgctgacaacgtcgatgaagccattagccgcgccaaaaccgctgccgccgcggtcgtcgtgaagggataa

SEQ ID NO: 89438 - DNA, 642 bp, Enterobacter aerogenes
atgaaaaactggaaaacaactgcagaagcaatcctgactaacggcccggtcgtaccggttatcgtggtgaaaaagctggaacacgcggtgccgatggcgaaagcgctggttgccggtggtgtacgcgttctggaagttacgctgcgcaccgagtgcgcgctggaagctatccgcgctatcgccaaagaagtgccggaggcgattgtcggcgccggtactgtgaccaacgttgagcagctgaaagccgttactgaagcaggcgcgcagttcgctatcagcccgggcctgaccgaatccctgctgaaagcggcgaccggcgaaggcaccatcccgctgatcccgggtattagcaccgtatccgagttgatgctgggcatgcagtatggcctgaaagagttcaaattcttcccggcggaagcgaacggcggcgtgaaagcgttgcaggcgattgccggtccattcggccacattcgtttttgcccgaccggtggcatctctccggcgaattaccgcgactatctggcgctgaacagcgtgctgtgcatcggcggttcctggctggttccggccgacgcgctggaaaacggcgactacgatcgcatcaccaaactggcccgcgaagcggtagaaggcgcgaaataa

SEQ ID NO: 89439 - DNA, 1812 bp, Enterobacter aerogenes
atgaattcgacaatgttacgggtaacaaatcgcattatcgaacggtcacgcgaaacccgctcagcctacctcgcacgaattaatcaagccaaaagcgataccgtccatcgttcgcagttggcctgcggtaacctggcgcacggttttgccgcctgtcaggcagatgataaagcgtcgctgaagagcatgttgcgcaacaacatcgctattatcacctcctataacgatatgttgtccgctcaccagccttatgaacattatccggatatcatccgtaaagccttgcactccgccaatgcggtagggcaagtggctggtggcgtgccggcaatgtgtgacggcgtgacgcagggccaggatggcatggagctgtcgctgctgagccgcgaagtgattgccatgtctgccgccatcggcctgtcgcacaatatgttcgacggcgcgttgtatcttggcgtatgcgataaaattgttcccggactgaccatggcggcgctctccttcggccatctgccgtcggtgtttattccgtctgggccgatggccagcggcctgccgaacaaagaaaaagtgcgcattcgtcagctttacgccgaaggtaaagttgaccgtatggcgctgcttgaatccgaagccgcctcttatcatgccccgggcacctgtaccttctacggtaccgccaacaccaaccagatggtggttgagtttatgggcatgcagctgccaggttcctcgtttgttcatccggacgccccgttgcgcgaagcgctgaccagcgccgcagctcgtcaggtgacgcgcatgaccggcaacggcaatgagtggatgccgctgggtaaaatgattgacgaaaaagtggtggtcaacggtatcgttgcgctgctggcgaccggcggctccaccaaccatacgatgcacctggtggcgatggcgcgtgcggcgggcattatcattaactgggatgatttctccgatctttctgatgtggtgccgctgctggcgcgtctgtatccaaacggtccggcggacattaaccacttccaggcggcaggcggcgtgccggtactggtgcgcgagctgctgaatggcggattgctgcatgaagatgtcaataccgtcgccggcttcggcttgtcgcgttacaccatggaaccctggctgaataacggtgagctggactggcgtgaaggggcgaccgcgccgcttgacgatcaggtcatcgctaccttcgagaaaccattctcccgccatggcggtaccaaagtgctgagcggtaacctcggtcgtgcggtcatgaagacctccgcggtgccggttgagaaccagattatcgaagcgccagcggtcgtctttgagagccagcacgacgtactgccggcgtttgaagcggggctgctggataaagattgcgtagtcgttgtacgccatcaggggccgaaagcgaacggcatgccagaattacataaacttatgccgccacttggtgtattattggaccgccgtttcaaaattgcgctggtcaccgatggccgactttccggcgcatcaggcaaggtaccgtcagccatccatgttactcctgaagcctacgatggcgggctgctggcgaaagtgcgcgatggcgacatgattcgcgttaacgggcagaccggcgaattgaccctgctggtagatgaagctgaactggccgcacgccagccgcatattccggacctgagcagctcgcgggtcggaaccggccgcgagatgttcggcgcgctgcgcgagaagctctccggagccgagcagggcgcaacctgcattactttttaa

SEQ ID NO: 89440 - DNA, 1476 bp, Enterobacter aerogenes
atggcggtaacgcaaacggcccaggcatgcgatctggtcattttcggcgcgaaaggtgacctcgcgcgccgtaaactgttgccttccctgtatcagcttgaaaaagctggccagattaaccctgaaacccgcatcatcggcgtcggtcgcgctgattgggataaagacgcttataccaaagttgtgcgtgaagcgttagaaaccttcatgaaagagaaaatcgacgaaggtttatgggataccctgagcggtcgtctggacttctgtaatcttgatgtcaacgataccagcggttttacgcgtctgggcgatatgctggatcaggaaaaccgcgtcaccattaactacttcgcgatgccgccaagcacgttcggcgctatctgcaaaggcctgggcgaagcgaagctgaatgccaagcccgcgcgggtggtgatggaaaaaccgctcggtacctcactggaaacctcccgggaaattaatgaccaggtgggcgagtatttcgaagagtgccaggtttaccgtatcgaccattatttgggtaaagagacggtactgaacctgctggcgctgcgctttgctaactccttgtttgttaataactgggactgccgcactattgatcacgttgaaatcaccgtggcggaagaagtgggtattgaaggccgctggggttatttcgatcaagccgggcagatgcgcgacatgatccagaaccatttgctgcagatcctgtgcatgatcgccatgtcgccgccgtcggatctgactgccgacagcatccgcgatgaaaaagtgaaagtgctgaaatcgctgcgccgtatcgatcgctcgaacgtgcgtgagaaaaccgtccgcggtcagtacaccgccgggtttgcgcaaggtaaaaaagtaccgggctatctggaagaagagggcgctaacaaatccagcaacacggagaccttcgtagccattcgcgtggatatcgataactggcgttgggctggggtgccgttctacctgcgtaccggtaaacgcctgccgacgaaatgctccgaagtggtggtgtacttcaaaactccggaattgaatctgttcaaagagacctggcaggagctgccgcagaataaattgaccattcgtctgcagccggatgaaggtgtggatattcaggtgcttaacaaagttccaggcctcgatcacaagcataatctgcagatcaccaagctggatctgagctactccgaaaccttcaatcagacgcacttagcggatgcctatgaacgcctgctgctggaaaccatgcgcggtattcaggcgctgttcgtgcgtcgcgatgaagtggaagaagcgtggaagtgggttgactccattaccggcgcatgggcggccgacggcgatgcgccgaagccttaccaggcaggtacctggggaccggtggcgtcggtggcgatgatcacccgcgatggccgttcctggaacgaattcgagtaa

SEQ ID NO: 89441 - DNA, 870 bp, Enterobacter aerogenes
atgaacatgctggaaaaaatccagtcccgactggaaaaccttagcaaatctgaacgcaaagtggcggaagtcattcttgccacaccggcgcaggccattcactcaagcatagcggccctcgcgctggaagccggcgtcagcgagccgaccgtaaaccgattttgtcgcagcctggaaacccgggggttccccgattttaaactgcacctggcgcaaagtctggcacacggtaccctctatgttaaccgtaatgtcgatgaagacgacagcgtcgaatcctatacggcgaaaattttcgaatcggcgatggccagcctcgatcaggtacatcatgcgctggatatgtccgcggtcaaccgggcagtcgatctgcttacccaggcgaagaaaatttccttcttcggcctggggtcttcagcagccgtcgcgcatgacgcgatgaataaatttttccgttttaacgtcccggtcatctactccgacgatattgtcctgcagcgcatgagctgtatgaattgtaacgatgatgacgtggtggtcatcatttcacataccggacgcaccaaaagcctggttgaactggcgcagttagcgcgtgaaaacgatgccatggtcattgccatcacttcggccgggaccccgctggcgcgggagtcgacgctggccattaccctggatgttccggaagacaccgatatttatatgccgatggtgtcgcgcctggcccagctcacggtgattgatgtgctggcgaccggctttaccctgcgccgtggagcaaaattcagagataacttgaagagggtcaaggaagcgctgaaggaatcgcgctttgataaagaactactcattagtagtgataaacaataa

SEQ ID NO: 89442 - DNA, 1443 bp, Enterobacter aerogenes
atgtccagaaggcttcgcagaaccaaaatcgtaacgaccttaggcccagcaactgaccgcgataacaacctcgaaaaagttatcgccgcgggcgctaacgtcgtacgcatgaacttctctcacggtaccccggaagatcaccaactccgcgcagacaaagtccgtgaaattgcagcaaaactgggccgtcacgttgcgattctcggcgacctgcaggggccgaaaatccgcgtctctaccttcaaagaaggcaaaattttcctcaacattggcgacaaattcctgctcgacgccaacctgggtaaaggcgaaggcgataaagaaaaagtcggcatcgactataaaggcctgccggcggacgtcgttccaggcgatatcctgctgctcgacgatggacgcgtgcagctgaaggttctggaagtacaggggatgaaagttttcaccgaagttaccgttggtggcccgctatctaacaataaaggtatcaacaaactcggcggcgggctgtctgcagaagcgttaaccgataaagacaaagccgacatcgttaccgccgcaaaaattggcgttgattacctggcggtctccttcccgcgctgcggcgaagacctgaactacgctcgccgtctggcccgtgacgctggctgcgatgcaaaaatcgtcgctaaagtcgagcgtgcggaagcggtctgcgaccaggatgccatggacgacgttattctcgcctccgatgtggtgatggtagctcgaggcgatctcggtgtggaaatcggcgatccggaattggtgggtatccagaaggcgctgatccgccgcgctcgccagcttaaccgctcggtcatcaccgccacgcagatgatggaatcaatgattaccaatccgatgccgacccgcgcggaagtcatggacgtggcgaacgccgtactggacggtaccgatgccgtgatgctctccgcggaaaccgctgccggccagtatccgtctgaaaccgtcgccgcgatggcgcgggtgtgcctgggcgcggagaagatcccaagtctcaacgtttccaaacaccgtcttgacgtccagttcgacaatgtcgaagaagcgattgccatgtcggcaatgtatgcggccaaccacctgaaaggcattaccgcgattatcaccatgaccgagtccggccgcaccgcgttgatgacttcacgtatcagctccggactgccaattttcgccctctcccgtcacgagcgtactctgaacctgacggcgctctatcgtggcgtaacgccggtgcatttcgacagccataacgacggcgttgccgccgcgcacgacgcggttaacctgctgcgtgataaaggctatctggtctccggcgacctggtggtcgtcacccagggcgacgtgatgagcaccatcggcagcaccaacaccacccgtatcctgaccgttgagtaa

SEQ ID NO: 89443 - DNA, 972 bp, Enterobacter aerogenes
atggaaacgaaaaaaaataacattgagtttatccccaaatttgagaaatcttttttactgccgcgctattggggcgcgtggttgggcgttttcgccttcgccggtattgcgctgacccctccctctttccgcgatcctattctcggcaaactggggcgtttcgttgggcgtctggcaaagagctcgcgccgtcgggcgcagattaacctgttgtactgcttcccggaaaaaagcgagcaagagcgtgaagcgatcatcgatgcaatgtatatgtcggctccgcaggcaatggtgatgatggccgaactgggcatgcgcgatccgcagcgcgtgatgtcccgcgttgactggcaagggaaagagatcatcgacgagctgcagcgtaataatgaaaaggtcatctttttagtgccgcacgcctggggcgtggatattccggcgatgctgatggcttcgggcgggcaaaaaatggcggcgatgttccataaccaggggaatccggtatttgactatgtctggaacaccgtgcgccgtcgtttcggcgggcggatgcacgcgcgtaacgatggtatcaagccatttattcaatcggttcgccagggatactggggctattatctgcccgaccaggatcacggcgccgagcatagcgaatttgtcgatttcttcgcgacttataaagcgactcttccggcgattggtcgtttgatgaaagtctgccgcgcgcgtgtagtaccgctgttcccggtgtatgacggtaaaacgcatcgcctgacggtgctggtgcgcacgccgatggacgatctgctggaagctgatgatacgacgattgcgcgccgtatgaacgaagaggttgagattttcgtcaggccgcatcctgagcagtatacctggatccttaaactgctgaagacgcgtaagccgggcgaaaccgagccttacaagcgcaacgaactgtttccgaagaagtaa

SEQ ID NO: 89444 - DNA, 1320 bp, Enterobacter aerogenes
gtgcaacagatagcccgcgctgtcactcaggcattcaacaatctgccacgaccccatcgcgttatgctggggtcgttgagcgttctaacgttagcggtcgccgtctggcggccctacatctaccacccggaatcagccccgatagtcagaacgattgagctggaaaaaagcgaaatccgctctctgctgccggaagcttccgaacccatcgatcaggcgccgcaggaagaagaagctatcccgcaggatgagctcgatgacaaatccgatagcgactccggcggccatgaatatgtggtttctaccggcgatacgctgagcagtattcttaatcagtacggtattgatatgggcgatatcgctcaactctcctctgctgataaagagctgcgtaatcttaaaattggtcaacagctctcctggactctaaccgctgatggcgatctacaaagcttgacgtgggagatgtcacgccgtgagacgcgtacttataaccgcgtcgccaatggttttaaaatgagcagcgagctgcagaaaggggattgggtcaacaacgtcctgaaaggcaccgttggcgccagcttcgtctccagcgcccgtgatgctggccttaccagctcggaaatcagcgcggtcatcaaagcgatgcagtggcagatggacttccgcaagctgaaaaaaggcgatgaattctctgtcctgatgtcgcgtgaaatgcttgatggcaagcgcgagcagagccagctgttaggcgtgcgtttacgttccgatggcaaagactattacgcgatccgcgccgaagatggcaaattctacgatcgcaacggtacgggtctggcgaagggcttcctgcgcttcccgacctcgcgtcagttccgcgtgtcgtctaacttcaacccgcgtcgcctgaatccagtgaccgggcgcgtcgcgccgcaccgcggcgttgacttcgctatgccgcagggcacgccggtgctttctgtcggcgatggtgaagtggtggtggcgaaacgcagcggcgcggcaggctactatgttgccgtgcgtcatggccgaacctataccacccgctatatgcacctgcgcaagctgctggtgaaaccggggcagaaagtgaaacgcggcgatcgtatcgcgctgtcgggcaataccgggcgttctactggcccgcacctgcactatgaagtctggattaaccagcaggcggttaatccgctgacggcgaaactgccgcgtaccgaaggcttaaccggttccgatcgtaccgattatctggcgcaggccaaagaggttatcccgcaactgcgctttgattag

SEQ ID NO: 89445 - DNA, 960 bp, Enterobacter aerogenes
atgattagtcgcattatgttacataaaaatacgcttctttgcgctggacttagcgccgcttttttgttcgctcatgccccggtagctaatgccgccgtcgtcgcttccatgaaaccccttggctttatcgcttccgctatcgccgatggcgtgacggatactcaggtgttattgcctgacggggcttccgagcatgattattcactacgcccgtctgatgtaaaacgcttacagaacgcagacttagtggtatggattggtccagaaatggaagcattcatggacaagtcaacgcaaagcattgcggagcagaaaaaggtcaccatcgcccagttggatggggtgaaaccgttgctcatcaaagggacggatgatgacgatgacgaacatgctcacgaacatgctaatggcgaaaaaagtgacggcgatcaccatcacggcatttacaatatgcatctgtggctctccccagagatagcgcggctctcagcggttgcaatccatgataaattattggaacttatgccgcagagtcgagccaaacttgacgccaacctgaaggaatttgaggcaaaattagccgcaaccgacaaacaggtgagtaacgagctggcgccggtgaaaggtaaggggtatttcgtttttcatgatgcctatggctactacgaaaaacattacggtttgacctcattggggcattttaccgtcaaccctgaaatccagcctggtgcgcagcgtttacacgaaataagaacacagttggttgagcaaaaagcgacgtgcgtttttgctgagccacaattcaggccagcggtcatcgaagctgttgccagggggacctccgtgcgcatgggaaccctggatccacttggaatcggaattaagctgggtaaagacagttaccctcagttcctgagccagttggggcatcagtattcaagctgcctgaaaggagattaa

SEQ ID NO: 89446 - DNA, 753 bp, Enterobacter aerogenes
atgacgaatcttgtaacgctggaaaaagtcgcggtcgtctacggccagcggcgcgtgttgtctgacatttcgctaacgctaaaaccaggcaaaattttaacgcttcttggcccgaacggcgccgggaaatcgacgctggtacgcgtagtgctcggcctggtgacgccgaccgaaggtgctatccagcgcgagaaaaatctgcgtatcggctacgtaccacaaaaactgcatcttgatgctactatgccgctgacggtcagccgctttatgcgcctgcgtccaggtacgcgcaagcaggatgttatgccggcgctgcagcgcgtgcaggccgggcatcttatcgatgcgccaatgcaaaaactctccggcggcgaaacccagcgcgtgttgctggcgcgcgccctgctgaatcaaccacaactactggtgctggatgaaccgacccagggcgtcgacgttaatgggcaggtagcgctgtatgatttaattaatcaactgcgtcaggagctgaactgcgcggtcttaatggtttcccacgatctccacctggtgatggccaaaaccgatgaagtgctgtgcctgaaccagcatatttgctgctccggaactccggaagtggtctcgatgcacccggaatttatctccatgttcggcccgcgcggcgcggaacagctgggcatttatcgtcaccaacataatcaccgccacgacctgcaggggcggattgtactgcgtcggggaaatggtcgctaa

SEQ ID NO: 89447 - DNA, 786 bp, Enterobacter aerogenes
atgattgaattactgttacccggctggctagccggcatgatgcttgcctgcgcggcgggccccctgggttcgttcgtggtctggcggagaatgtcctactttggcgatacgctggcgcatgcttcgctgcttggggtggcgtttgggctgctactcaacgtgaatccgttttatgcggttatcgtggtcacgctgctgctggcgggcggcctggtgtggctggaaaaacgccctcacctggcggtcgataccctgctgggtattatggcccacagcgcgctgtcgctcggtctggtggtggtgagcctgatgtcgaacgtgcgcgtcgacctgatggcctatctgtttggcgatctgttagccgttaccccacaggatttagtctccattgcatcaggcgtagtggtggtggtcgcgatattgctctggcagtggcgtaacctgctggcgatgaccatcagccctgatttagcgtttgttgacggcgtgaagttacagcgggttaagctgctgctgatgctggtgacggcattgactatcggcgtggcaatgaaattcgtcggcgcgctgatcatcacttcgctgttgataatcccggccgctaccgcccgccgctttgcccgcacgccggaacagatggccgcggtagccgttggcgtgggtatgctggcggtaaccgggggattaaccttctcggcgttctacgataccccagcagggccttcggttgtgctgtgcgctgcggcgctgtttgttctgagtatgatgaagaaaacggcgagttga

SEQ ID NO: 89448 - DNA, 1011 bp, Enterobacter aerogenes
atgattgaagcagatcggctggtatcaggcgacagcattggtttcgaagaggccgctgaccgcgctatccgccccaaattgctcgcagagtacgtcggccagccgcaggtgcgttcgcagatggagatctttatccaggcggcgaaactgcgcggcgatgcgctcgatcacttgttaatttttggcccgccagggttggggaaaaccacgcttgccaatatcgtcgccaacgaaatgggcgtgaatctgcgtaccacctccggcccggtgctggaaaaggctggcgacctggcggcaatgctgaccaaccttgagccgcatgatgtcctgtttattgatgagatccaccgcctttcaccggtagtggaagaggtgctgtatccggcgatggaagattaccaactggatatcatgattggcgaaggcccggccgcgcgctcgattaaaatcgatctgccgccgtttaccctgattggcgccaccacccgcgccggctcattgacttcgccgctgcgcgaccgcttcggtatcgtacagcgcctcgagttttatcaggtgcctgacctgcagcatatcgttggtcgcagcgcccgtcatatggggctggagatgagcgaggaaggggcgctggaagtcgcccgccgcgcacgcggtacgccgcgtatcgccaaccgcctgctgcgccgggtgcgcgactttgccgaagtgcgccacgatggctctatctcggcggaaatcgccgctcaggcgctggatatgctcaacgtggatgccgaagggtttgattatatggatcgcaagctgctattggcggtgatcgataaattctttggtggtccggtcggcctcgataacctcgcggcggctattggcgaggagcgggaaaccattgaagacgtgctggagccgtacttaattcagcaggggttcctgcagcgtacgccgcgtggccgaatggcgacggtgcgcgcctggaatcacttcggtattaccccgccggaaatgccctga

SEQ ID NO: 89449 - DNA, 612 bp, Enterobacter aerogenes
gtgataggcagactcagaggcatcattctcgaaaagcaacccccgctggtattactggaaaccgggggcgtaggttatgaagtccatatgccgatgacctgcttctacgagctaccggaagccgggcaggaagccatcgtcttcacccattttgtggtacgcgaagacgcgcagctgctgtacggctttaacaacaagcaggaacgcaccctgtttaaagagcttatcaaaaccaacggcgtcgggccgaagctggcgctggctatcctttccggcatgtcggcgcagcagtttgtgaacgccgttgagcgtgaagaagtcgcctcgctggtgaaactgccgggtatcggcaagaaaactgccgagcgtttaatcgtcgagatgaaagatcgcttcaaaggcctgcatggcgacctgtttactccggccgccgatctggtgctgaccacgcctgccggcccaactgccgacgacgcggagcaagaagcggttgccgcgctggtggcgctgggctataaaccacaagaggccagccggatggtgagcaaaatcgcccgtccggatgctaacagtgaaacgctaatccgcgaagcgctgcgcgcggcgttgtga

SEQ ID NO: 89450 - DNA, 522 bp, Enterobacter aerogenes
atggccattattctcggcattgacccggggtcacgcgtgaccggttatggcgtgattcgccaggtcggacggcagttgagctaccttggcagcggatgtatccgcaccaaagtagacgatctgccgtcgcggctgaagctgatttacgccggcgtcaccgaaattattacccagttccagcccgactatttcgctatcgagcaggtctttatggcgaaaaatgccgattcggcgttgaagcttgggcaggcgcgcggagtggcgattgtcgcggcgacgaaccaggacctgccggtctttgagtacgccgcccgccaggttaagcaaaccgtcgtcggcattggtagcgcggaaaagagccaggtacagcatatggtgcgtaccttgctgaaacttccggcaaatccgcaggcggatgcggcggatgcgctggccatcgccatcacccattgccacctcagtcagaacctggctcagattagcgagacccggctcaatctggcgcgagggcggttacgataa

SEQ ID NO: 89451 - DNA, 741 bp, Enterobacter aerogenes
atggcaggtcatagtaaatgggccaacaccaaacaccgcaaagcggcgcaagatgccaagcgcggtaagatctttactaaaatcattcgcgagctggtcaccgctgcgcgtctgggcggcggcgatccggcatccaacccgcgtctgcgcgcggcggtagataaagcgctgtccaacaacatgactcgcgacaccctgaaccgcgccatcgcgcgcggcgtcggcggtgatgaagacgcgaacatggaaaccatcatttatgaaggttacggcccgggcggcaccgcggtaatggttgaatgtctgagcgacaaccgtaaccgtaccgtagccgaagtgcgccacgcctttaccaaaaccggtggtaacctcggaaccgacggttctgtggcctatctgttcagcaaaaaaggcgtgatctccttcgagaaaggcgacgaagacaccatcatggaagctgcgctggaagcgggtgctgaagacgttgtcacctatgatgacggcgccattgacgtttacaccgcctgggaagagatgggcgcggtacgtgatgcgctggaagccgcaggcctgaaagccgatgctgctgaagtctcaatgatcccgtcgactaaagcggatatggatgcggaaaccgcgccgaagctgctgcgccttattgatatgctggaagactgcgacgacgtgcaggaagtgtatcataacggcgaaatctctgatgaggttgccgcaacgctgtga

SEQ ID NO: 89452 - DNA, 444 bp, Enterobacter aerogenes
atgtcattcaagctgcccgtctccgttctggtggtgatttacgccgaagatacgaagcgggtgctgatgttgcagcgacgcgacgatcccgctttctggcagtcggttaccggcagcctggaagagggggaaaccgcgttgcaggccgccgcgcgcgaagtaaaggaagaggtcgccattgacgttgctcgcgagcaactggccttaattgactgtcagcgtacggtggagttcgagatattttctcacttacgtcatcgctatgcgccgggcgtcgagcgcaatacggaattctggttccgtcttgcgctgccccatgagcgccagattgttttcactgaacatctggattaccgctgggttagcgcgtcggatgccgccgcgctaactaaatcgtggagcaaccggcaggcgattgaagaatttgtaattaacgccgggtaa

SEQ ID NO: 89453 - DNA, 1788 bp, Enterobacter aerogenes
atgcgtacagaatattgcggacagctacgtcagtcccacgtggggcagcaagtgaccctgtgtggttgggtcaaccgtcgtcgtgatctcggaagccttatcttcattgatatgcgcgaccgtgaaggcatcgtgcaggtgtttttcgatccggatcgtgcggatgcattaaaactggcttccgaactgcgtaatgagttctgcattcaaatcaccggtaccgtgcgtgcgcgtgaagagcgcaacgtcaaccgcgagatggccaccggcgaaatcgaagtgctggcgtctgacctgaccatcatcaaccgcgcggaagcgctgccgctggactccaaccacgtcaacaccgaagaagcgcgcctgaaataccgctatctggacctgcgtcgtccggaaatggctcagcgcctgaaaacccgcgccaaaatcaccagcttcgtgcgccgcttcatggacgatcacgggttcctcgatatcgaaaccccgatgctgaccaaagctacgccggaaggcgcgcgtgactatctggtgccgtcgcgcgtccataaaggtaaattctacgcgttgccgcagtctccgcagctgttcaaacagctactgatgatgtccggcttcgatcgttactatcagatagtcaaatgcttccgcgacgaagacctgcgtgccgaccgtcagcctgaatttacccagattgatgttgaaacctcgttcatgaccgcgccgcaggtgcgtgaagtgatggaagatctggtacgtaagctgtggcaggacgtgaagggcgtagacctcggtcaattcccggtgatgacctttgccgaagcggagcgtcgttacggttccgataaaccggacctgcgtaacccgatggaactggtagacgtagccgatctggtgaaagcagtagaattcgccgtcttctctggcccggctaacgacgccaaaggccgcgttgctgccttacgcgtaccgggcggtgcggcgctgacccgtaaacagattgatgaatacggcaaattcgtgcagatctacggtgcgaaagggttggcctatattaaagtaaccgagcgtgcgaagggccttgaaggcatcaatagcccggtggcgaaattcctcaacgccgaaatcgtggaagctatccttgagcgtaccggcgcgcaggacggcgacatgatcttcttcggcgctgacaacaagaaagtggttgctgatgccctcggcgcgctgcgtctgaagctgggcaaagacctgaatctcaccgacgagaccaaatgggcgccgctgtgggttatcgacttcccgatgttcgaagacgacggcgaaggcggcctgaccgcgatgcaccacccgttcacctcgccgaaagatatgaccgccgctgagctgaaagccgcgccggaagacgctgtggctaacgcctacgacatggtcatcaatggctacgaagtcggtggtggttcggtgcgtatccacagcggtgaaatgcagcaaaccgtgtttggtattctgggcattaacgaacaagaacagcgtgaaaaattcggcttcctgctggatgcgctgaaatacggtaccccgccgcacgccggcctggcgtttggcctcgatcgcctgaccatgctgctgaccggtaccgataacatccgtgacgttatcgccttcccgaaaaccacggctgccgcgtgcctgatgaccgaagcgccgagcttcgcgaatcctgccgcgttaggcgaactggggattcaggttgtggcgaaagaggcaaaagagtctccggagaacaactaa

SEQ ID NO: 89454 - DNA, 567 bp, Enterobacter aerogenes
atgttagaactcaatgcgaaaaacactgcgctggtcgttattgacctgcaagaaggcattttaccctttgccggcggtccgcatcgcgccgacgaggtggtgacgcgcgcggcaaagctggctgaaaaatgtcgtcaacagggttcgcccgtcatcatggttcgagtgggctggtccgccgatttcgccgaagcgttaaaacagccggtagatgcccaggctggcgccgtaaaattacctgaaaactggtgggtctatccgccggcgctcggcaaacaggatagcgatatcgaagtcacgaaacgccagtggggcgcgttctacggcaccgatcttgaactgcagcttcgccgccgcggtatcgacaccattattctttgcggtatctccaccaatatcggcgtggaatccaccgcccgcaatgcctgggaactgggtttcagtctggtcatcgccgaggatgcatgcagcgccgcctccgccgaacagcatcagggcagtatgacccatatcttcccgcgcatcgcccgcgtgcgcagcactgaggacattctcgccgccttatga

SEQ ID NO: 89455 - DNA, 819 bp, Enterobacter aerogenes
atgatttatatcgggctcccgcaatggtcgcaccctaaatgggtgcgccttggcatcaccggccttgaagagtatgcccgccattttaactgcgtggagggtaataccaccctgtatgccttaccaaaggccgagattgtcgatcgctggtatcaacaaactcacgatgattttcggttctgttttaaattcccggccacgatttcgcatcaggcggcgctgcgcgactgcgacgacttaagccacgaattttttactcgtctggcgccgctggaatcgcgcatcggccagtactggcttcagttgcccgccaccttcggcccgcgcgacctccctgccctgtggcagtttctcgatacgctaccgaaaaacttcacctacggcgttgaagttcgccatcctgagtttttcgccaaaggcgatgctgaacaacagcttaatcgtggcttgcaccagcgcaacgccaaccgcgtgatcctcgatagccgcccggtacatagcgccgtcgcgcgcaacccggcgatgattgacgcgcaaaaaaagaaacccaaagttccggttcacgcggtcatgaccgcggagcagccgatggtgcgttttatcggcagcgacgatatggcgcagaatcgcgaattatttcgcgtctggttacagacgctgccaaagtggcatcagtcagccacgccatggctgtttctacataccccggatatcgcccaggcgcctgaactggtggatacgctatgggaagatttacgtgcggtgctgccgggcgtcggcgccgcgccgtcaattccgcagcaatcctcgcttttctga

SEQ ID NO: 89456 - DNA, 396 bp, Enterobacter aerogenes
atggtcagcgcgctgtatgcggttttgggtgcgttattgttaatcaagttttccttcgacgtggtacgtctgcgcatgcagtatcgcgtcggctatggcgacggtggttttagcgaactacaggtcgctattcgcgttcatggcaatgcggtggaatacgtccccattgggctcattctgctgttgttcatggaaatgaacggcgcgctaacctggatggtgcacgtttgcggtattttgctgattgccggacgcctgatgcactcatacggtttccatcatcgcctgttccgctggcggcgttccggaatgagcgccacctgctgctcgctgttgctgatggtgctggctaacctgtggtatatgccctgggagttggttttctccctgcgttag

SEQ ID NO: 89457 - DNA, 744 bp, Enterobacter aerogenes
atgtctcaccgcgacacgcttttttccgcgccgatcgccagtctcggcgactggacctttgatgaacgggtagccgaagtcttcccggatatgatccagcgctctgttcctggttactccaatattatttcgatgatcggcatgctggctgagcgttttgttcagccaaacactcaggtttacgatctcggctgctcgctcggcgccgcgacgctttccgtgcgtcgcaatatcgcgcatccgggatgcaaaattatcgccattgataactccccggcgatggtagaacgctgccgtcgtcatattgatgcctataaagcgccgacgccggttgaggttattgagggcgatattcgccatatcgccattgaaaatgcctccatggtcgtgctgaacttcactattcagttcctcgagccgagcgaacgtcaggcgatcctggataaagtctatcaagggctcaatccgggcggcgcgctggtgctttccgaaaaattcagttttgaagatgccaacgtcggcgaactgctgtttaacatgcaccatgacttcaaacgcgccaatggctatagcgaactggaaatcagccagaagcgcagcatgctggaaaacgtcatgctgacggattcagtggaaacccacaaagcgcgactgcgccaggcggggtttgaacatgccgaactgtggttccagtgctttaactttggttcattggtggcggttaaatccgaggaacgggcatga

SEQ ID NO: 89458 - DNA, 1017 bp, Enterobacter aerogenes
atgatcgacttcagtaatttttatcagttgatcgcgaaaggaccgctctcccactggctggaaacgctgcccgctcaggtcgcggcctggcaacgcgaagcgctgcacggcaagtttcgcgaatgggaacgcgccgttgagtttctgcccgagctggcgccctggcgtctcgatctattgcatagcgtcacagcggaaagcgaaacgccactcagcgaaggccaccagctgcgaattgagaatctgctgcgaaacctgatgccgtggcgtaaaggcccttattcgctgtatggcattaatattgataccgaatggcgttccgacctgaaatgggaacgcgtgctgccgcatctttccgatctcaccggtcgtactatcctcgatgtcggctgcggcagtggttatcacatgtggcggatgattggcgccggcgcgcatctggcggtcggtatcgatccaacccagctgttcttatgccagtttgaagcggtacgcaaactcatcggcaacgatcagcgcgcgcatctgctgccgctcggcatcgaacaactgccggcgctggaagcctttgataccgtcttttcgatgggcgtgctctatcaccgccgttccccgctggatcatctgtggcagctcaaagatcagttagcccccggcggcgagctggtactggagacactggtcattgaaggtgatgagaacaccgtgctggtgcccggcgaccgctacgcgcaaatgcgtaacgtttatttcattccttccgccgccgcgctaaaacagtggctggagaagtgcggattcatcgatgtgcgcattgttgatacctgcgtcaccaccagcgaagagcagcgccgcaccgaatggatgacgacggaatcactcgccgacttcctcgatccacatgacagcagcaaaacgctggaaggttatcccgcgccgctgcgcgcggtgatcgtcgccactaaaccagagacgcagcagtcactggcgaaaaaagcagccgcggccagagcgtaa

SEQ ID NO: 89459 - DNA, 741 bp, Enterobacter aerogenes
atgttactggaagtttgctgctatagcatggaatgcgcgctggaggcgcagcgttgcggcgccgatcgcattgaactttgcgccgcgccgcaggagggcgggttaacgccgtcgttgggcgtgctgcgttcggtgcgaaacaatatctcgattccggttcatccgattatccgtccgcgcggcggcgatttttgttacaccgacggcgagtttgccgccatgctggatgatgtagcgacggtcagagatctgggttttgctggtctggtgatcggcgtactcgatgctgacggccaggtggatatccctcgcatgcaaaaaattatggcggcggcggggccgctggcggtgaccttccaccgggcctttgatatgtgcgccgacccgcgtcaggcatggcattcgcttgctgaactgggggttgcgcgtatcctcacttctggacaacggccaacggcggagcaaggtcttgcaaaaattatggaactaattgcgctgggcgatactccaatcattatggccggagcgggagtgcgggctgccaatctgcaaaagtttctgcaggcaggcctcaaagaggtgcatagctcagcggggcagtggttgccatcgccgatgcgctttcgtaatccggggttatcgatgtccaccgacgcagatgccgatgaatattgccgctatgccgttaacggcgaggcggtggcggaaatgaaacaaattatttctgccgcgcgggattag

SEQ ID NO: 89460 - DNA, 570 bp, Enterobacter aerogenes
atggcgaactggcagcaaattgatgaactgaatgatatttcggcggatttaccgcgttttagcgatgcgctgcaagcgctggccgaacggttgggattggagcttgcgccgctggacgccgaccatatttcgctgcgttgtcatcaaaatacgacggcggagcgctggcggcaggggctggagcgttgcggcacgttactatcggaaaatatcattaatggccgccccatttgcttatttaagcttgccgaacctatctgtgtcgcccactggcgctttacggttgtggagttgccctggccgggtgaaaaacgttacccgcacgaaggctgggaacatatcgaaatcgttctgccgggtgacccggaaaccctcaacgctcgcgccctggccttgctttccgatgatggactcagccagccggggattttcgtgaaaaccagttcgccgaaaggggagcgtgaacgtttgccgaacccgacgctggcggtcacggacggcaaagtgaccattaaattccacccctggtcgatcgagcaaatcgtcgccagcgagcgatccgatacttaa

SEQ ID NO: 89461 - DNA, 1734 bp, Enterobacter aerogenes
gtgaatattcaggctcttctctcagaaaaagtcagccaggccctgatcgcggcaggcgcgcctgccgattgcgaacctcaggtccgccagtcagcaaaagttcagttcggcgactatcaggccaatggcgtgatggcggtggccaaaaaactgggcatggcgccgcgacaacttgcagagcaggtactgtctcatctcgatctgaacggcattgccaataaagtcgaaatcgccggaccgggctttatcaatattttcctcgatccagccttcctggcggacaacgtcaatctcgcgcttcagtccgagcgcctgggcgtggcgaaaccacagccgcagaccatcgttgttgactactccgcgccgaacgtggcgaaagagatgcacgtcggccatctgcgttcaaccatcatcggcgatgcctcggtacgtactctggaattcctcggccatcgcgttatccgcgccaaccacgtcggtgactggggtacccagttcgggatgctgatcgcttatctggaaaagcagcagcaggaaaacgccggcgaaatggcgctggccgacctcgaaggtttctaccgcgaagcgaaaaaacactatgacgaagacgaagcgttcgccgagcgcgcgcgtagctacgtggttaagctgcagggcggcgacgagtacttcctgcagatgtggcgtaaactggtcgacatcaccatgtcgcaaaaccagatcacctacgatcgcctgaatgtcaccctgacccgcgatgatgtgatgggtgaaagcctgtacaacccgatgctgccggggatcgttgccgatctgaaagcaaaaggcatggccgtcgagagcgaaggcgcgaccgtggtcttccttgatgaatacaaaaacaaagaaggcgaaccgatgggcgtcatcatccagaaaaaggatggcggctacctctacacgactaccgatatcgcctgcgcaaaataccgttatgaaacgctgcatgccgaccgtgtgctctactacatcgactctcgtcagcatcagcatctgatgcaggcatggactatcgtccgtaaagccggctatgtaccggaatccgtaccgctggaacatcacatgttcggcatgatgctcggtaaagacggtaaaccgttcaaaacacgcgccggcggtaccgtcaaactggccgatctgctggacgaagcgctggagcgcgcacgccgcctggtggctgagaagaacccggatatgccggccgatgagctggaaaaactggccaatgcggtgggtatcggcgcggtgaaatatgccgatctgtcgaaaaaccgcactaccgattacattttcgactgggacaacatgctggcgttcgaaggtaataccgcgccttacatgcagtatgcctatacccgtgtgctgtcggtgttccgtaaagccggtatcgacgaaagcgcgctggctgccgcgccggtagttattagtgaagatcgcgaagcgcagttggctgcccgcctgctgcagttcgaagaaacgctggccgtcgtcgcccgtgaaggtactccgcacgtaatgtgcgcctacctgtacgatctggccggtctgttctctggtttctacgaacactgcccgatcctcagcgccgaaagcgaagaggcccgtaatagccgcctgaaactggcgctgctgacggcgaagacgctgaagttgggcctcgatactctgggcattgagaccgtagagcggatgtaa

SEQ ID NO: 89462 - DNA, 1140 bp, Enterobacter aerogenes
atgaaagtttggccggtcaaacatagcccattactgcgtcagcctgagcgctttatcgctcgcagcgagctgcaggcattgatccgtaatgtgacgcaaaacctggtgaatattaaggatgacaacgggcagtttttactgcggctggacgatgggcgagtcatcgataccaaaggttgggccggttgggagtggacccacggcgttgggctgtacggcatctaccagtattatcaacaaaccggcgataccgcgatgcgcgatatcattgacggctggttcgccgatcgcttcgccgaaggtgcaaccaccaaaaacgttaataccatggcgccatttctgacgctggcttaccgctatgaagagaccgggcgccaggagtatctaccatggctcgatagctgggccgagtgggcgatgcatgagatgctgcgcaccgagcagggaggcatgcagcacattaccctggcggaagagaaccatcagcagatgtgggatgacacgctaatgatgacggtgctgccgctagccaaaatcggtaaattactaaatcgtccgcaatacattgaagaagcaacctatcagttcttgctgcatgtacagaacctgatggacaaagagacaggcctgtggttccacggctggagttatgacggccgacacaactttgcgcgtgcgcgctgggcacggggtaacagctggctcactatcgtgatcccggacttccttgagctggtggatttgcctgaggggagtgcggtacgccgctatctgctacaggtactgaatgcgcaaattgccgcgttagctaactgtcaggatgagagcgggctttggcatactctgctcgacgatccgcattcctatcttgaagcgtcggcgacggcgggcttcgcttacggcatcctgaaagcgatacgtaagcgttatgttggggcggagtacaccgaggttgccgaaaaggcgatacgcgggattgtgcgaaatatttcaccagagggggaactgctgcaaacctcgtttggtaccgggatgggctccgatctcgatttttaccggcaaattccgctcacctctatgccgtacggccaggcgatggcgattctttgtctgacggagtatctgcgcaaatatttctga

SEQ ID NO: 89463 - DNA, 1584 bp, Enterobacter aerogenes
atgaaaacacgaaaaatcggtttggctaattatctcgcctatggttccggcgattttctcggcgcgggaaccaccgcgctgaccgcagcatggctactctatttttacaccaccttctgcgggctatcgcccattgaggcgacgctcattttcgccaccgcgcgcgtgctcgacgcggtcgtcagcccgctgatgggcttcttaaccgataactttggctctacctggctgggtaagcggttcggcagacgcaaattttttattttgctcggtattccctgcgtttttagctactcaatgatgtgggtaggcgatatggggttctggtactacctcgcaacttatctgctgtttgatattgtctataccatgattctggtgccctacgagacgctggtgccggagatgaccgatgatttcaaacagaagaccaaattttccggcgcgcgcatttccatggcgcaaatgtcggcgatattagcctcgtttttaccggggatcctgctcacccaactgggtaaagataacgccagctcatttttttacgcgagcctggtcttttcggtcctgtgcgcgctaatgctgaccttcgtctggtttttcacctgggaacgtccgcgggaagcgtggtctgaagcagcgttacgcgcggaagaagaaaagcgcaacttaacgctcgcgcagagtcttaatcgcctgtttattgagctcagctctacgctgcgaattaaaatcttccgtcagcatcttggtatgtatctgggcggttatatcgctcaggacgtgttcaacgccgtgtttacctattacgtggtctttgtgctgatgcaggacgcttctgtcgcctctaacttactcggcacgatggctatcttccagttcatcgcggttatcgccatgatcccgctatgcattcgctttggcccggcgccttcatatcgcatggtagtggtgctgtttggtttgagctctctctcttatgcggtgctctattacgcggggctaagcgacgtctattcattattactgctcatttccgctatcgcgggtctgggacgcggcggcattaactacgtgccgtggaatacttacacctatattgccgatgtcgacgaagtcattaccggccagcgtcgggagggcattttcgccggtattatgacgctgacccgcaaagcgtcgcaggcgggggcggtgatgctggttggcattatcatgcaattatcgggctttgtttccgggcaaaaaattcagccggaaggcgttagtcacaccattctgttgatccttagcgtcggtactttagtggtgctggcctgcggcttcctggtctccctgcgctttaaactcaatttacatacgcacagcgtgctccgcgccgagacgctggtgatgcgtgatatcggttacgcacagcccgagcagacgactgccgaaaaccgcgcggtggttgagatgctggcgggaatgccttacgactgcctgtggggtaataacaacattggctacctgaatcgcaataaacctgccgccccggcgctgaatcagggcggcactttgaattcgacatataccagaggttaa

SEQ ID NO: 89464 - DNA, 423 bp, Enterobacter aerogenes
atgccctactctcatctgttagtcgccgtcgccccaacgccggaaagccgcatgttggtcaataaagcggtgtctatcgcacgtccgtccaatgcgcaggtcagcctgattacgctggcgacagatccggaaatgtataatcagttcgccgcgccgatgatggaaaatttgcgagagataatgcaggaggagacccgtagttttcttaatgaactcgccgcccaggcggactaccctatcagcaaaatgaccatcaccagcggcgaactttgccaccatgtgaaggatttttgccttcagcatcacgtcgacctggtcatctgcggcaaccataaccagagcctgttttcccgcgctacctgttcagcgaagaatatcgtcggcagcagcggagtcgatgtgctgttggtatccctggaataa

SEQ ID NO: 89465 - DNA, 1416 bp, Enterobacter aerogenes
atgagtcgtttagtcgtagtatctaaccgtattgcaacgccaaatgataaaaaggccagcgcaggcggcctggcggtgggtattttaggtgcgctgaaagcgagcggcggcacgtggtttggttggagtggcgaaatcggtgatgatagccagccgttgaagaaggtgagtaaaggggatatttcgtgggcctcattcaaccttagcgaagaagatcacgagctctactacaatcagttttccaatgcggtgctatggcccgcatttcactatcgtctcgacttagtcaattttcagcgtccggcgtgggaggggtatctgcgggttaatgccgccgtggcgcaaaagctgctgccgctgctagccgatgacgatatggtatgggttcatgattatcatctgttgccatttgccagcgaattacgcaaaaacggtgtgaagaaccgcattggtttcttcttacatattccgtttccaacgcctgaaatattcaatgcgttgcccccgcatgccgaactacttgagcagctgtgtgattatgaccttttgggctttcaaaccgaaaacgaccggcaggcgtttgttgattgcgtcgcccaacaaactaccttgtgcgaagtgggtcaccagcaataccgtgcctggggtaagacgttccgtactgccgtctacccgattagcattgagccgcaagaggtcgcgcgcagcgccagcgggccgctgccgccgaagctggctcagttgaaagctgaactgaaaggggtgaagaatattttttccgttgagcgcctggattactccaaggggctgccggagcgttttcaggcttacgaagcgctgctggaaaactacccccagcatcgtgggaaaattcgctatacccagatagctcccacttcgcggggtgatgtacaggcttatcaggatatccgccaccaactggaaaccgccgcgggacgcatcaacggccactatggtcaattggggtggacgccgctgtattatctgaatcagcacttcgatcgcaaactgctcatgaaggtatttcgttattccgacgtgggcctggtcacaccgctacgcgacggcatgaacctcgtggccaaggagtttgtcgccgcgcaggaccctgaaaaccctggggtgttggtgctatcgcagttcgctggcgcggcgaatgaactgacttccgcgctcatcgtcaacccctacgatcgcgatgaagtggcggcggcgctggatcgcgcgctaacgatgccgcttgccgagcgaattattcgccatggcaaaatgctcaaggcgatcgagagtaatgatattgataactggcaggcacagttcgttgccgatctaaagcgggtaaagtcgcctgaagatagctgccagcagccaaccgtagttactccctccgcgtag

SEQ ID NO: 89466 - DNA, 804 bp, Enterobacter aerogenes
gtggctgaccagatatctgtaccgcctgagctaaccggaaaccacgcattttttctggatcttgacggcacgcttgccgatatcaaacctcatcccgatcaggttgttatccccgaagacgtccttcagatgttgcgattactggcacagcgacaacatgatgctgtggcattgatttcagggcgctcactaacagagcttgatgaactaacccgtcactggcgactgccgcttgccggcgtccacggggctgaacgccgcgatatcaatggaaaaaggcacgatgtatcactgccgccggcattgagccgtgaggtcggcgaagcattaacttcggcgctacaggcgctgcctggcagtgaactggaggataaaggcatcgcttttgcgctgcattaccgtcaggcaccacaacaccagagcgccatcctggcgctggcgcaggatatcgtgcagcgttatccgattctggccattcagcaagggaagtgtgtcgttgagatcaaaccacgtggcattaacaaaggtgaagcaatcgccgcgtttatgcgggaagcgccttttgcgggacgaaagccggtatttatcggcgatgacctgactgatgaggcgggttttactatggttaatcaattaggcggagtatcgattaaagttggacaaggcgacacacaggcgcgctggcggctggcgaatgttgccgccgtacatcagtggttacgccatgttgtcggcaatatgcaaagcctggatgtattcactaacgggagggatgaccatgagtcgtttagtcgtagtatctaa

SEQ ID NO: 89467 - DNA, 981 bp, Enterobacter aerogenes
atgtcatctgtaactacgccgagcgccgcacgatcctccttcagcttcggtcgaatctgggatcagtttggtatgctggtggtcttcgcagtgttgttcatcggctgcgtgatctttgttcccaactttgcctctttcgtcaatatgaaagggctggggctggcgatttccatgtcgggaatggtggcctgcggcatgttgttctgcctggcctccggggattttgatttgtcagtcgcttcggtcattgcctgcgccggtgtgacgacggcggtagtgattaacctgaccgaaagcttatggattggcattgccgccgggcttttgctgggtgctgtcagcgggttggtaaatggttttgttattgcgcgtttgaagatcaacgcgctgatcacaactctggctaccatgcaaatcgtccgtgggctggcctatattatttccgatggtaaagcggttggcattgaggatgaacgtttcttcactctgggttatgccaactggttggggctgccggcgccaatctggctgacggttgcctgcctgatcgtctttggactgctgctgaataaaaccacctttggccgcaacacgctggccatagggggcaatgaggaggcggcgcgacttgcaggggtgccggttgttcgtaccaagatcatcatctttgttctttcaggtctggtatcggcggcggcggggattatcctggcttcgcgcatgaccagtggccagcctatgacctcaattggttatgaactgattgtgatctcggcatgtgtcctgggcggcgtatcgctaaaaggcgggatcggtaagatctcttatgtggtggccgggatcctaatcctgggtaccgtggagaatgcgatgaacctgctgaatatttcgccattctcacaatatgtagtccgcggggtgatattgctggcagcggttatcttcgaccgatacaagcaaaaagcgaaacgtgcggtttaa

SEQ ID NO: 89468 - DNA, 1515 bp, Enterobacter aerogenes
atgcaacaatctatcccttatctctcatttcgcggtatcaccatgacgttcccgggcgttaaagcactgtctgacatcagctttgactgctatcgcgggcagatccacgcgttgatgggtgaaaacggcgccgggaagtccaccctcttaaaaattctcagcggtaactacattccaactgccgggcatctgcaaattgatggtcagcaaatggcatttacgaatactaccgctgcgctaaatgctggcgtagcgattatttatcaggaacttcatctgatcccggaaatgaccgttgccgagaatatctatcttggtcagttgccgcataaaggcggcattgtgaatcggtctttattgaattatgaagcgcggctgcagctggaacatctgggactggatatcgacccggaatcgccgctgaagtatttgtcgatcggccagtggcagatggtggagatcgccaaggcgctggcgcgtaacgcgaagattattgcatttgatgaaccaaccagctcactctctgcgcgcgaaatcgacaacctttttcgcgtgattcgcgagctgcgtgaagaagggcgagtgattatttacgtctcgcaccgtatggaggaaattttcgccctcagcgatgccattaccgtgtttaaagatggccgctacgtgcggacctttgacgacatgcggctggtggatcacgatgccctcgtgcaggcgatggtggggcgtaatcttggcgatatctatggctggaaagcgcgtgaatatggcagcgagcggctgcgactggatcaggttaaagcgccaggtgtcagaatgccaatcagtttatcggtacgcagcggtgaaattgtcggcctgtttggtctggtcggcgccgggcgcagcgaactaatgaaggggctgtttggcggcagcagaattaccagcggtcagctctatattgatggtcaggcgataaatattcgcaaaccggcgcaggcgattcaggcgggcatgatgctgtgtccggaggatcgtaaagccgagggcatcattccggtacattcggtgcgtgacaacatcaatatcagcgcgcggcgtaagcatattcatgccggctgcctgattaacaatgcctgggaagcgagtaatgccgaacaacatatcaaatcgctcaatatcaaaaccccgggagctgagcagttaattatgaatctctccggtggtaatcagcaaaaagccattctgggccgctggttgtcggaagagatgaaggtgattctgcttgatgaaccgacccgcggcattgatgtcggcgcaaagcatgaaatctacaacgttatctatgcgctggccgcttctggcgtggcggttgtttttgcctccagcgacctgccagaggtgctcggcgtcgccgaccgcatcgtggtgatgcgcgaaggtgaagtggccggtgaattgctgcatgaagatgcgaatgaacagcaggcgctgagccttgcgatgcctaaagtcagccaggccgtagcctga

SEQ ID NO: 89469 - DNA, 1080 bp, Enterobacter aerogenes
atgttgattgcgatttttctaatgccttgttttaagaccgataaaaaatttaagtccgattttcccctaccgaaaagcgaattaaagctggagtttaccatgcacaaatttactaaagcgctggcggccattggcctcgcggcggttatgtcacaatcagctatggctgaaaacctcaagctcggtttcctggtgaagcaaccggaggagccctggttccagaccgagtggaaatttgctgataaagccggcaaggatttgggctttgaggtgattaaaatcgcggtgccagatggtgaaaagacgcttaatgcgatcgacagtctcgccgccagcggcgcgaagggatttgtcatctgcacgccggacccaaaactggggtcggcgattgttgcgaaggctcgcggctatgacatgaaagttatcaccgttgacgatcagtttgttaatgccaaaggtaagccgatggagagcgtgccgctggtcatgatggccgccagcgaaatcggcgctcgtcaggggcaggaattgtataaagagatgcaaaaacgcggctgggacgtgaaagataccggcgtaatggcgattaccgccgatgaactggataccgcccgtcgccgtactaccggttcgatcgacgcgctgaaagcggcgggtttcccggaaaaacagatctatcgtgtaccgaccaaatctaacgacattccaggagcgttcgatgccggtaactccatgttggtgcagcatccacaggttaagcattggttaatcgtgggtatgaacgataacaccgtgctgggcggcgtaagggcaactgaaggccagggctttaaagcgccggatgttatcggcatcggtattaacggtgtcgacgcggtgaatgagctttcgaaagcccagccgacggggttctatggatctctgctgccaagcccggatatccatggctataaaaccagtgagatgctctacaactgggtgaccaaaggcaccgagccgccgaaatttaccgccgtgactgacgtggtgctgattacccgcgacaacttcaaacaagagttggcgaagaaagggctgtaa

SEQ ID NO: 89470 - DNA, 504 bp, Enterobacter aerogenes
atggcagttccaggaatggttcagaaattaaatacccagattaatcttgagtttcacgcatcaaatgtttatctacatttaggcgaatggtgcgcgcagcagcgcctcaacggcacagcaaccttcttgcgcacccgtgcgcaatccagcgtgacgttaatgatgcaggtttttgactatatgaaaaaggccggcgcctggccaattgtcaaagccgacgaaagctatccaccacaatgcacaacgcttgaagaagtgtttgccaaaactctcgaagagtatcagcaacgtagcagcatgctatccgacctggcgcaggaagcaaaagcgcagcgcgatgacacgacgtggcgttttttgaccctgctggagagagagcagcagcaagatgggctgttactgcaaaccgttcttgaagaaatacgtactgctgataaagccgggctcggtatggagcagacagaccgtcgactactcaatctcatctcgccacaacagcactaa

SEQ ID NO: 89471 - DNA, 252 bp, Enterobacter aerogenes
atgtctcaacctttcactgaacaagatgagttggtttccgatgtcgtcgcatgccagctggtcatcaaacagatccttgatgtgattgacgttatcgccccggtcgaagtgcgcgaaaaaatggcgacgcagttaaaagcgattgattttgcgagtaaccctgcttcggcggatccggtgacgctgcgcgcagtacaaaaagcaattgcactgattgaactgaaatttaccccgcagggtgaagcgcactag

SEQ ID NO: 89472 - DNA, 1494 bp, Enterobacter aerogenes
atgtgcgggagcggcgaaaagaaaacgtaccgcaaagatacttattcattttgctatggcaacgacgcaatgggtacaacaacaattacgccaaaaacaggcgctttttccgccccggcattattggtggctggcgctttctttatggaatttctcgatggcacggtcatcgctaccgccctgcctgatatggcgaaggattttggcgtagcggcggtcgcgctcaatattggcatcagcgcctacctgatcaccctcgcggtactgatccccgccagcggctggatcgccgaccgcttcggcgcgcggaaagtgtatactctggccctcgccatttttaccctcgcctccgttttctgcggtttatcgcgcaacatcgaaagctttgtgacaatgcgcattctacagggcgtcggcggcgcgctgatggtccccgtcgggcgcctggcggtattgcgcaccactcccaaagatcagctcatcaaggcaatagccacgctgacctggccggcgttggtcgcaccgataatcggcccgccgctcgggggctttattaccagttacgccagctggcactggatcttttttattaacgtgccgctcggactactggcgatggcgctctcgctacgcatcattcccaatatccgtgaagaagaacgccgccccttcgatctacccggttttctgacgacgtcactggcgatgataagcctggtggcagcgatggaacgactcggcgaccgacagccacagagctggcaaacgctggcgctcatggcgacaggtatcggctgtatgtttttctctctacgccatttccgccgcgccgcctggccaatggtacggttggacgctttgcaggttcctacattccgggtaaccatgtacggcggttcactgtttcgcgcgtcgataagcgccgtcccattcctgcttccattgctattccaggtgggtttcggcatggatccttttcattctggactgctggtgctggccgtttttgtcggcaatctcactatcaagcctgcaaccacgccgctcatccgctggttggggtttcgccgcttattgctgattaacggtgcgctgaatgtcgcctcgctacttgcctgcgcgctgttaacgccgcaaacgccggtatggctgataatgttgatcctctatcttggcggggtgttccgttccatccaatttaccggcgtcagtacgctcgcttttgccgacgttccttccgcgcagatgagttatgccaatacgctgttcagcaccgcttcacagctggcggttgggctcggtatcactctcggcgccatcggcatccgcatcggtgaacagttgagcgagtggttgaatctgacgactctaccgggaattagcttccgcttggcgtttgtctttattgcgctgatttgtttggtagggatgattgatacgctacatcttacgcgagatgccggcagcacggtatccagtaaaacacgaccataa

SEQ ID NO: 89473 - DNA, 639 bp, Enterobacter aerogenes
atgaaaatcgcactgatgatggaaaacagccaggccagcaaaaatgccatcatcctcaacgagttaaacgccgttgccgatgaaaaaggcttcccggtttacaacgtaggaatgagcgatgagcacgatcatcatctcacctatatccatctgggaatcatggccagcatcctgctgaattctaaagcggtcgatttcgtggtgaccggttgcggcactggccagggggcgctgatgtcattgaatatccatccgggagtggtctgtggttattgtattgaccctgcggatgccttcctgtttgcccaaatcaacaacggtaacgcgttgtctctgccttttgctaaaggctttggctggggggcggaattgaacgtgcgctttatttttgagaaggcgttcaccggccgtaatggggaggggtatccgccggaacgtaaagagccgcaggtccgcaatgccgggatcctgaataaagtgaaagcggcggtggtgaaagaaaattatcttgataccttacgagctatcgatccggaactggtaaaaaccgccgtttccgggccgcggttccagcaatgcttcttcgaaaactgccaggataaagaaatcgaagctttcgtacgccagattataggctaa

SEQ ID NO: 89474 - DNA, 498 bp, Enterobacter aerogenes
atgctgaaagcagaaatgatcgaaaaacttaatgagcaaatgaatcttgagctttattcttctttgctttatcagcagatgagcgcatggtgcagctaccatagctttgaaggtgcagccgcctttctccgccgccacgcgcaggaagaaatgacgcacatgcagcgcctgttcgactatttgaccgataccggcagcctgccgcgtattaacgccattagctcgccgtttgccgaatatgcttcacttgatgaactgttccgccagacctatgaacatgaacagttaattacgcaaaaaatcaatgaactggcgcatgccgcgatgaccaatcaggattacccgacctttaatttcctgcaatggtacgtagcagaacagcatgaagaagagaaattattcaaatctgttattgataaactgacccttgccggtaaaagcggtgaaggcctttactttatcgataaagaactggcaaccctcgacacgcaaaactaa

SEQ ID NO: 89475 - DNA, 240 bp, Enterobacter aerogenes
atgtcatctattcacggtcatgaagtattacagatgatgatcgcatcgggcgagtcgtacagcgttgccagtctcgaagcggccattaagaggcaatttggcgaagatgctcgctttcacacctgttcggcgcaggatctggacgcggcgcagctggtggcgtttttgcagcagaaaggtaaattcattgcagtggaagagggtttcaataccagcgagagtaaaatttgccgtcattga

SEQ ID NO: 89476 - DNA, 1212 bp, Enterobacter aerogenes
gtgaagaaccgcactctgggtagtattttaatcgttgccggcaccaccattggcgccggtatgttggcgatgccgctcgcttcggcgggagtcggttttggcgtcaccctggtattactgatctcgctgtgggcgctgatgtgctataccgccctgcttctgctggaagtttatcaacatgtccctgcggatatgggattaggctcactggcggcgcgctatctcggccgctacggccaatggattaccggtttctgtatgctatttctgatgtatgcgcttacggcggcctacatcagcggtgctggggagctgcttgcctccagccttaatcagtggctgaactggagcctgccgccttctgccggcgtattgctctttaccggcattggcggcgcggtggtgtgcatagggacttctctggtcgatctgtttaaccgctttttattcagcgccaaaattatcttcctcgcggtgatgctggtgctgctgctgccgcatattcaccagataaatctcctgactctgccgctacagcagggcctggcgctgtccgctattccggtgattttcacctcgtttggttttcacggtagtattcccagcatcgttagctatctgaatggcgatattcgtaagctgcgccgcgtctttatcatcggtagctttattccgctggtcgcctatattttctggcaactcgccacgcttggcagcatcgactctccggcctttaccgccgtgctagcgcagaattccggcctgaacggcctgctggcagcaatccgcgacgttgtcgcctcgccgcatgtagaggtggcggtacatctgttcgccgacttcgctctggcgacgtcttttctcggcgtcgcattaggtttgtttgattacctggcagatttgtttcagcgtaaaaacacccctgccggacgtatacagagcggcgtcatcactttcctgccgccgctggccttcgccctgttttatccgcgaggtttcgtgatggcgctgggctacgctggcgtggcgctcgccgtactggcgctgatgttgccatcattattagtaatgaaaagccgaaaactgcacccacaggcaacctggcgtgttccgggcggctcgattgcgctctggctggtattgggctgtggagtggcgatagtggccattcaattctgcattgtggcgggattattacccgctgtgggataa

SEQ ID NO: 89477 - DNA, 669 bp, Enterobacter aerogenes
atgaaaaccggacccctgaacgaaagcgaacttgaatggctggacgagatcctgtcgaaatatgccactgagggcgccatccttgatgtctccgaacttgatggtctgctgacggctatcctatccgggccgagcgaaatcgaaccagcgcagtggctgcttgctatctggggcggggcggataatgtaccgcgctgggctaacgatcgcgagcgcgaccgtttcgttaacctgacgctgcagcatatgagcgacatcgccgaacgtctggctgactatccggagcagtttgatccgctgtttggcactcgcgagtttgaaggccaggaactgaccattgttgaagagtggtgcttcggctatatgcgtggcgttgccctctgcgactggtcgacgttacctgcggaactgcagccacagcttgatgccattgcgttacacggaactgaagaacgtttcgaagcgctcgatacgctgaccgcggatgaatttgtcgaaagcgttgatagcataaagcccgccgcgctggctttatataattactggatggagaacgctcagccgacggccgtgcagcaaccggtaagaaatgagaccaaggtggggcgtaatgatccttgcccctgcggcagcggcaaaaagtataagcagtgttgcttagctaaataa

SEQ ID NO: 89478 - DNA, 567 bp, Enterobacter aerogenes
atggccacgttgcttgaaagctacgggaactgttttcgaaaatatgccactttccgcggccgatccgcgcgccaggaatatgtggtttttaccattgctaactttatattgtccgcgatcctgggattgatccccgtcgttggcggtatcttcgggttaattattatcattccggggatcgcggttgcggtgcgtcgtttgcacgatctcaacaaatccggctggtggttgctggcgccctacggcattatgctgatcggtctgattggtattgccgctaccgtcgaagagggtagagccgcagtatgggtatgggtgatcgcgctgggcggcctggccgcgttggtaatgtcgatttggatgatttttacccgtggtaccgtaggcagcaaccgctttggtgatgaacagaacgatgacaacagcggcggtaatacgatgggcaagagttctgccgcggatgatgtcagagagcgcctggcacaggctaagaaaatgcttgatgacggcgttattagcgcaagtgaatacgaagtgatgcgtgctaatatcattaaagatatgtag

SEQ ID NO: 89479 - DNA, 885 bp, Enterobacter aerogenes
atgtttaccggattgtgtgcttttccgctgacgccactgcgcaataatgaggtggatagccgcgcgctaataaaaatcatcgatcgtctggtctcggcgcgagttgattcgctgggcattctgggctcaaccggcagctacgcctatttgagccgcgagcaacgcaaaatggtggtcctggcggcaaaacaacatgcgcaaggggtcccgatgatggtcgggataggcgcgatggcgacggatatgattctacgtcttgctgaggatgctcagcaggcgggtgcggatgctgtgctgctaccggtgctgaactaccagcctctgacggatgatgaggtgtttacactgttccagacggttaaccgccatgtgtcggtacctatttgtatctatgataacccgcgcaccacccacagagccttttctgatgcgcttgttaagcgtattgcttcgttatccaatatcgcatcaatcaagatccccggtttgccggccgaccaggctggcgtcagagtggcgacgcttcgtcagcgattgccgcagcgagtgagtattggcgtcagcggcgacgcttttgccgcggcagggttaaacggcggctgtaatctgtggtattccgtttgcgccggtctgttcccgcaaattgcccaaaatattaccgcagcagcgttaagtggcgagcggcagcaggcatcggcactaagcgaacggctggagccattatgggcattgttcagacagcacggtagtctcaaagtgattgccgctgccgcctctattcttgaactagccgaagtagagtgtttaccgcgaccgttggccccgctctccgcggaggccattaacgatgtcaaatcggtcatggataagctggatctacgctga

SEQ ID NO: 89480 - DNA, 360 bp, Enterobacter aerogenes
atgaatggtaaagcgaagttacttatagcaggggcatcgctggcgctggtcgccggtgttttctacgtaggatatctgaaaggctggtacgcacattcagagcacgttaatagccaggcaaagacgcgggaaaagaagcaggaaaaagcggtagcgactggcgaacagaaggcggcaacggcgagcgctgaagccaaagtgatttaccgtactgtttatcgtgatgtggtgaaatatgtcaacgacccgaatcatactaagtgtcagtttgatcctgctgctgtgcagctgcgccagcgagcaatcgacgcggccaacaatatccccggatttgatgaacccgccatgcaaactaagtaa

SEQ ID NO: 89481 - DNA, 537 bp, Enterobacter aerogenes
atgagcaacaaagctaagttcagcgccgccatgctggcgcttctggccgccggtgcttcagcgccggtactgttcgaccagtttatcggcgaacgggaagggaacaccctgacggcggttatcgatcccggcgatgtctggtcaatttgccgaggtgtgactcgcatcgatggccgaccggttgtgaaagggatgaagttaacgcagcgtcagtgcgaccattacaacgcaatcgaacgcgacaaggcgctggcgtgggtacaaaagaatgttcacgttccgctaactgagccgcagaaagttggtatcgccagtttctgcccttacaacatcgggccgggtaaatgcttcccttcgacgttttatcgcaagctgaatgccggcgaccgcaaaggggcatgcgcggagatccggcgctggatattcgacgggggaagggattgccggttaacgaaagggcaggccgacggctgttacgggcaggttgaccgccgcgatcaggaaagtgcgctgacgtgctgggggctttacgaatga

SEQ ID NO: 89482 - DNA, 225 bp, Enterobacter aerogenes
atgaagaatttaccggatgtggcggcgggaacgtcgtatataacatccaccgtaagcggtagctactggctgctgcaacttctcgataaggtaagccccagccagtgggcggcaatcggtgttctggccagtattgttttcgggttacttacctacctcaccaatctgtacttcaaaatcaaagacgaccggcggaaggcacaggactatgagcaacaaagctaa

SEQ ID NO: 89483 - DNA, 147 bp, Enterobacter aerogenes
atggaaattggcgacgtaacgcagcttactgatgaagagattaatgattacctgaataactacgtctggtatggcatttccgcagacgacaggcttcgtctgggtgaagaaatgagacgacgcgaagcacttaaggagcagaactaa

SEQ ID NO: 89484 - DNA, 2169 bp, Enterobacter aerogenes
atgtcggtacctaaccaaattccttataacatctataccgccaatggacagacgaccgtttttacttaccagttctatatcatcagtgccagtgatttagaggtaagcatcaacggttccgttgttaccagcggctataccgtatccggcgttggtaacaaagacggcggtgatattacattccttactccgccggcaaacggcgcagtggttatgctcgaacgtgtggtaccgacatttcgtctcaccgattatcaggacaatggcgatttgcttgcggataccgtcaataaggattttgaccgtatctggatggcgattcaacgcgcgtttatcgatctggggctttcacttactcgcccactttttggcgggccgtataacgcacagggctaccgcatcgctaatcttgctgatccagtcgataaacaggatgccgcaacaaagagctacgttgatgcaactggtgcagccaaccttcgctatgcgctgcgtttccctgaagttgtcgaacccatgccgcgagtagctgttcgggctaattcccttcaggggtataacgcccagggtaaaccagtacccgttttctcgatgaccgataccgccgaccttgcattacaacttgcatccttaaccggtgcgagtttgattggaggtctgggatttatcacacctgaaatgcatggggcgctgggggatggaaataccgatgaccgcgtagcaattcaagctgcgatcgataaggccagcgaaaactacattaacgggactgggccaacaacggtatggatgggttacaaatacctggtatctctgaacccaaactcaccactgttacccggtgaagtcgctgcgggtcgcgcggtgttcaatgtgccagacggggtgacaatcaccggtggcgggcacatagcgctagttgacacctactcgggtacgtcttccggcgcagtatttactaactggagtggcaccgcgaataactgcatcatcagaggtatttcaatcgattgccgctatggtatagcccccggtcgtgggatatcaggtatcaacattgtcgattctgataatgttctgattgatggcgtgatagtcattaacgcatcgggcgggggtatttacctgcgccgttgctacggtaacgcagccgatagtaactacggatgctcaaacagcaaaatcattaactgtcatgttaataacgtttattacatcgggatccagtgcgagcgcccgcgaggcgttctcattaatggcaatactattacaaacaccaaaaataacggtattgatatcgagggtgaaaactccagcacaaccaattctggttatgcaaccaacgttgtaatcacatccaatattctggtggatgttaataacggtatttttatcgaatcctgtggcaatactgttgttaacagcaacaacattactacggcggggatcgggattgtctttaaccgtatcagttctgcgtcgttcttcaatactgttataggcaacgaaatcaccgggacgtcattaacatcgggctgggggatgcgctttatcaaccagatcgggcggtgcacgattgccaataatacaatcagggttaaaaagtacggtatgcattttgccgatcgtatcgaccgttgcaatatcgggtcaaacacctttgagtctatcggtgaaacgatactccatttcgataaagtaccatcaggtgtatctatgcttcgttcccgaattgcggagcaattttaccttggcgggcagactagaggtgtcccgtattcaacatctccgcgtggatgcccttcaaactacccgaatcgaatggcatcaaccgttcgttatacccccgttctattttcagaccttgcggggccgggggaagacaatatggtgtaccgtaccgccgtgcttacgttgaatagctcttggaatgcttacgccaggtacggaaacaccaccgccggttataccgacataaatggtaattttggtaatgcgggggattaccttgaaattaatggagttgtgtatcaaatttatgcggtggcaaccagcgtcacgacaattactaagtgggatggaacggcgtatgtcgctggtaattttgttggtgatttcacggatgctttcacagttaaaacacacagacctgtatggggaactttataa

SEQ ID NO: 89485 - DNA, 1611 bp, Enterobacter aerogenes
atgatttcgttcctggccttctttttgatgtgggcggaacggatgaactgggatgtgccggactgccactataaagcctgccactggctggagcatcgcggaaacctcgcggtgcttcgctgttttcgtggctttggtaaatcaactatcctgggcgtttataacgcctggcggtattactgcgatcgccagtaccgtattctgcatcagtcggaatccgatacaaccgccagaaagaccagccgcgatacgcaaaacgttctgcgtaatcacccactgacgaaaggtatgttgccggacggcatcggtaccatcgagcaatggtgggtaaacggcgcgctggatatgcgtaacgccagcatgttcgcaaaaggcattctgtcgaacgttaccggcgcccgtgccaacgagtgccagaatgatgacgtggaggtgcccggcaatatccagactccggaggctcgcgaaaaactgcgctatcgcctaagcgagcagacgcatattttgatacccggaggccggaaattgtttatcggtacgccgcatacccacgatagtctttacgacgagaaagaagcagagggcgctgattgcctgacgataaagctattcgataaagagcaccgcgtcgaagcgaagaaggcaaccaaaaaacgataccggataccgttccgcccagaatatgtttttgtggggatccacaaggccgcccggttattgattgagggtactgattatcgattgacggaagacggtgtagagttcgcagcgccgcctgaaactgtcgtggatttttatgccggctgcgcgtggccaggccgtttcgatcatgatgaattactgctgcgccgtaaagaatgccgcaccgtcaacgaatgggatagccagtaccagttgcacagtaaaccggttggcgaggttcgtctcgatcccgaccgtatccgcgagtacaacgtccagcctgaaattcgctatgcgaaccgttcctgctcgatgtggctgggacagacgcaaatcgtcggcgctgtcgcctggtgggatgtggccaccggcaaagttaaggctgatgcttcggcattttcccttattttcaccgacgcccgcgggcatctttactggcatgtttgccaggggttaactggcgagctggcagaatttggctacaacgacaaaatcaccggcggtcaggtgatgcagattaaagaactggtgctgaagtaccagatcccgctggtctgcgtagaggtaaacggccccggcagtttcgccgggaagttgcttattcaggcgctgaagggtaccggctgcggcgtgcgggaagagttcagcgtcaccaacaaacaaaagcgcatcctcgatgctttcgaagcgccgctgtcgtcccggttcctgtgggcgcataccgacgtgctcgacggcccaatgtacgaccagatgcgggatttcaacccggcgttaactaaccagccagacgactttatcgattcgggatccggtgcgatcagtgctacgcctgtgcgcatcgggaaattagtcgggattccgaccgcgcaggcgagggagcattggcagccatacgatggcgacatttcggtcgctgtagattactag

SEQ ID NO: 89486 - DNA, 348 bp, Enterobacter aerogenes
atgcattcagattacaaaactcgccttactgctcttagcgataagctcaccgatgtagttctggaagaagccgatccggacaactggccgggggcagggaaggaaatcacaaagcacaccaaacaggaacgcggcgatcggtactggcataagaagaatgcggccgcatcgctaaccttgttggtaaaagtccattcacttattggtatgcatactcgcggaggcacgccgaagagcggcggagaagatccggacgatgaagcgttccagttaggtcagcaggtagcagctgctgagcgtaaagcgctggaagtcatcgagaggatacagcacaaaggcaaaaaatga

SEQ ID NO: 89487 - DNA, 651 bp, Enterobacter aerogenes
atggaaattttctgggtagttgttggcgtagttgttgtgatcttgttcgttatcaatcagaacagaacaaaaatcacaaatcgaaccgttataaccagaaacaaaactgttaaaactgaagatggggaaatccgtattcagcaaacacaagtgattgacagcgcttcgactcagtatacgaaacctaataccttaaataacgaaagtcattctgaatatgacaaagctgttatatccgattattacaaacaggtttctgagcagaaatctgtcgagtctttgcacacggagcagcagacctttattcagcctcaaagagttgaaaaagtcgttaacccgctcccctcttccacgatttcacctacgttaattgaaaataccgttcaggttgctgatgggcgtaaggtctgtacgcgatgcagtagaaacctgcccttagataaatatagaaaatctagtaaacacgctgatggatatacaacttggtgcgcacactgcctggatggtccaaaaaacacacagcacactaaatggtgtccaatttgtgagatccgccgtaaacgcacaagctattacaaaaacgcaaacaaccgtgatgggttgatgtcatggtgcaaaaattgttgggattcgtacaaaggtaaacgttaa

SEQ ID NO: 89488 - DNA, 294 bp, Enterobacter aerogenes
atgctaaatcctcatacattgagaattatcatctggtttgtgtttagtattgttggatgtattttattttttatcgcttatggccgcagtcttaaaagggcttgctcgtttctccatgatgcaaaagtaagttgcgataaaattaaagaaaataataattctggtgattatgtagacgcacaccaaaggtataaagtctggaaaaatgaagttgctagtataaaacggcagcgaacatactgcctcttagccacccctggaatcctggccataatcgccatgattttctggtga

SEQ ID NO: 89489 - DNA, 2499 bp, Enterobacter aerogenes
atgaaaccacaatgtatacaggcagtagaggcacaccttagcgctgtcagtggcaagccggttaagcttacggccgcggctatttcgcgtatcgatgaaagaatgcatgaaggtgcaaaagtgctggcccgccgggatcgcgcctcctggcaatcaatgtctcctgatgagcgtacgattgccattggtcaatgggtgagggaacaagaacaagggcaagcagacagccaggcaaggagtaaagttcgccagctttccgctattgtcgatgcagctaaaaggcttgatgcgatggcgggtgccaggccagacaaagcagggaaatggagtaaatctctgatcgatgtactggagggcgtagataacaccttgcgtggagcggagcaggtcgcggtaagaggattcggcgatatgctaaaagcggccagagtcgggccgtggacgatggattttggcaataagcgcagcgatgctttctttgctgatgtcgtgcgcgaaatctacggtaccgatacaggaaatgctaccgctaaaagctttgcgcaaaagtggtcggccaccatggacggttatcgcgaggcccgaaaccgggctggtggaacggtaggtaaactggataattacgctccacaatcccatgatgctacggttatgcagcgggttggtaagcccgcatgggtttcttttatgatgaagaatctcgatcgggagcaatatcttagtgaaaccggcactcgtctcacggatccagaacttgagagcgtagtgggaaaaatgtacgactccatcgtaactgatggcgcaaataaaattcagcttgatttacaaggattggctgagggggcgcccagcagttttggaagcgccaacatcgcgagaatgcttaatagcagccatagagagattcatttacgagatgctgatgccgtcatcgcttataacaatcagttcagtgatcgcgctctgggtgcgtcattctttagccatctaaacggcgccgccagagatgtagcgctcattaatgagatggggccaaaccctgcgcttactttcgcgacgttaaaagatacagcagcgaagcgggatagccagatgcctggggccgtttttgaaggcgatggtagtgtcaaaggaggaaaccggggagcattcggccccgaggcttactttcgtcaaataatgcgtaataacgcagatttcaccgattttgatcgcattagtagcgcgttaactgcgtaccaggctgcaacaaaattaaccagcacagggctacgctcagttttccaggacacgccgggtatgcttctgaatatggctgatgtgggtcagttgcacaacattggcactgtactgcgtacagccttccgtccaaaagaagcggctcagttcgggattggtgctgaagtggcggtacgcgctgcgcgtgaaggtgccgaaagaataatggcacaggggcgttttaacctggctaacgcccttagtcgatacgctcaggccactatgaaatacacgttgcttgacgcctggacgaacgcggcccggcgagcggggcagacctcgcatgcactggcattaggtgaatggtcacatctgccttggagtaagctggatagtagccagcgcgggctattgaataatgccggtatcactgaaggtgattggcagcacatcatgagcgtcccccgcaagaaactacgcgggcaagatatacacgatgtgtctgatgtatctgcgttagggctttcccccgatgagactatgcgcctgcaatctcaaatgatggggtttatcagaatgggcggcgatatcgttacttcagagcataaccttacggcacaaacattaatgagtgctggtgggcggactaatgccttgaccaaacaggtaatgctttttaaaaatgctggtgcgatacagaccgcgcacatgttggatcgtcttagtcgtaaatctggcacaaccaaagttggttatgttgcggcgacggctgcactatccgcaagctttggttatatggctctggtagctcaggcggtaaccagcgggcagaatccaccgccaccagatgatatacgaaccattggtaaggctatggccgtagctggtggctttgcgatggttcaggatctgattaccagtatgtacgatgctgttagtggggataacagtggccacagttcaagtgctgtacccatttttggtgatcttgcaacgttgggtaaaattgcctttactgccccaattgacccacagaaagccgggtatatggctatcaagtttggtcgccagcaaattgctccgttgaattactggtatacaaaggcggcggttgatcatatgtttttcaacgatgcggccgaagcgctcaatccaggctatcagcgaaggcttagaaagtatgctgatcagaaaggtcaacagtatttctgggatccatctggagacctagcggcaccagaaatgggatactataaaaaagaattcgaatttggtaattag

SEQ ID NO: 89490 - DNA, 1329 bp, Enterobacter aerogenes
atgagcatactctttaatccggagctggatagtgctcttaacgccaacggtaccgaaagcgttaaagatattgatgcaggattgtttcaaggggttggtcgaggcgttagtactgggttttctaacgcaggcacgtcactacagcgcattggcttaaccacgctcggccgcgggcagatgcaagtcgccgcagctcagatgcaggctacagcgaatatcactggtaacgaggcccttagtaatgccgctcaagatgttttaagtgctcctgaacctacagaggaccagttaccacagtacaaatcgttcgatagcgatcaggtgggggcggttggtaccattctgggtggacttgttcagcaatcgccatcattagcattaatggcggtaaaccctgtggcgggcgtttccgttgctggggcgcaagggtacacggaagctcacgcagaaggcgcgagattggggcttactggtgaagatctggaagactattcagcagttggtggggcggctatggcggctggatctgccattcccggctttacaggcgtgggtaaaggtgcggttttatacggctcacgcttccttgccggcggggtggttaacagtatcaccggtgaggtcgatcgctgggggcgcgcagaaattcttgatagcgcaggttttcacgatcaggccagacagatgcgccaggctgatgccgccagccgagttactgaatttgtgctcggtggcgcgtttgggctactgggtggcggtcacagaaccgaaacaggaaggactggtgacttagaacgagggataaccagtattcatgaagatgcagctaccgctcacattattcatgataattacgtaacggaaactgccccgggtctctctgctgatgcgagaagcgaggcggggcatgtggcggctatggactccgctatcgattccgtaaatagcggacgtggcgtagatgttacagatcacctgacgggtgatcgtacgtttatcgttcatggcgatattgatgcaggtaacgttgcccgccaacagttggcgggtgattcttcgaaacgtattgatgccgtagtgcaggcagctgaccggcaggcaatacctgagaaagttaatagctattcaccaggcgttttaagtgatgcaaccgatcagcctttccagcttctacgtgaacaaatggatgctgtagcagaaaaccatccggagcttcgtgatctcgttgcacagcacattgataactttgaagccgaacataccaccgcacgtcgtaatgcagagctatatgatgtagctgctgcctgcgcccttaaatttggatcctga

SEQ ID NO: 89491 - DNA, 1956 bp, Enterobacter aerogenes
gtgaaaattccaacaggtaattttggcaacgttacgccgcaggcacagccaacacgcgtagacgtagttaacgcaggcgcagtaggtgctgctgttaagggattagcggatgacattcatcagcaggcagacgctattgttagagccagagcgggcgaaggacttctggattaccagataaaaattaaagatataaacgaaaacatcaggcagggcgtcgaagacggaaccattaaagcagaccagattgataatatttataaaacagctgtatcaaagctggagaaaccaaattttggaggtcttgatctcgcaggaatggaagttgcgcaacgcggcatcaaacgttatgaggctgacggccatgctacggctcagggtctataccgtacagcgttaaaaatagaagcaaaagatcaggtcgatactcaacttgaccaattgggtaagttaacaaattacccagatgctgatatcgaaaaaattaatggtatgtccgcggcattggatactcaaggccgtttagcttatggcgaccaatgggccaaagttcggcagagttggatagacaaaaactggtttaatcaggcgcaacaacgcttaatgtctgcccgtaatgatggttctgctctctcagctcttaataacgaattgactggtgaaaaaggtttttatgtcgataagctcgaccccgagaagcgtaatgcgcttgtaaatcaggctatggggtatcaggctcgcatagaggccagagcaatagctgcacaaaaccatgctgatatgttggcaatgcggagagagaacgcggctatgcatgccagtaccagtatgcaaatgcgtattgctaacggtgaaattcctacggatcaggattggaataattatttaacttcagtatcgggaaccagtcaggatggtaccgccccggttctgcggtcagcgatgttggagacccagcgtctttacagcctccctccggagaaagcacaagcagaagtggatagccttgcgttatcgctgaagaaaaacggtggcagtgaaattcagtacaaagtgcttaatgctgtacaaagcaatatcgatcaccgccgtactcagctacagaaaaaccctcaggcggtttttgcaatggattccggtacgccgctggagccgctaaatccccaatcggcattacaacagccgggcgattggggggctggattagtccaacgacaggccaactctgacgctattactcagaaatatggagccacagcgggaaagaatctgctgacaaccgaagagctagggaatgcgaaggatgcctacgaaaaaatgtctcccgatcagcggatccagttttggcgaaatactcaagccagcagcacgccggcgatcgcctcacgtttagctagggagattggcggcgatgctttgcaggtttctgctgtggccgggcttgccaacaacccagccgggtacaaaaccgcgctggcggtggaaaacggttcgcggcttttaaatccaattgatggagcacctaaagtaagactgcccgcaagctttgatctggacgtagctgatgccataaaaaaacagtatcccaccctcagccccgcgcaggtacaacgtcttattccggtagtaagggattaccatatcggtacaggtgggtcccccgataagacaccaaaagctgaagcattacacgaagttataggcaagcctgtgaatgtttacggcagctatgcaatagcccccgcgggcaccgatgaaaacacctttattgatgccttaaaaataggggtcaaccggttgggcgacagcgctcaggatgtaaaaaatggcctaagtcagggcgtgtacggctttgtctcggattctgatggtaatcaggtgctgatcaacgctgcaacccaacgccgggttgttggaaaagacgggcgcccggtagtgatcgaggtgggtaaatga

SEQ ID NO: 89492 - DNA, 489 bp, Enterobacter aerogenes
atgtgcactggcgtagaaattgccctggtggcgtccactgtacttgccgctggcggcgcagcgtatagcgggcagcagcagaaaaaaatggcgaactatcaggccgctcaggcggaagccgatgcagaggcgagccagaaagccgcaagggtggaagccgaccgtatccgtaaagccgggcgagaacaggccgcagcggccaacgcttcgctggcggcgtcgggcgttgaaaccggcgaaggtaccgcgctgcgcattacttcgggcattactgaagacgcagaacaggacgctttccagaccatcctcactggaaataaccagggggccaggctcaatgcacaggctcaggccgaccggatcagcggaaagaatgcggcgatggcgggaaacatcagcgccggtagctcacttttgagcgcaggtgggacggcgtacagcggctggaagtctgccaaggcaggtaaatacggattatacgcggagtaa

SEQ ID NO: 89493 - DNA, 453 bp, Enterobacter aerogenes
atgatgattcgtaacgccactgccggggatatcccggcgcttatcgagctgggaacccggatgtatctcgagtcccgttactcgcaaaactcgccgtttgatgcggataaatgcgcagagctggcgcagagcctgatttattcgccgtctggttgtgtactggtcgctgaaaaagacgggcaggtgatcggctggcttggcggcggtgttgccgagcaatttttttcccgccagttgatggccttcgagtatggcttatttgtcgcgccagaacatcgcggcggtagtgccggcccgagactggcccgcgcgtttatcgactggtcaaaagagcacggcgccgccgttatcaatatggggatcaccactggcgtgcacgcagaacgcactggccagttgtattcgcgtctcggcctgcagcaaacaggcctgctttattcgatggaggtttaa

SEQ ID NO: 89494 - DNA, 1995 bp, Enterobacter aerogenes
atgcgcgccaatctgattaaaaccaacttcaccgccggagaaatttccccgcgtctaatggggcgtgttgatatcgatcgctatgcaaacggcgcgaagacgctggaaaatagcgtggtcgtggtgcagggcggggtaatgcgtcgccccggctcgcagttcgtagcggccacaaagtacggcgataaaaaatcccgcctcattccgtacgttttcaatcgcacgcaggcgtacattctggagtttggcgacggctatctgcgaatttaccaggatggtaagcaactggtgaacgacgataacacgccgtacgaaatcgccagcccgtacacctctgacatgctgccatcggtaaattacgtacagggcgctgataccatgtttctggtgcatcagtccgttaaaccgtaccgcctgcagcgacgcgggcaaaccgattgggtactggaacccgcgccgtttatcgttgaacccttcgacgaagtgcgagacacgccgcagaaatggtgcaagccatcggtgaaagaattcgtcggctcggaaataacgctgaccctgagcgatgacgaaccgccagaagatagcgaagacccgccgccgtttactggtgatggttgggtgcctgaagatgtgggctcgtacgtcaggattaacagcggtctggtgctgattaagagcgtaaccagtgcgcaggtggccatcggtaccattcgcaccgatttaagcgcaacgcaggcggcatcgccgggcgcatggactcgcgaggattccgtctggacggatgaatttggatacccgggcgcggtaacactttaccagcagcggctggttctggccggttcgccgcggtacccgcaaactatctggtggagtgagtcgggcgtatacctctctttcgaactgggaaccgacgacgacgacgcgatcagctttacgctgtcttctgaccagctcaacccgattgtgcacctcgcgcagatgaatacgctaattgcgctgacgtacggcggcgagttcaccattaccgccggcaacgatgcggcgattacgcctaccaatatttcagtaaagaatcccagcccgtacggatgcaatgggatccgcccggtgcgtgtcggtaccgaaattatgttcgtccagcgttctggccgtaagctctacgctgtcgcctatgaccccgacagctatgtagcctactcggccaacgatatgaccgtactggcggaacacatcacagaaggcggcgtgatcgatatggcgtatcagcagcaacctgatgcgtttacctggctggttcgcaatgatggcgtaatggtgacgatggctatcgatcgggcgcagaacgttgtcgcgtggtcacggcagatcaccaacggtgcgtttgagtccgtagcgactattccctcagcgactgacgatgtggtgtacgccattgtgcgccgtacggtcaacggccagaccgttcgctatgtcgaaatgttcagtaacgccctgtacaccgatgcagccgtgacgggctccagcgatactggcgcaacgacatggggtggcctgtcgcacctcgaaggcgagaccgtcgatattgttgcagacggttctgtgatgccgcaggcggtcgtatcatccggccaaatcacgctatcgcgtaaagcctacaaagtagaaatcggcctgcacttcgaaacgaccattaccactctgacgcctgaagtcgctacatcagaaggtaccacgcagaatacccgcaagcgcaccagtgaagtcactatgcgtttcctccaaaccactggcgccgagtgcaatggccaggtgatcccgttccgcacgttcgggccaaaaatcctcaaccagccggcgccgttgttcaccggcgatcactactggggaaaactaggctgggagcgcggagaagacacgctgactattcagcagcgccagccgctgccgttccaccttctcgccattgtcatcgtatttaccagcaacgggggctaa

SEQ ID NO: 89495 - DNA, 564 bp, Enterobacter aerogenes
atggctgacagtatttctatctgctctaacgcactgctggcactcggtgctcacccgattaacagtttcgacgaaaacaccgatcacgcccgcctgtgctcaaacctttatcccaccgtgcgcaataagctgctgcgcgcacatccgtggaactgcgttgtaaaacgtgtggttctctctcctgtcagtacagcgccggtattcggtttccgctttcagtttgcattacccggtgatcttctccgcgttctgtccgttggggaaccttgcgacgatattccgtaccgcgtcgaaggcaaccggctactggcgaacgtgcaggtactgaagctgcgttatgtgttccgcaacgaagacgaatccacctgggatgccgcgctcgttgatgtggcagaaatgatgatgcaggcaaagctggcctatgccgtcaccggctctaccagtctgcgcgatagtctcgcccaggaatcgctggtactgctgaagcaggcgaaggcggtggatggtcaggaagacccgccggaagagcttggcggctatccaacgtacgaatcgaggttctga

SEQ ID NO: 89496 - DNA, 912 bp, Enterobacter aerogenes
atgtcatttgataccgctaagaacatgatcaccgctgcgtttatccagcagttccatgattctttcgaaattgccgcacagcagaaggattcccgcctgcaaggtgctgtttacgaccgcggcaacatcaccggcgcgtcattcaccatcaacgatatgggtaccatcgaaatgacccagatcaccgagcgtttcggtgataccgtctgggatctgcctgatgccggcacccgtaatgcgctgatggccgactatggcgtattcgtgccggtggaaaagcgcgacctgcgcaaactgctggctgacccgcaggggccatatttgcagctgacgctggccgcatccaaccgcaaaaaagacgacgttatctatcgtgcgctgctggatgacgttctgcgcaaaacctccaacactggcgcgtacgctccggttgctctccccgcatcgcagaaaatcgttgctggcggtaccgggatgaccaaagcgaagctgatcgccgcaaaagccatgttccgtcgtaacgagtgtgacgagcagaacggggaagagctgtatatcacctacaacgccgacatgctgacccaaatcctcagcgataccacgctgaccagcgccgactttatggcagtgaaaatgctgcaggaaggcgcagtgtctggtaactggctgggctttaagtggctggcctatgaaaaactggattctgctgaagcaggtgatccagcggtcaccaccaaaaccgcggttgcctggtgtaaaaccgctgtgcatttcggtaccggcgaagagtacaacgtcgatatcggcccgcgccgcgataaaaacaacaccattcagatttccgtcgatgcgtcctatggcgcaggccgcgcagcggaaaacaaagtcgtcgccatcgatttcgtagcataa

SEQ ID NO: 89497 - DNA, 849 bp, Enterobacter aerogenes
atgtggaagattaaacacttattcatgaacgccgagcagggcgccgaagcgccagcaggcagcacagggggcaatgatggtggcaatggcagtagtgctgaaaatccgggcactggtaatcctgctggtaattcactactcagcaccggcgcgggcgaacagggcgcgaatgactggatacctgaaaaattccgcgttgtgggcgaggacggaaaactcagtattgaaagctcagcccgcaaactggcggagaattactctctccttgaaaaacgcatgggcagcggcgatgcgccgccaaaaactgctgatgactatgccccagaggtaaaggccgaaggcttcaactgggaagaattcaaagctgacccacgcatgcagtcgtttatgaaatcggcgcacggcaaggggatcaccaacgaccagatgagtttcatcatcagcgagtatgcgcaaatcgccccgtcgctggtcaacggtgcggcggaactggatgctgaatccgctaccacgcagctgcgagaagtctggaagacagacgccgaatttaacaagaatatcggcctggccttccgcgcattcaattccctgaccgatgaaggagatcgcggccgcatcgatgaaatcggcaataacccgatggtgatccgcatgctggcgaaaatcggcgcggaaatgcaggaggacgcaccggcgggcgccgacagcaacccggcagagcagcagaccatccgtgacctgatgaagtccgaagcgtacatgaatccgaagcataccgaccatgagcgcgtatctgcacaggtgaaagcgtactaccagaagcgttacggcgatcaaaccgtagcgtga

SEQ ID NO: 89498 - DNA, 234 bp, Enterobacter aerogenes
atggctacaaaacaagtatcaccggcggactacaaacgcattttcgaggaaatgccaggcgggccgcaggtgctggatgaattaacgcgccgatttgggcgagcggcgtacgtccccggcggcaccgagggcgaccgcgaaacctgttaccgggccggacaacgtgccgtgctcgatttcattctgatgcaaatcaaccgtgcagatggagtaaacgacgatgtggaagattaa

SEQ ID NO: 89499 - DNA, 1623 bp, Enterobacter aerogenes
atggatgaactcgccgtaaagctggttaagcgtgccgatacgctgaaagccaaccgacaggtgcacgaaagcgtctggcgggaatgctacgactacacctatccgctgcgcggcgcggggctatccgatgaggtgctggacgcacagagcgcaaaatcgaaggtggcacggctgcttgacggcacggccaccgacagcgcccgtatgctggcgtctgctctcatgtccggcatgaccccggcaaacgcgcagtggctgaatctcgacagcgaatcactaccggatgatgccgccgcgtggttgtccacctgcgcaacactggtatgggaaaacatccacgccgccaacttcgacgccgaaggctatgaggcgaatctcgatgtggtgtgcgctggctggttcgcgttgtacatcgacgaagaccgcgaagagggtggattttcgttccagcagtggccgctggcgcagtgctttgtcacatccacccgccgcgatggcatcgtggacacgatttatcgccgttaccagctcaccgcagagcaggcgattaaagaatttggcgcggataaggtcagtaagaagattcgcgatgcggccgccaaaaagccggatgacaaattcgacttcctgcactgcatttttccgcgtgaaaactacgtggtgaatgcgcgcctggctaaaaacctgcgctttgcatcgtacaacgtggaagtgagcggcaagctcattgtgcgcgaatcgggctatcacgaattcccctgctgcgtaccgcgctggatgaaaattcccggcacgccgtacggtatcggcccggtatatgacgcgcttccggactgcaaagagctgaacgaaacgaagcgcatggagaaggccgcgcaggatctggcgattgccggtatgtggattgctgaagacgacggcgtgcttaacccgcgtacggtcaaagttggcccgcgccgcatcatcgtggcgaacagcgtagacagcatgaaaccgttgctcacaggcgctgatttcaatgtggcctttaccgcagaagagcgcctgcaggcgtctatccgcaaaatcatgatggccgaccaactgcagccgcaggacggcccggcgatgaccgccaccgaagtacatgtgcgtgtggcgctgatccgccagttgctcggcccggtctatggccgcttccaggctgaatacctgcaaccgctggtagagcgctgtttcggtctggcattccgtgccggtgtattcccgccagcgccggatagtctgcaaaacgctaatttcaatgtgcgctatatctcgccgcttgcccgcgcgcagcagctggagaacgtcacagccattgaacgccttggcgcgaacgtggcgaatctggcgcaggtatcacccgatgtgaccgacctcgtagacaccgacgaagcaacacgcgtgatagcggatgcgctgggcgtaccggcgaaagtcattcgctcgtctgatgccgtcgaacaacttcgccagcagcgccagcaggcgcagcagcaacaagcagggcaggcactcatgatgcaggcaggtagcgaggcggcaaccacagcagggcagcaggtgggcgcagcgctgggccaacgagtagcggggggctaa

SEQ ID NO: 89500 - DNA, 444 bp, Enterobacter aerogenes
atggctcgaccgaaaaaaaacatcgagacgccggggcaagaaaaaaccgtgacggatgaaaatacgctagtggaggaattgcagttgctgaattccgaaaccgcgccggttccggttgccgtggaggtaaaagcctcagcgccagaaattcaacagcgtgtagcgcagctgcttgatggtaccgctcttgcagaacgtaacgcgatccttgccgctctcaattctcagggggcaacaatcatcgctcgttttgatgaactggattttatttccatcaatggccagcgccttaccgacaacctcgaatttcttaccctcgtacgcaaagccactgatgtaagcaccggcggtgcgggcgcaatggtgacgaacgaagagggcaagccacagccggtacgtggcgcacctgtattaaccgaacacggctggcatgtgccgggctaa

SEQ ID NO: 89501 - DNA, 297 bp, Enterobacter aerogenes
atgccgctggttgccaccttccgaacagactggttccgcgttattaccgacctgaccagaaaaaacctcaccactcagcaaatcgccgatgaacttggcgtttcgaaatctgccgttctcggttggaaatccggatcagaacctcgccacggtcacggtgaggcgctgatcgctctctggtgtctggctaccagctcagaccgtaaaaaactccccactgtgctttatcggcagtggtggacgttccgccgccctgtttttggtcgggaaactgaccagaagggcaacacacaatga

SEQ ID NO: 89502 - DNA, 303 bp, Enterobacter aerogenes
atgaccaaagacgataaacgctggctagaagacgttgcatcactgggttgcgtcgtatgcagaaatcttggctacggcaccacacctgcagaagttcaccacatccgcaaagggcagggcatagcccagcgcgccgaccataaaaaaacactcccgctttgcccgccacatcatagaaccggcggacacggtgtagccatccatgcagggcaaaaaacgtgggaagaaaactacggtaccgaatctgaattagtcgatcaggtaaccgctgaggtgggggaattacgtttatgcagaatttaa

SEQ ID NO: 89503 - DNA, 597 bp, Enterobacter aerogenes
atggcgcagtattcttttgtaaaagcaccaggcaatgtattaattccggcgacgcctgacgcgcgcgaatttttagaaaaaaaagtccgaatgggcggtattttgtatgcggattttaagcaggcaagaaaccctgcattccaccgtaaatttttcgccctcctgaatctgggctttgattattggcaaccgtccggcggtgcaatatcgccagccgataaaaaactggtacacggctatgtgcagctggtggcccactatgccgggcatgccgacactttgcaggaactggcggatcagtatctacgcgatgaagcagaaaaacgtgccgggaatatcagcgcggtaaaatcgtttgaagcattccgttcctgggtgactatcgaggccggtttttataccgaataccagatgcctgatggcactacccgcaaagaaccaaaatccatatcgttcgcaaaaatggacgatgtagaattttcccagctgtataaatccgtattagacgtcctctggaattttattttattccgcaccttcccaacacagcaggcagcagaaaacgccgcctcacaattattcagctatgccgcgtga

SEQ ID NO: 89504 - DNA, 168 bp, Enterobacter aerogenes
atgctcgtctggctttacgtcgcggagctttcttgccataccacttttgcaccttatcaggacgtcgccatcatcggggagaaggactcctgcatcgttcttgtcaaccacaaccccaaatccccccgcaaattactgtatataaaaacagtgtttatactatcataa

SEQ ID NO: 89505 - DNA, 1224 bp, Enterobacter aerogenes
atgataaaatggtatcgcttcaaaaacttccactcgttcaaagacgagcagctcgtagatctcactcttaaggcaaactcttcagagtcgtcactggacaaacaatgggtggatacgaggataactaaagtattagccgtaatgggtgctaatggttctggcaaatcaaatatgcttaaaccactggcttttttaagctggttttgcagtgaatcatttaaatcaatggataattccgaatcactgcctatgtatccacatatttgcaatatggatgaaccttcggaaattgagatttgctttgttgatagcaggctcattgatggcgaaatgaatcatgtcgaatttaaatactttttgaaactcgacaaaaaaacggtattacatgaagagctaaaatacaaatcaagccgtttattctcatctattttttatagaaaatatgatgcaactacaaatgaatataaagtaaaaagtaacacaaatgacttccctgtatcagaactaagaactgtgcctaaaaatgcatcagctatatcatacttcagaaggaaagatgataatataacagccggtgcaatgcattacattttctatagcattgagaataatttaaatgtatttggaaaatcaaactttaattatggtaaagtcttgagtgcagcagaatattaccaccatgaacctgagttatttgaaaaggcaaaaaaatacttaacaagaatggattttggcctaaaagatataataataaaagaagatgaaatcatggataaaaagacaggagagttagagcagaagtttatgccctatggcgtacatgagcataatggtgaaacatttaaaatccctttcatcatggagtccactggaactcaagcatgcttctattttatttataaattaatatctgcattacattttggtggagttgctgttattgacgaactagatagcgacctccatccttatatgattcgcgaattacttgatatgttcgcaaatgagggtatcaaccagcattcttcacaactaatatttagctgccacactgcagaaatacttaaatacgtaaataaacataacatttacttggttgaaaaaaatgatagcgttagtgaagcttggagacttgatgaaattcaaggcttgagaagtcaagacaatctttactctaaatacattacaggcgcattaggcggcgtaccaaacattgaaatttaa

SEQ ID NO: 89506 - DNA, 525 bp, Enterobacter aerogenes
atggcaaaaaggaaagtggtacgccgaagcgtcactaaaaccctattacttgttggagagggtcatgctgaaaaagcattcctctctcacttaaaatcattattttccaatggttcatttaaagtatccatagtcacagctggtgggaaaggccccgaacacgttatgtctcatgccatatcttgtaagcgttgcgatggctatgattttgttattgtgctattggatactgatatcgtttggcccaaagcaaatatcaggaaagctttaagcgcaggaataaaccttgttggttcagaaccttgcttagaggggttacttttagatgtacttggtaagaagaaaggtacaacaaatcaaagttgtaaagctcttcttcacccattacttaatgggccatgcacagacagggatagctatgccactttatttactgcagatgttttagactcccctaattgtaaaaaaatacaattaatagttgatatgcttagaggcaaagaagaaaaatcagttatgatctaa

SEQ ID NO: 89507 - DNA, 594 bp, Enterobacter aerogenes
atgaacggaaaatataccctgatttatgcggatccgccgtggacataccgagataaagccaatgatgggaaacgcggcgccgggcataaataccagaccatgacactactggatatctgccgtttgccagtttgggaactggccgccgataactgcctgctggctatgtggtgggtaccgacgatgcctctcgaggctttgaaggtggtcgaggcgtggggcttccgtctcatgacgatgaagggatttacctggaataagtgcggaagccggcagaccgacaagctcattatgggaatggggcatatgacgcgcgcaaacagcgaagattgtctgtttgccgtgaaggggaatcttcctgcccggattgatgccgggatcatccagtctttcactgcgccacggctcgagcattccagaaaacccgactgcgtgcgcgaaatgctggtgcagctgctgggcgacgttccccgtattgagttattcgcgcgacagtcaacaaacggttttgatgtttgggggaatcagtgtgaatcgcctgcggtggcattactgcctggatttgcggaatatattgtgaatgcgtgcgtataa

SEQ ID NO: 89508 - DNA, 150 bp, Enterobacter aerogenes
atgaagcgattttttaaaccagacctggaacattcaagccgtctcacactgctgcttttcgcgctggcgtggaattttgtggcgctggccgccgcaatcggggtggccggtttaggtatttacctgatcaaccgatggatgggcgcatga

SEQ ID NO: 89509 - DNA, 234 bp, Enterobacter aerogenes
atggccgggcaatcagattacctgccgcccggcctaccgctcaatcgcgctaaatggccgcaggagtaccagctcaaagagcactacgacatgcgcgcctcagcactcatacgacagttgtttgagaagaaagtcactcgacaggccatcgtagagcagattgcagcgacgccggaaagctaccgggcgtttttcaaagaacgattaaatttttggcgggagaaacgaacatga

SEQ ID NO: 89510 - DNA, 669 bp, Enterobacter aerogenes
atgaccacgaatttaaattacccaaaaccagttaatccggatgatggctgcaactggttacccgttattttatggcgcatgaacgccggcgcccgcgcgcgtagtcgttctgtatttgttgccgcaccgcgaccagaaccagtgccggggattactccgcaaaagccaattaaacgcgaagcgccgctgccagcagtttcaggccgtcgccgtaaaacccatctcggtaccgtgatttattccaaaggcgaaaaaaccgtgcgcctgagcgaaggtgtcaccgtctggtctgccggcgctaatgagcatttcgataaaaagaccggtcagcgtgtcggcggtgctggccgtcatcgcctggtactcgacagcgttcgtccactgcttgccagcgacgatcaaccgggcgccgggaaggttaccgcgcagcagctggttgccgtgatgaaaggtaaaactctttcttatcagaccattctcgcccagctacagaaacactatccagaatgccaggtaacgattaaagaaattcaggatcgtgtattcagcatgttcaattcgaactatgtcggcatcactcgccatgatgatacgccagtggttaatttcacgcttaacagcgtggatccccgttattacgtcgagtcagcgaaaaacaagagggtgtaa

SEQ ID NO: 89511 - DNA, 1389 bp, Enterobacter aerogenes
atgactccgcaggaactggaagcgtgcgtgctggccggcctgctgaacggcggtgccagcccggatgcattcgacgtaatcgccgccacgccggaagaatcgttcagtatcgggttccaccgtcgcgcattctccgaaattaaaaaacaggcgctggcgaacggccttatcgacatgctgtttatcagcgaagcgctgggcggtagcagcctggcagatttatcagaaattacgcgcatgccggccacggtaccgaacctgaaagggtacgccgggaaaatggttaaggcatggcgcagccgccgcatggcagagctactacagcagggtgccgacggcatccgacaggccaataaccaggagcagcgcgatcaggttgtcgaaagtgcggtggctcagctgctggacatgaccggcgatactggcgacgtgcagccggttcacatcagcgatttactgccaacctacatggagacggtacagaaacgcatggacggcgaagccggtacccgaaacctgaagactggcatcgacgaactggatgatgccaccggtggcattaacctgcaggatttgatagttgtcgctggccgcccgggcatgggtaaaaccgaattcgcgttgaagattgtcgatggtgttaccgctgccggcggcggggcgctgatattcagtatggaaatggccgctgcgcaaatcgtagaacgctctctggcaggctctggcaacatgtcggtgtcacgcctgcgtaatcccctagatatgcaggacgaggactgggcgcgctttacagcggccatggagaccatgaacggacgcgatatctggattgttgacgctaccgatctgacgattgagcaaatccgcgccgttgccgagacgcataagcgccgttatccgcatctcgcgatgatcgttgttgattacctcggcctgattaaaaaaccgaaggcagagcgtaacgacctggcgatcgcccacatttcccgaaaccttaaaactatggcaatgcgcctgcatacgccgacgtttgcactcagccagctttcgcgcgcggtggactcccgcccggcaggccagcgccgcccggttatgtcagacctccgtgattccggttctattgagcaggatgccgacagcatcatgtttctgtaccgcgatgaagtctacaacccggaaagcccggcagcaggcatcgccgaaattatcctggggaaaagccgattcagtgccgccggcgcggttatctaccaggagtttaaaaacggccatttccttcacgtcgatcagcatgtcggcaaagagaaaacccgtattcaactggaggcagcaaaaccacgaaaacaaccgcgtaaatacgcagagaaatataacaccgatgcattttaa

SEQ ID NO: 89512 - DNA, 993 bp, Enterobacter aerogenes
atgaatattttgccattactcgacaggccgatcgccttccagcgtagtttcattcgtctgaatattggtgtgacggctgcactgttcctgtctcaaatgacttactggactaaccgatccgacgatgacggatgggtatataaaacccaggaagaatgggaggaagaaacggggctttcccgttacgagcaggagggggcgcgtaagaaacttcgctcaattggtgtactgctggaaaaaaagaaaggtgtacctgctcgtcttttctacaagattgataatgatgttttatttcaagcgcttgtagccgcaaacaaggatgcggaaaaaccacatactggaatgcggaaaaccagcaagcaagtaagtggaaaaccagcaaactttcttacagagaatactacagagaatatatatacccctaaccccttagagggggaaggcgttgagataattctttctgatgcacaaaaagcgctggaattttacaacgagcaaaccggtacccgctgccgtgacctgaaaccgtttgtgatgatgctgacgccgaccaccacccgggcagggtacaccctggatgaattgcagttagttatccgctgggttctggccacatggcgccgccgtggcgatagcctgccgaagccagcgaacatctgccgggtaaaccgttttgatggttatctcgctgacgctgcagcatgggagatgaccgaaaccgacattgatccggaagccgttatgaacggctacaacgaaatttttgctgacgttctgcctgctgctgaactggataccgaccgccgccggatgatcgcccagcttgccgcacacatgaaaaacaaaaccacgggcgcatttttggggtatttcgaaaaattccgcgctgatgcgtcagatttttatttcggtgctaacggcggatggcgcgccagctttgactacctgatgaaacctgaaacgttacgtaaaacccgggaaggttcgctatga

SEQ ID NO: 89513 - DNA, 222 bp, Enterobacter aerogenes
atgagaacacaagaccgcatcacctggcggaacgggtttcgccggaacggggtacaagtcccgatggaagatatcgaatcgattttcgaagaacgtcgcacagctgcgctgacaatctgggagcgctacgaattacgcaaagcagtcctgcaggaagcggggctcacccagaaagaatacgaaatcgcctgccgccagctggctgactcgctggggatctga

SEQ ID NO: 89514 - DNA, 447 bp, Enterobacter aerogenes
gtggagaacctcgaggaactgaaacgagagatattcagctgggcagctgaaagcgggcaggagctggttgctatcgagataagccgtatgtggtttcgtctcggtggtaacaccggcgtgctgaagctgcaccagattgaagatgcagacggaaatgcagactggcgggccatcaacaataaccgccaacagatttttcgctggctgcgtggtgagacgaaagcggccagaactaaaacccagacgctggctaaagcgatggaagcggcactgccggcagaacgctacgcgcgcctggacatgtccacccagtatttgatctgcgtcgctatacgcgaatttgcggcggccattatcgcgttattgctcgaggccagagacggcccgcagcaagtcgcgaaggcattgcaagcgatgcgagaaacacagcgcctgaccagcgtttaa

SEQ ID NO: 89515 - DNA, 456 bp, Enterobacter aerogenes
atgagaaagaaaaccattgacgccgttgaacgcgaagcagctaaacgccttcgtgaaatctggaacgaaaaaaaagtaactttacgtctgactcaggagaaggcagcggaggtgcttggcttcagcacgcaggcgtcagtaagccattacttaaatggcactacgccactaaataccgatgccactttaaaattcgcctcacttcttggagtgaaaccagaagagattcggcctgatctggctgaaatgatgaattacgttagaaagtcaggtgagtatctagaagatcgatcagggccaggctggaagctacttagcccagaacatgcagaactcattgatttgtatgaaagactaccacagagcgaaaaagaacggcatttatctgatttaaaagagaaagtggaaggttttgatcgtttatttagagagttactagccacacgaaagcaataa

SEQ ID NO: 89516 - DNA, 324 bp, Enterobacter aerogenes
atggaagcgcttaccatccccgtaactatctacgttatggcaacaaccaatccatatctaccaacgtcttatcactcattcacctgtgacatgtcacagaaatatcctgattcgtacgtgcttgttactaccaaaacggtagagattgccattcctgctttagagcctatcgatattatcgggatgcaggttaatgcccttcgcgcgaagaaagagcaaatatctgctgatgccaacaaacagttaagcgttattgaagaccagatccagcagctgctgtgcatcgaccactctccgattgaagaaagcgacgtaccgttttaa

SEQ ID NO: 89517 - DNA, 285 bp, Enterobacter aerogenes
atggatattagaaaattgcttgaaagaattcgcgaaattaaagaccgcttagatcgcgcaaacagaattatcaatatttgcagtaacgaatgccgctcctccgggattttagctgaaggtagaaacggcgagtgctatctcaaggtcgattcatcagaaattaaagaactggcagaaagccaaaaggttcatctcgaaagcgaactaaagcagttggaagaagcaaaaaatacggcagaacgcgtgatcgctggactgctccctgaaattaaacaagacgcctaa

SEQ ID NO: 89518 - DNA, 2145 bp, Enterobacter aerogenes
atgaccatctacaacggcttattcgagccaaaaaaatcggctatcaaagactgcggcgccgtgcagctggcgatcgccgtcgaagcaccaaacaagaaaatcgccgaaagcattatcaccggcaaactctgggaatcttacccggcgaacggtgacaactattttaaaccgaagctgtgggaacacgaagaaggccagccgctgccgaccgttggccagttcgacgagctattcgcccagcaacatactttcgacggtgaaaaatgggtttccatcgccgcgaacggtaccgccggtgaggaatcaaatttacccactggtgatgatgttatcgatctgatgactgtttctcctggcgaacgctttgctgccgtcctgctgtttagtaccgcggcaattgatggccatctttattctcaggttgtggattatctggataacctgaataaccgtgatacagaactggaagaagaagatcgttttaaccttaacgttctgtgtgctctgcacaataacgaaccagttaagcacatgcatgttgaagggctgaataatcttattcagggcattttctcccattttgaaaaccagactccgggcaaagcggctatttctcaatttgtaaaacgctggcttgagaatcctggcaaacgtgaagaaatggtaccaggccaaaattcctcactcggcgccgccagcactgataccaacgttaaaatcgcgccaaaacgtggttataaacatacctatgcaacactggatcaggagatcgctgtcgccctactccctatttctcccgacgcgccagtattatcaggaaaccttcgcgatgctgagaaaatcattgcagacgagcgcgaagattttaaacgttggtcaatggcgcttcgcaccacggagcacattctcaaatatgaccgagacagtatttttggcgtagtgcagaacgtaccggcaaaagatacctaccatttccctgacagcctacgccgccacattgattcatggctggaagcaaacggccgctttgaagaaaccgagacaggatccgttaaacaaccagaggcaacgcaaaataccacctcaaacgtggtcgaaaaagcggaagcgccacagccggtggtaaccgatacccaggccaaacaggcgcgtgagacgctcaacgatatgggctatggcgtatatgcctctggtgatgcagaacagccagtagagaagttaagcgctaaagcggaaacaatagctgataacgccgaggtgctggcaaagcaaattattcatgctgaaagactgcctgacgctgaagaagtaatgaagtctgccggcgcacagagtatcggacaggacaatttagaactgtggaaacgtgtattcaaaactgatgaacggtttactaaagcctttacgcagaacggcggcggtacctcgatcaacggtacctatttaaccatgcttgccactcgcgagtttgggccaaagggaatcggctggggtgtggacatcctcgaggaacgtttcgatatcggcgcccccattacacgccaggtgaaagggaaagataacaatgcatcatgggagttagtgctcgacgggaatggaaataccgtcaacgagcagcatcacgtcgttaccgtgcgactctggtacatcctgaatggtgtgcgcggcgaggaaacggcctacggttgcacgccatacatttacggcagtaagtacgggatcacctgcgatggtgaggcaacaaaaaaatcgctgactgatgcaaccaaaaaggctttatctggcctcggcttcagtggcgatatcttcatgggcctttacgacaatctggaataccgccagagaaacaaggcagagtttgatctgaagaatgccagcgaaaccgcagaagacgcagtacgtcttcgccaggaattcgacgacaaactcagccgtgttgctaacactctggcacatggcgtgacagtgaacgaaataaacggcgtgttctcccctatcgcacgtgaaatcgatgttcacattaaggccgcacaggccaacggtgacgcgcaacatgaacgctatctgtctggccgcttgcgccgactcattacgattaaagacggccgcatcaaagaactgaataaagccgaggagaaagcataa

SEQ ID NO: 89519 - DNA, 567 bp, Enterobacter aerogenes
atgacttccacaaccgcaattgctatcgctgctgatatgtctaaactccaggcgcttcttgaaaacgaagacggttctggtctgtcagctgaaatgatcgccgatacaatggaggggctcgagctgcagctcggcgacaaactggacgcggtattcgtccacgttcgcaaccttgaaggtctggcgaaaacctgcgacgaagaagccaaacgcctggccgcccgtaaaaagtctttcgaaggtaagatcaccaacctgaagaaatatgttctccagtgcctgttggccgccggacaggataccgtaaaaacggcaaaaaacaccttcaccgcccgtaaaggtgcaatcaacgtggtgatcgataacgttgatttactcccggatgaattggtgactgttcagacagtagttgcgcctgacaaaaaggcaatcaaagaggctatcgagtcagcagaagcggcagcggctcagattagcgcagatggtggggaaatcccggaagagctcttaaaccctgttccgggcgcccatattgaaataggcgaacgttcactgcaggtgcgctga

SEQ ID NO: 89520 - DNA, 186 bp, Enterobacter aerogenes
atgctgagactatccctgaagaaaggtgatgcggttcatgtcgttttaccagatggaaccaatgcaattatcgaagcacgggcccgttgcgaactcggcatgcacttccctcgtaatatcaagattacgcgtgaagatggcgcattccgaccggaacaaaacctgattaagcgtaatcagaaataa

SEQ ID NO: 89521 - DNA, 264 bp, Enterobacter aerogenes
atgagacacgatcacgacatcatcaccagagaggaaatgatcgagctgacggggacgccacttaaatcaaaacaatgtgaggcgctgcgccgggccggcatcttctttatggaaagagcagatggccaccctaaaaccacatggggccacttcctgaacccgatcaagtaccgcggccagaaggaagatataacgcacgaaaatgacgaacctgattttggagctatattcgatggccggaaagcgaaagaatcctgccgatag

SEQ ID NO: 89522 - DNA, 1017 bp, Enterobacter aerogenes
atggccggaaagcgaaagaatcctgccgatagttggatgcccccgcgagtataccggggcaaggctgcatttgaattccgtacgaaagacaacaaagggatccgcctgagtgggttaaatgaaccacaatccgctgtatggctggcatatgaaaaagctgtcggtgaagtgacagaaagaaaaacgttccaggcgctcacagagcagtttatggcgtctccagactggcaggatttagcggcagaaaccagaaaagactatacgaaatacgcaggaaaagtattgccagtattcgggaaagttaaccctgataaaattaaaccagaacacatccggcgatatatggatcaacgtggtattgccagtaaaacgcaggccaaccgggaaaagagttttctctcgcgggtattccgctggggttacgagcggggttacgtccagcacaatccctgccagggcgttaagaagttcaaagagacagcccgagagcgttacatcaccgacgaagaatacaaagcggtttacgatgttgctccggacgtagtgcgcgccaccatggaaatagcttatttgtgtctggccagacaaagcgatgtgctggctttaactgaagaccagatacgggaaaccgggatatttatccgccaggggaaaacaggcgtgaagcaaatcaaggcatggtcgccacgcctccgcgctgccgtcgccctcgcccgttccctgccgttaaagccgggtatccgtagcctgttcgtcattcaccagaccagcggcagtaaatacactcgcgacggttttaattcacgctggcgcgaagccaaaattgcagcacaggagaagtacccacacctgcagatagacttcacatttcacgatctgaaggctaaaggtgtctctgatctggaaggaagcctcgaggagaagcaggcaatttctggtcataagaattcgagacaaacggcgatttatgacaggaaaactaaaattgtgccggttgttggtggtcagaaaaaatga

SEQ ID NO: 89523 - DNA, 549 bp, Enterobacter aerogenes
atgcaatttaatattccgacgttgctcactctgtttcgcgttattctgataccgtttttcgtgctggcgttctatctgccttttagctgggcgccttttgtctgcgcgttgattttctttgttgccgctgttaccgattggtttgatggctatctggcgcgtcgctggaaccagagcactcgctttggcgccttccttgatccggttgccgataaggtgatggtggctattgccatggtgctggttgcagaacactatcatacctggtgggtgactttgccggcagcgacaatgatcgcgcgtgaaattattatttctgctctgcgcgagtggatggctgagctgggtaaacgcagcagcgtagccgtatcatggattggtaaagtgaaaacgacggcccagatggcggcgctggtctggatgctgtggcggcctaatgtgtgggtggagtgggctggtatcgttctgttcatggttgctgcggtgttgacgctgtggtcaatgttacaatatttgaacgctgcgcgcggcgatttgcttgaacagtga

SEQ ID NO: 89524 - DNA, 1833 bp, Enterobacter aerogenes
gtgagtgatgtttttgacgcaaaagctttcctcaagacggtgaccagccaaccgggcgtctatcgtatgtatgatgctggtggtaccgtcatttatgttggcaaagcaaaagatctgaaaaagcgccttagcagctattttcgcagcaacctggcttcgcgtaaaaccgaggctctggtggcgttgatcgcgcaaattgacgtgaccgttacccataccgaaacggaagcgctgctgcttgagcataactacatcaagctgtatcaaccgcgttataacgtgctgctgcgtgacgataaatcctatccctttattttcctcagcggcgatacccatccacgactggcgatgcaccgtggcgctaaacacgccaaaggcgaatattttggcccattccctaacggctatgccgttcgcgaaacactcgcgctgctgcaaaaaattttccccattcgccaatgtgaaaatagcgtctaccgcaatcgctctcgtccctgtctgcaatatcaaattggccgttgtttaggaccgtgcgtcgccggactggtaagtgaagaagagtaccagcagcaggtagaatacgtgcggctgtttctcgccgggaaagacgatcaggtattgacgcaactgattgcccggatggaaaaggccagccaggcgcttgaatttgaagaagccgcccgcatccgcgatcagatccaggcggtacgtcgggtgacggagaaacagttcgtttccaataatggtgacgatctggatgttatcggcgtggcttttgatgccggaatggcctgcgtgcatgtgctgtttattcgccagggtaaggttctcggtagccgcagttatttcccgaaagttccgggtggcactgagttgggtgaggtagtggaaacctttgtggggcagttctatctacagggcagccagatgcgaaccttaccgggggaaattttactcgatttcaacttgagcgataaaaccctgcttgcggattcgttgtccgagctggccggtcgtcgggtgaatgtgcagactaaaccccgcggagaccgcgcgcgttatctgaagctggcgcgcaccaacgccgccgttgcgcttactaccaaactgtcgcaacaatcaacggtcagccaacgtctgcaggctctggcgacactacttaagctgccggcggtgacgcggatggagtgctttgatatcagccataccatgggggagcaaaccgtcgcatcctgcgtggtgttcgatagcaatggtccgctacgggcggaataccgtcgctacaatattaccggtattacccctggtgatgattacgcggccatgaatcaggtattacgacgccggtacggtaaagcaattgaagagaataaaatcccggacgttatcctgatagacggcggtaagggccagcttggtcaggccaaagccgtgtttgccgaactggatgtgccatgggataaaaatcatccgctactgctgggggtggcgaaggggagcgatcgtaaagccgggttggagacgttattctttgagccagaaggtgagggctttagtctgccgccggattctcctgctctgcatgttatccagcacattcgcgacgaatcccacgatcacgctatctctgggcatcgtaaaaaacgggcgaaggtgaaaagtaccagtacacttgagacgattgaaggtgttggcccgaaacgccgacaaatgttgttgaaatatatgggcggcctgcaggggttgcagaaagctagcgtagaggaaattgcgcaagtaccgggtatatctcacggactggcagaaaagatctactactcgttgaaacattag

SEQ ID NO: 89525 - DNA, 708 bp, Enterobacter aerogenes
atgggagataaactatcagtagcgttatccctaattctggagattattcctttgatcaacgtacttcttgttgatgaccacgaactagtgcgcgcagggatacgacgcattctggaagatataaaagggattaaagttgtcggtgaggcctgctgcggcgaggatgccgttaagtggtgccgtgcgaatcctgtggacgtcgtcctgatggatatgaacatgcctggtattggggggcttgaagcgacgcgaaaaatcgcgcgctccattgtcgataccaaagtgatcatgttgaccgtgcatactgaaaatccgctgcctgcgaaggtcatgcaggctggcgccgccggttacttaagtaaaggtgctgccccgcaggaagtggtaaatgcgattcgttgtgttgcttcgggtcaacgttatatcgcttccgatatcgcccaacagatggcgctcagtcagattgaaccggaaaaaacggaatcaccgtttgccagtttgtctgaacgtgagttgcagattatgctgatgatcactaagggccaaaaggtcaatgagatctcagaacagttaaatctgagtcccaagacggtgaatagctatcgttatcgaatgttcagcaaattaaacattcatggcgatgtggagctaactcacctggcaattcgccatggcctgtgcaatgcggagtcgttagcaagtcagtga

SEQ ID NO: 89526 - DNA, 225 bp, Enterobacter aerogenes
atgagcacaccagatttttccactgcagaaaataatcaacagttggcgcaggaagtctcctgcctgaaagccctgctgacgctaatgcttcaggctatgggtcaggcagatgctggccgcgtgattattaaaatggaaaagcaaatcgcgcagatggaagatgaggctcaggctgccgtattctccagcaccgttaagcaaattaaacaagcttaccgtcagtaa

SEQ ID NO: 89527 - DNA, 687 bp, Enterobacter aerogenes
atgctgcaacaattccagtcaactcatgatggggattcggtttataaccttctccaacagcaaacagaagaactggaatacgactactacgcactctgtgtgcgccatccggtgccttttacacgcccgaaactgacgctgcaatcaacttatcctcaggcctggatgtcacattatcaggcggagaattattttgctattgatccggtattacgcagagaaaattttcttcgtggacatctaccatggaatgaccagcttttttgcgagaccccagaattgtggaatggcgcgcgcgatcatggtttaaataaaggcgtgacgcagtgtctgaccttgccaaatcatgcgttgggcttcttatcggtttctgctaaaaatgcgcagccgggtccgtatcacgaggacgaattagagttacgtctaagaacgctgaccgagcttagcctgctggcgttgctgcggctggaggatgaaatggttatgccgccggagatgaagtttagccggcgcgagctggagatcctaaaatggaccgcagaaggaaagacctcggcagaggtggcgatgatattgtctatttcagaaaatacggtcaattttcatcagaagaatatgcagcggaaatttaacgcccccaacaaaacgcaaattgcctgttatgccgtcgcaacaggattaatttga

SEQ ID NO: 89528 - DNA, 1359 bp, Enterobacter aerogenes
atgctctcgccgtcctcgtctatgcagctcttttcccggatgtggcaagactttagcgcaagctctgtcccgccaatcgatttccgccacccaggggctttatcttcttgctttgcagtcagtgattttgctgccgcctcaatggggatcgccgccgcttaccttgcccgcttatgctcaacatccgccacgccgagagtggatcgccggctggcgtcatattggttttcagccagcgccaggccgcataatcgtccagcccagcagctttgggatccattagcgggagattatcaaacggaagatggatggatccgactgcatacgaatgccccccatcacagactcgccgtggcgcagattctgggacaacatgcgacgcgacaaacgctggctcaacaagttcgtcaatggcactcgcatgcgctggaacaagcggtggtggaaaatggcggttgcgcggcggcgatgcgcagcgcggaagagtggcgagcacatccgcagggcatcgccgtcagccggcaaccgctgctgatagaagccgattcaccgccggggccgtcggttgcctggcccctctccccctcccgccctttgctcggtatcagggtactggatttaacccggattattgctggccccgtcgcgactcgttttctcgcagggttaggcgctgatgtattacgtattgatcctgtcgactggcaagaaccaacgctcgaagaagagattacgctgggtaagcgctgcgcccgattgaatataaaaacacaaaccgataagcaacgtttaatcacgttaatctcgcaagccgacgtcattgttcacgggtaccgcgctgacgcgttggatgcgctaggtcttgattgtcataccagagccgcgttatcgccgggaattgttgatgtttcactaaatgcctggggatgggaggggccatggagaaaccgacgcggtttcgacagtctggtgcaaatggcctgtggtatcgctcatgccggtcaacgctggcgcgacgcggataaaccaatcccgcttccggtacaggcgttagaccacgcgacgggctatctgatggctgcagcagtactaaaagggatagcgcagcgcatagagagcggcaaaggttatcatgcgcggctgtcattggctcgcgtcgccgccagcctgatggagtggccaggcgcacgacatgagatgcctttcacgccgctgcaacgtcgtgattttcaatctgcgatggagtggtcgacatttggtctcgctgaacggctgacatttcccatacgtctggcgggtacgccgattatctggtcacgaccgccctgccggttagggtcggccgcgccagaatggtaa

SEQ ID NO: 89529 - DNA, 753 bp, Enterobacter aerogenes
atgagtgcgattgaagtcaaaaaactggtgaaaaaattccacgggcagaccgtgctgcacggtatcgatctcgaggttcaggaaggggaggtcgtggcgattatcggcccgagcggctctggtaaaaccacgctgttgcgcagcattaacctgcttgaacaccccgaaagcggtaccattcgcgtaggcgatgtgactatcgatacttcgcgtagtattggccagcaaaaagggttgatccgccgtctgcgacagcatgttggctttgtgttccagaacttcaatcttttcccgcatcgtacggtgctggaaaatattattgaagggccggttatcgtcaaaggcgaagataagaacgaggccatttctctggcgcgtgaactgctggcaaaggtagggttgtcgggaaaagagaatagctatccgcgtcgtttatccggcgggcagcagcagcgtgtggcgattgcccgcgcgttagcaatgcgcccggatgttattctttttgatgagccaacttctgcattggatccagagttagtgggcgaggtactcaacaccatccgtcaactggcgcaggaaaagcgcaccatggttattgtcacccatgagatgagtttcgctcgcgatgtcgccgaccgcgccattttcatggatcaggggcgtatcgtcgaacaaggtaaggccagagagctatttgctaacccgcagcagccgcgtactcgtcagttccttgagaaatttttaatgcagtaa

SEQ ID NO: 89530 - DNA, 669 bp, Enterobacter aerogenes
atgcaagaaagtatccaactggtcattgactccgcgccttacctgttaaagggcgcagtttttacgttacaactgagcatcggtggtatgttcttcggcctgctgctgggatttatcctcgcactgatgcgcatgtcgtcaatctggccggtcagatggctggcgcggatgtatatctctattttccgcggcaccccgctgattgcccaactgttcatgatctattacggtttgccgcagttcggcattgagctggatccgattccggcggcgatgattggcctgtcattgaatacagcggcctatgcggcggaaacgctgcgcgcggcgattgcctctatagacaaagggcagtgggaagccgccgccagtatcggcatgacgccgtggcagactttgcgtcgggctattttaccgcaggctgcccgcgtggcgctgccgccgctctctaacagctttatcagccttgtcaaagatacttcgctggcggcgacgattcaggtaccggaactgttccgccaggcacagttaattacctcacgtacgctggaagtatttacgatgtatctggccgcctcgctgatctattgggtaatggcgaccgtactatccaccttgcagaattattttgaaaatcagctgaatcgccaggagcgtgatccaaaatga

SEQ ID NO: 89531 - DNA, 987 bp, Enterobacter aerogenes
atgtcactacaaaatttaacgcgttttccgcgcctggaatttattggcgcgccgacgccgctggaatatctaccacgcctgtccgatcatctcggacgggatatttttataaaacgcgatgatgtcacccccatggcgatgggaggaaataaactgcgtaagctggagttcctcgccgccgatgcgctgcgcgagggagctgatacgctgatcaccgcaggggcgattcaatcgaaccatgtgcgccagacggcagccgtggctgcgaaactgggactgcactgcgtcgcgttgttggaaaatccgataggcacgcgtgctgaaaattatctgaccaacggtaatcgcctgctgctggatctgttcaatactcaggttgagatgtgtgatgcattgaccgatcccaacgcgcagcttgaagagctggcgacacgtattgaagctcagggataccgtccatatgtcattccggtcggcggatctaacgccctgggcgcgttaggttatgtcgaaagcgcactggaaatcgcccagcaatgtgaaggcgcggtggagatctcttcggtagtggttgcctccggtagcgcgggtactcatgccgggttggcggtaggcctggaacagctgatgccaaatgcagaattaataggggtgaccgtgtcacgtagcgttgccgaccagttgcctaaggtggtgacgctgcagcaggccgttgccaacagtcttgagctgcaggccaaagcggagattaccttgtgggatgattattttgctcccggatacggtacgcccaatgaagaaggcatggaagcggtgaaactgctggcgcagctggaaggtatcctgctggatccggtttataccggaaaggccatggccgggctgattgatggcattaatcagaaccgctttaaggatgaggggccgattctgtttatccataccggtggcgcgcccgcgctgtttgcttatcatccgcacgtctaa

SEQ ID NO: 89532 - DNA, 801 bp, Enterobacter aerogenes
atgaaattagcacttctgggtcgtcaggcgctgatgggcgcaatggccgtagcattgatggctggtgtaagcgtgaaaaccttcgccgctgaaaatctgcttaatcaggtcaaagagcgcggcacgctacgcgttggcctggaaggtacatacccgccgtttagttatcaaggcgatgatggcaaattgaccggttttgaagttgagtttgccaatgaactggcgaaacacatcggggtgaaagccgatctcaaacccaccaaatgggacggcatgctggcttctctcgattctaaacgtattgatgtggtgattaaccaggtcactatttccgaccagcgcaagaaaaaatacgacttctccaccccttatactatttctggtgttcaggcgctggtgaaaaagggtaacgaaggcgtgattaaaaccgcggcggacctgaaaggtaaaaaagtcggcgttggtctgggtaccaattatgaagagtggttgcgccagaacgtacagggcgttgatatccgcacctatgacgatgacccgacaaaatatcaggacctgcgcgtaggccgtattgacgccattttggttgaccgtctggcagcgttggatttggtcaagaaaacgaacaacactctggctgtaaccggtgaagcattctcccgtcaggagtccggggtggcgttacgtaaaggaaatgaagatctgctgaaagcggtggacaccgctattgcagatatgcagaaagatggcagcctgaaggcgctttcagaaaaatggtttggtgctgacgtcactaagtaa

SEQ ID NO: 89533 - DNA, 1488 bp, Enterobacter aerogenes
atgaaaaatcccacgttgttgcaatgttttcactggtattacccggaaggtggcgagttatggcgggaagtagaagcccttgcgccaaatctcaatgaaattggcattaatatgatttggttgccgcccgcctataagggcgcttccggcggttattcagttggctacgatagttacgatcttttcgacctcggtgaattcgatcagaaaggatcggttgccaccaaatacggcgataaagctcagctgttagcggcgattaatgcgctaaaagaacatcaaattgccgtacttcttgatgtcgtcgtaaaccacaagatgggcgccgatgagaaagaacgcatccgcgtacaacgcgttgatgaacaggaccgcacgcaaatcgcggaagaaatcatcgaatgtgaagcctggacccgctatacctttccgggccgcggtggcaaatattcacaatttatctgggactataaatgttttagcggtatcgaccatatcgaaaatcccgatgaagatggcgtattcaaagttgttaatgactacaccggcgatggctggaacgatcaggtcgacgatgaaatgggcaacttcgattatctcatgggcgaaaatatcgatttccgtaaccatgccgtgaccgaagagataaaatattgggcccgctgggtcattgaacagaccggctgcgatggtttccgcctggatgccgtcaaacatattccggcatggttttataaagagtggattgagcatgtgcagggggccaccgataaaccgctatttattgttgccgaatactggtcacacgaggtggataagctacagcagtacatcgaccttgttgacggtaataccatgctgtttgatgcgccgctgcagatgaaattccatgaagcctcgcgtcagggccgcgattacgacatgagtcaaatcttcaccgggacgctggtggaagccgacccattccatgcggtcacgttggtcacaaatcatgacacccaaccgcttcaggcgctggaagcgccggtcgaggcctggtttaagccgttagcctatgcgctgattttactgcgtgaaaacggtgttccctcggtattttacgccgacctgttcggcgcaagttatgaagataccggcggagatggccagacatactccatcgagatgccggttatcgagcagcttcacgaactcatcgatgcgcgtcagcgtttcgcccacggcgtacaaacgctgtggttcgatcatcctaactgtatcgccttcagccgcagcggcaccgatgaacatcctggctgcgtagtggtgctctccaacggcgacgatggcgagaaaacgttaccgcttggcgagaattatgccaataaacgctggaaggattttctcaataatcgacaagaggttattgagactgatgacgagggcaatgccgtattcacctgtaatgcaggcagcgtaagcgtgtgggtgattgaagaggtgctttga

SEQ ID NO: 89534 - DNA, 417 bp, Enterobacter aerogenes
atgaaaaagattgttatggctggcgcgctgcttaccctggccggatgcgttcaggttgatacctatgaggcggtggtcaaagcgccggcgccggcagggctggaagggttctggcaatcgaagggaccgcagagcgcaatggtaagtcctgaggcgattgcgacgtttatcgttaccaaagacggagatactctcgattgccgtcagtggcagcgggtaattgctgagccgggaaaattaatgaaccgcgacaatcaggtttataatgtgaccagcagcctcgatatttatcctattgaacgtactggaaacacgctggaatacgatcgaatgacgttaacccgtgttgaacgcttaacgccggaatgcgagcaggcctggaaaaagaaccagacggcgagtacgaccgcgcagtaa

SEQ ID NO: 89535 - DNA, 633 bp, Enterobacter aerogenes
atgtcaacgattatcatggatttgtgcagctatacccggctaggtttaaccggatatctggcaagccggggaataaagaagcgcgatatcattgaggtgcgtagcgcacagagtttgaaagagcgctgcgaatcgctgcgtccggcggttgtgtttctcaacgaagactgttttatacatcacgaagagagcaatcaacttatccgcgacatcattaccacctaccccgatactctatttgttatttttatgtcgctggccaacatccattttgatcactatttacttgtacgcaagaatttacttatcagctcaaaatcccttacgccgaaagaccttgataacatactgggtaattatctgcagaccgatagcgccaataatctaaaccaattacgcacccgcattcccactctatcgctcagtcaggccgaatcgaatatgctgcaaatgtggatggccggccacgctacttcacatatttccaggcagatgaatatcaaagcaaaaaccgtttcgtcacataaaggtaatattaagaaaaaaatccagacgcacaataaacaggtgatttaccacattgttcggttggctgaaaacattacttccggcatttacgtcaatatgcgctga

SEQ ID NO: 89536 - DNA, 189 bp, Enterobacter aerogenes
atgcaggtaaacgatcgtgtcacggtaaagaccgacggtggcccacgtcgatcgggggtagtactggcaattgagtcgtttagtgaaggaactatgtatcttgtggcgctggaagattatccgctggggatctggttttttaatgaagtggggcacccggacggtatctttgttgagaaagcagagtag

SEQ ID NO: 89537 - DNA, 231 bp, Enterobacter aerogenes
atgatgaaatccgctaaagaccacggtgtgatgaataccgacgggattgacgttaatgtcgatgccctgctggcggcgatcaatgagattagcgaaagcgaagtacatcgtagtgaagatgatccgcatcatgtcagtatcaatggccgtgatgaacacacatggcgcgagctggccgaagcctttgagcttgatattcatgactttagcgttactgaagccaatcgctaa

SEQ ID NO: 89538 - DNA, 1668 bp, Enterobacter aerogenes
atggataagccgctctggccaaaaaagtttcatcgcctcttcaatccggggcgagtggtcaatatctgtttcatcgtggtgctgttcttttcaacgttgctcatctggcgagaaatccgcgtactggaagaagcctacgtcgccaaccaacgtaataatcttgagaacgtggcccatgaaatggatgggctgttgcaatttaatctcaatcgtctgctcttttttcgcaacagcatgcaatcagcactggagaatccgctggatttcgccattctgcgccgggccgaacaggagtacatcagtaaacgtcatgatcccatctggtcagtcgagctaaacaaccggcgtactctgacggtatacggcgtttcagattcttttgtcgacgctgatgatctgttgtcgcgtaataatcctcaggccagcaatgaactgatggctacccttgagctgggctatcttctgcgtttgaccaataacaacagaattttcagcgagcgcatgtcctacgtttctcgcagcgggttttataccacaaccgatgccccgcgcagttccagccaggtgctggcgcagttctcgcgagatacggggtcagcatggtttatgcggcaaacccagcgtgataatccagggcgagggatcctctggcaaacgactcaacaagaagacgggtatacgcaaccgcaggtggttacggcctcgattcctcttgattatgagcactactggctgggggtgctggcgatggatttttccatccgcgacctgcagaattttctggtcagtgcggtaaaaggagggcaaatgggcgagtatcaactgtatgacaagcagctcaatttgctcgcctcttcggcgccggatgatgtcctgacgccgctctcgccaaaggaacaagaacaacttcgttatgcgttgaccaatgataaccatggcggcatacgtcagttaactcgctatatcagttgggaaaagatccgcaactttgacggcgtactgttgcatattcatactttgaaggaaggagtgcgtggtgatttcgggaccatttccatcgcactgaccctgatgtggttaatgtttaccctcatgttgattgtgtcgtggggggttattcgccgtatggtcatcaacatgagcgtgttgcaggcgtcccttgagtggcaggcctggcatgacgcattaacgcggctgctaaatcgcggcgctctgtttgaacgggcgatcgcggcggcccgaagctgccggcggaataatcaaccgatatccgtcatacagctggatctggattattttaaaggcatcaatgataaacatggtcaccaggcaggggaccgtgttttgacgttggttggcagtactattatgggacagattcgcgagcaggatattgccggacgcgttggtggtgaagagttctgtatcgttctacccaatacccaactgccgcaagcgcgtgcgattgctgagcgtattcgtctgcgtatccatagccgggagatattgttgcacaatagcgttagtttgcggatcagcgcctcactggggataagtagtagcgagacatcagatgagtttaactttgaggagctgcagtcgattgccgatcatcgcctgtatctggcaaagcagaatggacgtaatcgggtttgttcggctgggtag

SEQ ID NO: 89539 - DNA, 180 bp, Enterobacter aerogenes
atggtcttgttggtcagtgatgaagtcagacgaaaaaacggcgggccgcggatggtggtcaccggcattgccgacgatatggtcgagtgccggtggtatgacggacaggtcgtacagcgtgaagccttccgtgaagatgagttggtccgcggcgaagggcaacattcgcagcataattag

SEQ ID NO: 89540 - DNA, 912 bp, Enterobacter aerogenes
ttggcgggaagtagtcttttaaccttattggacgatattgccacgctgctggacgatatctccgtcatgggaaaactggcggccaagaaaacggctggcgtactgggcgatgatctttctctcaatgcgcagcaggtcacaggcgtaagagccaaccgcgagctcccggtggtatggggagtggcaaaaggctcgttcctgaataaagtgattctggtgccgctggcgttactcatcagcgcctttattccctgggccattacgccgctattgatgctgggcggcgcatttctctgctttgaaggctttgaaaaagtgctgcataacctgcacgcgcgcaagaataaggaggatccgaaattgcgccagcagcggctggaaacgcttgcagcccaggatccgcaggcctttgagcgcgataaagtaaaaggggcgatccgtaccgactttatcctttcagccgaaatcgtcgcgattaccctgggtattgtagctgatgcgccattgcttaatcagatcctgattttatccggcatcgccattctcgtgaccgttggggtttatggcctggtgggcgtcattgttaagctcgatgacatgggatattggctggcggagaagaaaagcgcactggcgcagtgggttggaaaagcgctcctggccatcgcgccgcgattgatgaaaattctgactttcgtcggtaccctggcgatgtttctggttggcggcggtatcgtggttcacggcgtagcgccgctgcatcatttcatcgagaattttgcccatgggctaagcggaatgctggcatccacattgcctgtggccgctaatctggtgctaggatttatcattggcgctatcgtctttggcgtcgttaaagctatcaccgcgttacgcggtaaagcgaaataa

SEQ ID NO: 89541 - DNA, 912 bp, Enterobacter aerogenes
atgtctacccgtcagctgttaccccttatcggcgcgctgtttgcgctgtatatcatttggggttcaacctattttgctatcgctattggcgttgccagctggccgccgttgatgatggccgggatccgctttctctctgccggcggcgtgttgcttatctatttactggccaccggccataaactcccggcccgccggccgctacttaatgcggccctgataggcatcctgttgcttgccgtcggcaatggcttcgtcacccttgcagaacatcagcatgtaccatcaggcatcgcagcggtgatggtcgccaccgtaccgctgtttacgctctgtttcagccgtttttttggcattgccacgcgcaagctggaatggttcggtatcgcgattggcctggcgggaatagtgatactcaatagcggcggcaacctcagcggcaacccctggggcgcattgctgattctaatcggttccctgagctgggcgtttggctcggtttacggttcccgtattgaattaccaaccgggatgatggcgggcgcgattgaaatgctggcggcagggatagtgctttccgcggcatcctggttctcaggcgaaaaactcgctcaaatgccctcctggtctggaatatttgccgttgcgtatctggccatttttggctcgcttatcgccatcaatgcctatatgtatttgatacgtaacgtaacgccggcggttgctaccagctatgcctatgtcaatccggttgtcgccgtgctgctggggaccggatttggcggcgaaagtctctcatttatcgaatggctggcgctggcggtgattattttcgcggtcgtgttggtgacgctgggtaaatatctcttccctgcccgctccaccgttacgccttgtcaatcggatcgataa

SEQ ID NO: 89542 - DNA, 486 bp, Enterobacter aerogenes
atggcggacgttcatgataaggccacacgtagtaaaaatatgcgcgctatcgcgacccgcgatacggcaattgagaagcggctgggggcgctgctaacgcaggccggattcacttttcgcgttcaggaggcatcgctaccggggcggcctgattttctgctgtctgactaccgctgcgttattttcacccatggctgcttttggcatcatcatcactgttatctgtttaaagtaccggcgacccgtaccgatttctggctgaaaaagattggcgctaacgtgcagcgcgatcgccgcgacctggcgatgttgttagcacaaggttggcgggtgcttattgtctgggagtgcgcgctccgcgggcggcagaaattaagcgatgatgctttatgcgatcgtctggaggagtggatctgcggcggtggaaattgcgcgcagatcgacactcagggcattggttttatcgatccgattgacaaggcgtaa

SEQ ID NO: 89543 - DNA, 1422 bp, Enterobacter aerogenes
atgccgcaaaatttatcccaagaaaacctcctgtctttaccgtcaggggaacacgcgcaggcgttattgcgccagctgatgacgatatatgatgtcaaaaccctggtcgcacagctggtcgcggttggcgaccagcactggagcccggcgatactcaaacgggtggcgacggtgagccgtgcggcaagtagattgactaacgcggagtgcgctcatctggcgagcctgttaccggctccgccgcgccatcatccagactatgcctttcgttttatcgatctcttcgccggcatcggcggcattcgtcacggctttgaagctattggtgggcagtgcgtatttaccagcgagtggaataaacacgccgtacgtacctataaagctaactggtattgcgatccgcaagagcacagctttaacgccgatatccgcgaaatcactctcagccagcgcgccgatatcagtgatgaagaggcggcaaagtctatccgtgaggcgatcccgcaacatgatgtactgctcgcgggcttcccctgccagcctttttccctcgccggagtatccaagaaaaatgccatggggcgcgctcatggttttgcctgtgaaactcagggaacgctgttttttgatgtcgtcagaattattgccgcccgccgtccgccgatctttgtgctggaaaacgtcaagaatctgaagagccacgatcaaggaagaaccttccgtattatcatgcagacgctggatgagctaggctatgaggtggcggatgccgatcatgcgggcgtcgatgatccaaaagtgatcgatgggcgtcatttcttaccccaacaccgtgagcgtatcgtgctggtgggtttccgtcgcgatttacaattgcatgaaggatttacgctgcgcgatatcgccagcctgtacccgccgcagcggccgacctttggcgagttattggatcccaccgtcgatgctaaattcatcctgacgccggttttatggaagtacctctaccgttacgcgcgtaaacaccaggcgcgtggcaacggttttggctacggtctggtcgacccgaccaatccaggcagcgttgcgcgaacgctttcggcgcgctactacaaagatggcgctgagattctggtcgatcgaggttgggataagccattgggcgaaaagcactttgacgatccacaaaatcaacagcgccgcccgcggcgtttaacgccgcgtgaatgcgcacggttgatggggttcgaagccccgggagaataccgttttcgtattccggtttccgatacccaggcctatcgccagttcggcaactcggtgattgttccggtgtttgccgcggtagcgaagctgctggcgccgcgaatttccgaggcggtaaagcggcgcgttgcaggagatagcgatggcggacgttcatga

SEQ ID NO: 89544 - DNA, 696 bp, Enterobacter aerogenes
atgttattagctgaatggcaacaacgatttgaaaactggttaaatacgcatcatgcacaggaagatgcggcgcatgacatttcgcactttcgccgcgtctggagtaccgcgcagcaactggtcggcgagagtggcgctgacgagttggttatcctgacggcctgctactttcacgatattgtcagcctggctaaaaaccatcctcaacgtcatcactcttcacggatggcggcgcagaaaacgcggtctatcctgcaaagcgctttccccgactttccagccgaccgttatcctgctgttatgcatgccattgaagcacatagctttagtgcggctatactgccacaaagcgtagaggcaaaaattgtccaggatgcagatcgtctggaagctttaggcgcaattggcctggcgcgtgtctttgctgtttccggcgcgctaaacacgattttgtttgatgctaacgacccctttgctgaccagcgcgatcttgatgacaagaaatatgctctcgaccatttccagagcaaattgctccgtctgcctgagaccatgcaaacggagcagggaagagctttggcgtcgcataacgctcaatttctggtgcaatttatggcgaagctgagcgccgaactgcgtggcgacccgttgtcgttggatgaagcggttttgcgccgctttgcgcctgcggtttaa

SEQ ID NO: 89545 - DNA, 282 bp, Enterobacter aerogenes
atggacacgaaagcgaaacgggggcccgttggaaagctggcgttatgggctttttacgctttttgcgcttactttgtgtgggcgatggtacggtactggtggatagtggggcggattcaaagcgttcccggcgccagcattgatggtgaatggggatcaacggcgggcaaatggattggcgcgctgctgggttttttggtgctgggggcagtggggttaatccttggggcgatagcctggtacacgcgtccccctattcaggtacatgaacagcgcgattaa

SEQ ID NO: 89546 - DNA, 1143 bp, Enterobacter aerogenes
atgaaaagaaaagtattggctattatgctgccagcgttattagcagcaggcgcggcgcactctgcggaaatttataataaaaacggcaataaactggacctctacggaaaagttgacggcctgcactatttcactgacgatgcttctgaagatggcgaccaaacctacgtacgtttcggcctgaaaggcgaaacgcagatcaacgatcagctgaccggctacggccagtgggaatacaatattcaggctaacaccactgaaggtgaaggcgctaactcctggacccgtctgggtttcgcgggtctgaaatttgctgattacggttcactggactacggccgcaactacggcgttatttatgatgttgaagcctggaccgatgtgctgccggaattcggcggcgatacctacacccagactgacgtcttcatgctcggccgtaccaacggcgtggcgacctaccgcaacagcgatttcttcggcctggtagatggtctgaactttgccctgcagtatcagggtaataacgaaaacgcgggttctggcgaaggcaccaataacggtggcgatcgtaaactggcgcgtgaaaatggcgacggcttcggtatctctacttcctacgatttcggtatgggcatcagcttcggcgcggcatatgcttcttccgatcgtaccaacaatcaagtggctgcctctgccagcagcgcatacgccggcggcgataaagccgatgcctggaccgtgggcgcgaaatacgatgctaacaacatctacctggcagcgatgtacgcggaaacccgcaacatgacctccttcggtaaatccaccagctatctcggcggcggtattgccaacaagacgcagaacttcgaagtcgttgcccagtatcagttcgatgattacggtttaccgctgcgcccatccgttgcatatctgcagtctaaaggtaaagacctgtacaacagcggcgacaaagacctggttaaatacgttgatgtgggtatgacttactacttcaacaaaaacatgtccacctatgttgattacaaaatcaacctgctggacgaagatgactacttctaccgcgcaaacggcatcgccaccgatgacgttgtcgcgctgggtctggtctaccagttctaa

SEQ ID NO: 89547 - DNA, 828 bp, Enterobacter aerogenes
atgaatattttctctattcttgctaagactttttatcggtgtattcatacacttgccacaaataaaaatcttgtgatttcgctgactaaacgggaaatcggcagtaaatataaaggctcatttatcgggcttctttggtcatttatcaacccagtgttgatgatggtaatttataccttcgttttcagcgtcgtattcaaaattcgctggggtgcgggcgtcgattccaaaggagaatttgcgttagcattgttcattggtttgattttcttcgggctcttttccgaatgtattaaccgagcgccttatttaatcgtcaataacgtcaactacgtcaaaaaggttgtatttccggtggaaacactgcctattgttgcgctctgcacagctttattccaaatggcgattaacttcgttgtttggttgttgttctatgtggcgatcgtaggcctccctacatggcacatcctatggctacctgtcatcgtcgcgccgttccttatgatggccctgggcgtatcctggttcctctcttcgctcggcgtttacctgaaagatatcgctcaggttataggcgtgattaccatgattctgatgtatctttcgccaatcttctatcccatttccatgttgcctgacgcatatcacatctttatgcaactcagtccgatgacttatgttattgagcaagcaagagattgcatgatgttgggcaaaagtatcgcttgggatagttggggtatttatactctaatctctttcgttatcatgctgttaggttatggttggtttatgttcacgcgtaaaggatttgctgatgtcatctga

SEQ ID NO: 89548 - DNA, 1335 bp, Enterobacter aerogenes
atgtcatctgaattcgcaatttcagtcaaaaatatttcgaaacgctttgaaatgtatgcaaatccgaagcatcgtttataccaaatgctttctctcggtcgtcgtacatactttaaagagttctgggcgctgaacggcgtttcttttgacgttaaacgcggcgaaacgctcggcattttgggccgtaacggtgaaggaaaaagtaccctactgcagattattgccggcacgttaacggccacttcaggcagcgttgaggtcaatggcaaactggctgctttgctggaactcggcgcgggtttcaaccctgagtttactggccgtgaaaacgtttatctgagtggcatcattcttggtatgacgcacagtgaaatggagcagaaattcccagagatcgaagcgttcgccgacatcggtgagcatatcgatcaaccggtcaaaacatactccagcgggatgtatgtgcgtctggccttcgctgttcaggcttgtattaagcccgaagttctaatcatagatgaagcgctgtcggttggtgatgagaaattccaacgcaaatgcttcgattatatcgaatcgctgcgcttgcaagggtgttcaatcatcctggtgacgcattccacttcgaccgtagagaagttttgccagcgagcaattttgttgcgaaaaggccgtgtagaggccatcggtagcgccaaagaaatcatcgatcaatatcatgccctgctgtactcagatgaaaaaacttacctgcgctatctgaataacattgctaaaagcactaataaatccatcgttccaccagcagaagagagccgggatggtatcgtccccaaggaaggtcctatcgtggaacaagtggaggcacaggcagaaaacgaactgaccagcggcgcccttattgaaagttggatcattaaagatgcccacgatcagccttgcgatttgttccgcgtgggtgagaaagccatcatcaattttgatatcagcgtatttgggccgatagaagaattacaagcaggctttgtcatcaagacagttgaaggcattactgtatttggcaccagcaccttataccataagaagaatatacataatgctaaaggcggcgatacactaagggcaacgtttgaactggatctggcgttatgcgaaggcaactattttatttctttggctatagccaacgctatcagccacgccgatatgtcctatcttgataaaaaaaccgatgtcatcgtcctcaagatcatagaacctcgcacgacaatgtcaggtattgccgcattgcctgtttctttatcactcgaaaggtggtcaggagagcatgaataa

SEQ ID NO: 89549 - DNA, 2760 bp, Enterobacter aerogenes
atgaataaatcaatacttattatcactcagtattattcagtaggcggcctggaaacctatatcaatacccaggtaaaggatctggtcgctcatggctaccaggttcatctcatgtactccgttatcgcagacccatcattactgcctgacgggctgagttcgtgccatacaaatattcacttaagcaacggttctattgaacaactcgttcagtgcgtagacctgattcgacaagttatcaaagaggagggtattgatgtcgttcacgtccatccttttgactgcattttccctgcggtgatcgccgcagactgcgaaaaaataccgtcgttattaactttacacggtccattgtcgctccagcattttacgcggaatatttataatcaggcgttggccatttatttccttaaaactctgcatactattttctgcgtttcacaggaaactgcggatcagttagcgcagatcatagaccacccatcggtcatgattgttcctaacctaatagatcccccccagacgcagctcgctcttacggataagagcgttgacaaaagatggcttatcgccagcaggctggatgaggataaggctgctgggattataaagttcattgacttcgccagccgttgccaaatgattcatggtattgatatttacggtaccggcagtagcgaagacgtcatcagaacctacgttaacgataataacttcagccagtgggtaagttttaaaggcgtgcttggtaacatccccgcggtcatgccgcaatatgctggctttgccggcatggggcgcggagtactggaagccggcatgagtcaactgccggtgtgtctggttggctacgatgggattaaaggtattctgaacgatgaaacctttaaacttgctgcttactgcaatttttccggcagaaatctggcaaatatcgaggaaacggtacttcaggagcaatttgccgccgcgcatcccctgtccccagatttgctcagtggttaccaaagcgctggtcgttggagccagatcatcgagagcgtttatctcccgaacaaggagcgatacgacaatctcgattctttgcagctctaccggcaactatgtgaggcgcccccctcaagagaaaatgaaagttatttgatcgcggatgcatttactgccgccatatttaaaacgttagcgaaccaactgatcgctaacaatatcgagattaaagctcacgattatagcatgaaagagaccgtcaaaatggaaggtaaagtgagtcaggttccccaggagcgcccaaacaatgtagccaattcagggaacgatatcatggccaaattaactgctttagaagagcaaaatcaggctttacagaatgatgttaaatcgttagtgcaaattttgacatcagtagcggcaaagcaggaagactattttaatactttacctcggataggtacatcgggcacagggcaaaaacttcgctatttggtccagctcgcaattaaatcgctgaccaaagcggataaacgctatgagctggccaaaaccatttactggaaactgcccgagtctgtcaggttaaaactacaaactcaacgctaccgatacgtgcaaaaacacttcgagcatgcttgcaatagtgacaaaaaagatacctccatacctgaagaggttccagcctgggtcgaagcggtaaaccgatcagaaaaagtcgtcttcattccgtgcagcttcgaattcgatgaactagtaaaccaacggccaatcaacgcggccaaatatttcgcggagaaagggtatcaggttatttttattgcctggcagtggacaccgcaggaaacactatcgaaaggttgctcgcaagtctggaataatgtttatcaggttccacagtatgagtttgtgaaaaatacccgtcaatgccagctacatgacaaaaccgcgtcctttatcatcaccatgccagcgaaaatcttcctcagcccgctctatgaatttagatcgcaaggctgcaacatcgtctatgacattatggatgaatgggaatgcttcaatgaggttggacaggcaccctggtatcagaaagaaatagaagaaacctttattctgcagagtgattacgtctgtagcgtagccccttcactgcgtgacaaatttgcttatctgcgcagcgatattgatgtgattggtaacggctattccgaaaaggttctcggcgatacacgcaatattgcgaaagacgacggcaataaagtaggctattttggtcacctgaccgactcatggttcgactgggatatcgtatttaaattagcggaagaattcccacaatatcacttcgagattattggttatggtgagcctgagtgggtggtcgagaaagcaaaaagtattgcgaacatcaccctcgtcggcaaagtgatgccacaagatcttcatcaatacgtcaaagaatggtcaatcggtctcattccattcaaaaatggcaaactagctcaagccgtcgaccctatcaaaatttacgagtacctttattttggcttgccaacgttggtgaccgggattgagcatattaaacgctatccaatgacctatttctctgacggcagcgatattgtcgacttgtttgaaaaaacaatcaaaagcgaacgtcactctgccgaactggaagttttcctgcatgaaactacgtgggcagcacgatttgaggaaatagagttgaacatcctgaataaaaggggaataagggaattatatgcttcgtaa

SEQ ID NO: 89550 - DNA, 1053 bp, Enterobacter aerogenes
atgcttcgtaaaatagcatttttctatccttgggcaacgcatggtggtgtagaaaaggtcatgctcacccgcgccagactgttaaatgataccggaaagtatcaggttgaccttcttttcactcatgattccggtgcagcgaaagcgatcacaaccgcactttcggattgtaaaaatgttaatgtcaaaattgtcaacttcgattatttgctgacccaggattacagtctcatattttgcatcgatttccctgcagccctgacattttgtcatacacataaattgaagtattttgcggaatgccatactccctataaagaaaacagagcttatttaaataatgttccgcacagttgtttggcagtactgtgtccatccatattatttatgaagcagcttgagccagaattgcacaaaaataccagtccgctgttattactgcgcaattttgtgccctgggatcatatcacccatgagccgcatactatccctacgctcccggcatggtcgagaagacctattctcttcctgggacgaatggacaagctaaagaatccgactgaattactggacgcattcgttattttaaaagagcgccatccgggaaaatacatgctcgtactttgcggcccgcagtcttcagaaatcaacattaacgctgaactggagtgcaggaatctggttggcgacgcgatatccttaccgccagtgccattcttaaatgtggacaaactgctgttagcgatctctcgctccaacgggatttttgtgtcgccatcaactggagagtcatttggcctatcggcttctgaagcgatttgcgcagacgtacccgttgtcttgtctaatatcgaagcacataattatttggttgcctcgcgtgaaaacgaattcacttactcgttacatgatgctcgccaattggcagaaaaaataggttctatttctgacaattatgcgcaatccaaggcatcactcgcagcgttaaaagacaaattttccgcccatgcatttatgaatgattgggacgagttgcttcgcagaaccgaatag

SEQ ID NO: 89551 - DNA, 1086 bp, Enterobacter aerogenes
atgaaaatcgtatatctttcagcggttccctggttgagtataagtcagcgccctcattttttcgccaaatacgccctgacccatgccactcaggaacttttgtggattgagccttatcctagtcgttttcctaccctcactgatctgacccctggtcgacatgccccggaaccggcagggttggatttaatagagggcctacaactaactcgattgggttttgttgcccccgtggaacctatcccctcgctttttaaactgcttaaccatagaaaaataaaacaactcattgacgatataaccaattttatatccgaagatactattctggttatcggcaaaccctgcctgttagccaacatgcttattaagcaatttaaatggcgacaagtgtggtatgacgccatggacgatttcccttcattttattctggcatttcaaagaaaaatacggctcatcttgaaaaagaaatcgccctacaggttgaccgtatattctgctcaagtcatgccttaatcgagaaattttcgtttatcgctccccacaaaaccatgctagtacttaatgcttgttctgatgacatacagaaaagcaatcttccccaaccgtcgaatgaaaaagtcacgtttggctatattggcacaatcgcgagttggtttgactggaactgggtgattgatttagcaactaaaaacccggaagcgatcgtaaatctagtggggccaaaaaagacaagagttccggaaaatttaccggaaaatatcgtcctcgaaccgcctattccgcatcccaaggtgatggagaagatatccacgtttaactatgtgatcattccatttgtgcagaatgatattactaaatatgtcgaccctgtgaagttttacgaatacagactggctgggaaaaccattctgtccacgccgtttggcgagatgctatggcatcatcagggggaagccagcaattcaggaataacattagacatcaccatacctgagaacacgctcgtcttcccttcaccgcaaaaatcaaacgacattccaagatggagtggacgattctctgaagtcttcatcagtcattga

SEQ ID NO: 89552 - DNA, 798 bp, Enterobacter aerogenes
atgtttaaatggccgtggaaagcagaagaacagacaggtaatggcgaaatcccgtgggaacaagcggttgccattccggttttagcaaacctcactcaacaggaacagcagcagctgtgccaaatggcagctcgttttttacagcaaaaacgtctggtgccgttacagggatttgagttaaccccactacacagcgcacgtatcgcactacttttttgtctgccggtgctggagcttggccttgagtggttagatggtttccacgaggttctgatctaccctgccccctttgtcgtcgatgacgaatgggaagatgacatcggcctggtgcataatcaacgcgttgtgcaatccgggcaaagctggcaacagggtcccattatccttaactggttagatattcaggactctttcgatgcctcaggttttaacctggtggtgcacgaggtcgcgcacaaactggattcacgtaacggcgatcgtgccagcggcgtcccttttattcccttgcgtgaagtcgctggttgggaacacgacctgcatgcagcgatgaacaacattcaggatgaaatcgatctggtcggcgaaagcgccgccagcattgatgcctatgcggcaaccgatccggctgagtgctttgcggtgctctcagaatatttctttagcgcaccggagctattcgctcctcgcttcccggcgctatggcagcggttctgccagttctatcgtcaggatccgcaacagcgtttacgggaaaacgatctactggatgaagacgacgcgcgcgttgttcattaa

SEQ ID NO: 89553 - DNA, 939 bp, Enterobacter aerogenes
atggtgcggcgtatgaaattgctttgctctctggtgatgatgttggccagccacagcgcattggcggtaagttatccgttgccgccggaagggagtcgtctggttggcagcccgatgaaaattaacgtgcccgagcgtaatacccagccgctggaaacctttgccgcgcagtacgggcaggggctgagcaatatgctggaggctaaccccggcgtcgatgtctatctgcccaaatcgggaagctcgttgattatcccacagcaattgatcctgcctgctaccgtacgtagcggtatcgtgataaacgtcgccgagatgcggctttattattatccgcctgagggcactaccgtcgaggtgttaccgatcggtatcggtcaggcggggcgcgagacgccgcgtaattgggtgacggcggtggaacgtaagcaggaagggcctacctgggtgccgacggcgaatacccgtcgcgagtatgccaaagaaggtaaaaccctgccggcgatggtgcccgccgggccagataatccgatggggctgtatgctatctatattggcaggttgtatgccattcatggaacgaatgccaattttggcattggcctgcgggtgagccagggctgtattcgcctgcgcaacgatgacatcaaatacctgttcgataatgtgcccgttggcacgcgagtacagattatcgatcagccggtaaaatacacgactgaaccggacggtagccgctggctggaagtgcatgaaccgttatcgcgtaatcgcgctgaatttcagtcagaccgtaaagtaccgctgccgtataccccggcaatccgtgagtttgtacagggcgcgggcgtgaatgtcgggcgcgcggattcagcgttacagaggcgctccgggatgccggtgaatataagtcgttcagcggtggaaagcagtttttaa

SEQ ID NO: 89554 - DNA, 1035 bp, Enterobacter aerogenes
ttgctggtttttattatttgtttgccgggtaaacagactttaacaatagacatcatgttatgtctgaagacctgggggaaaaaggtgaatttccagcaactaaaaattattcgcgaggcggcccgtcgggattacaacctgacggaagtcgctaatatgctgtacacctcgcaatctggcgtcagccgccatattcgtgagctggaagaagagctggggatagaaatctttatccgccgcggtaagcgtcttctggggatgaccgaacccggtaaagcgctgctttccattgccgaaaggatcctcaacgaggccagcaatgttcgccggctggccgatctttttaccaatgacgcttcaggcgtattaactattgccaccacgcatactcaggcgcgttatagcctaccgccggtaattaaagcttttcgcgaacttttccccgaggtgcggttggaactggtgcaagggacgccgcaggaaatcgaggcgttgttgcacaacggcggggcggatattggtatcgccagcgagcgcttaagtaacgacccgacgctggtggcattcccctggtttcgctggcaccacagtctgttagtgccaaaagatcatccactgattgaggttacgccgctcacgctcgaggctattgcgcgctggccgttaattacctaccgtcaggggatcaccgggcgctcgcgtattgatgaagctttcacccgtaaagggctgatgccggatatcgtcctcagcgctcaggattccgatgtgatcaaaacctacgtggagctgggcttgggcgtggggttggtggcggaacaatccggcgatgctcgcgaagcggatacctttacccggctggaaacacgccatctctttgatgccaataccgtttggttggggctaaaacgcggtcagttacaacgtaactacgtctggcgtttcattgaactgtgcaatgctggactatcgctggatgagattaagcgccaggcgatggagccggaggaagtggcgatcgattatcaaatctga

SEQ ID NO: 89555 - DNA, 918 bp, Enterobacter aerogenes
atgaacttaagacgactgaagtattttgtgaaaatcgtcgatatcggcagtctgacccaggccgctgaagtcttgcatatcgcacaaccggcgctgagtcagcaggtagcgaccctggaaggtgaactggagcagaaactgctgatccgcaccaaacgaggcgttacgccaaccgaagcggggaaaattctctatacccacgcgcgaaccattttgcgtcagtgtgaacaggcgcatctggcggtacataatgtgggccagacgctgagcgggcaggtggcgattggccttgcaccgggaacggcggcttcggcgatcaccatgccgttgctgcagaccgtgcgtaatgagcttcccgaggtcaacgtctatctgcaggaatgtagcggcagcgttttaaatgacaagctgcttggcggccaactggatatggcggtgttgtacgaacgttcgccggtagcgggagtggtcagccagccgttgctaaaagaggatttgtatctggtcggcacgcaaaactgcccgggacaaagcgttgatctctctgcggtggcggagatgagtctgtttttacctcgtgactatagcgctgtctgtgccagggtgacggaagcctttaccttacgccgcctgtcggcaaaagtaatcggcgagatcgaatccatcactacattaactgccgctatcgccagtggaatgggcgttaccgtactgccggaatcggcggcgcgctcgctgtgtgctacggcaaatggctggatggcgcgcatcagcaccccgtcgatgagcctgtcgctctcactgaatacctcggcgcgcggcggtttatctcctcaggctcaggcggtcaaagatatcctgctgtcgctggtcagccgtccttcgttggagaatcgtgaattacagctggtcagttag

SEQ ID NO: 89556 - DNA, 1290 bp, Enterobacter aerogenes
atgaacaaattcatcaaaagcggcacgatgctgctggctttactacaccctttcctcgcgcaggccgacgatacgcttttttctccaacggcaaaaaacatgaccggagagtggggaggaatacgaacagacctgcggcatcgtggttataactttacgctggaatatagctcgatgacggccactaatgtttctggcggttacgatcgcgataaaaccctacgttatagcgaccagtatattctcggcatcgatatggatctggagacgattttcggcattcacgatggggaatttaaagcctcgctaaacgatcgtaacgggagagatttgactcaggatcgcctccaggatccgcgcgctccggtcatcggctcgggtgttcagagtaactacggtcggggacaaacatggcacgcgacgcagttctggttcaaaaaaacctggcaggataaaaagtgggatctcaaggtcggtctcatgccgtcaggagaggactttgataatagcggctgctattttcaaaacctgtcgttatgcggttcgttagccgggcacggtagcggcgtctggtataacactcccataggccagtggggtggccgcattaaatacagccttacttcggcgctttatctccaggccggcggatttcagtacaatcctaactacgccacccgccacggaagcttcgagctggatggcactgggcatctgggatacatgtatatctttgagctgggatatttacctgccgcaggcacggcaatattccctggcacctggaaaattggcggctggtacaacacagcggatgccaatgatgtactggatgacgacaatggcgatccctatgtcctcacacatcaggctgcccggcaacacggtggccgttacggaggttatttctatgtcagccagcagctgacccactcgggcagccagcgccaaaatggcctcaacattttcgggcatctggccataaatgataaaaatacggcgacaatggactatcagatccaggctggcgtcatttataagggccctttcgccagtcgcccgcaagactttatctgctttggcgtaagtaaaatgcatgccaacgccaaagtcgctcgtcgagcgcaactccagaaccagatgcgagggatcgatgattatgctgatcccttgtatgtcccggttcgcagaagcgagtatgccgcagagctgcattatagttttcgcgttacaccatggttgaccttgcggcctaatctccagctactcgcccatccgggaggaaggtga

SEQ ID NO: 89557 - DNA, 1398 bp, Enterobacter aerogenes
atgtcaactcaggccattgcttcagattacgccattgccagcggaacgccgtcaacaccagacgcgctgctggcgaggctggaacgcctccccatcacccgaaggctgaaagcgatccgcgttattgtcggcttatcaacctttttcgatgcctataccattatcgctatcgcttttgcgctcccgcagcttacccaggagtggggtttaacgccgacgtttgtcggtctgattattgcggccagttacgtgggccagttgtgcggtgcgctattttttggctcgctggcggaaaaaataggacgtattggcgtattacgtatcaccatcatcatgttcgtactgatggatgcagcctgtctttttgcctggaacggttggtccattcttattattcgctttttgcagggagtgggaatcggcgcggaggttcccgttgccagcgcctatatcaatgaatttgtcggggcaaaaaagcgagggcgtttctttttgttgtatgaggtgattttccccattggcatgatgtttgccgggttggtggggtattttctggtgcccatctatggttggaaagtcatgtttttaattggcttagttccttccgcattgaccgttcccctgcgctggttaatgccggaatcaccacgctggctggccgcaaaaggtagactaaaggaagcggataatatcgtatctacgctggaatcagaggtcatcaggcgcggcatgacgttacccgagcctgaaatgaaagcccctacagtgcaaaaatcggctccggaaggcgtaaaagccctgtttggcgggatctataaatcccgaacctttatgctgtggggactgtggctgacggtttatagcgtcaacaacggcatgatcacctggtttccaaccctctataaaacctggtttaacctctctctcgataccagtctggcctacggctggatcacctcttcctgcggcgtcgtggcttcggtgatctgcgccttgctgatcgaccgcgtcggacgcaagcgttggtacacatgggcttttttactggcgattgttccgctgattacgctttctattctgggcgcaaagtctgccgttgaaattctgattctgggaagcctgacctacgccattttgcagaccatcgctttctcgctttatctgtacgcggcagagctttatcccacccgactgcgcgccattggcactgcctattccagcgcatggctccgcgcagggtcatccattggcccattgatggtgggctttatcgtcagcggcttcgggatccgttttgtgtttatcactttcgcggttattgcgctgattggcggcttaattacctggttttttgccattgaaaccaaaggaaaatcgttagaagagctgtcgccatag

SEQ ID NO: 89558 - DNA, 1029 bp, Enterobacter aerogenes
atggatcaagaaagtgaactgaacgattttccggaaaaaaagctggtgacaatgcgggacgttgctcgcgctgcgggcgtgagcgtctcgaccgtttcgcgcgtactcgatgaaagattacccacctcacgcagcgcctcggcagataaaattcgccaggtggcccgagagctgggctaccgtcgggactatgttgcttccagcctgcgccgtggcgacaccggaacgcttggcgtcctggttccgaggctgaccgatgccgtcacggcgatgcttttcgaagagatagccagggctgcggcgaggagagggtatttcgcgatcgtggcgacctgtggagatagcaaggagcaggagaagaacgccgttgaatcactgctggatcgtcgtgtggatgggttgattatgtcaacctgccggctggacgatcctttgccgcaagccctgcgtgaacgggatgtgccccatgttctggcgctgcgcaccgatgggtttagtccttcatcggtcggggacgatgagcttggcggttatttggcaacccgacacctgatagatttaggccatcgtgatattggcttgatcggcggtcccgattttgcctccaatgcgcttaaccggcgtaaaggctttgagcgggcaatgcaggaggccgggctaaggatcgaagcggaatggtgctgccattctgattttaatatcgcctctggagagcagcagggaatgaaaattctcagccagccccatcgcccgagtgcgttgtttgccgtcaatgacgagttggcgattggcgtgctcgctgccgcccatcagctagggctggtgattggcgaggatctgtctctggtgggatacaatgatattcctctggtgagcaggctgcccgtagccttgacttcggttagaacgccactggagcatatcgccagtaatgcggttgatatgttattgaatccagaagtaaataataatatgcggattaccacgccttcccttattcctcgtaagtctacctcgtccccacgttaa

SEQ ID NO: 89559 - DNA, 930 bp, Enterobacter aerogenes
atgattaacatcgatctcagaggtttgactccggctccggttacacccttcactcgtgaggggcgcgtagattatgatgccatccagcgtctcggtagttggctgggcagcattgacggcgtaaaaggtctggtggttctgggacacgcaggggaagggacttttctaactcaggaagagcaggcgaatgtgatccgcgcatttgtgaagtctgtagatggcaagcttccaattattgccggtatcaccggagaagggacggaagtcgctgcgctggaggccaagcgtgctgttgccgccggcgcatccgctggtttgctatatccttctcacggctggttgcgttttggctatcaggatggcgcgcctcaggatcgttaccgcgtggtttatgaagaaagtggcctgccgctgattcttttccagtatccggacgtcactaaagccacctacaatctgcaaacgctattggatatttccgcacagcctggtgtattcgccatgaagaatggcgtgcgtaatatgcgccgctgggatactgaaattccggttattcgccgcgagcgtccagatctgcaaattttaagctgccacgatgaatatctgctgcacaccgcgtttgatgtcgatggcttcctggttggctacggtaatatcgcgcctgaaccgttaattgaaatgattaaggcgggtaaagcgggtgattatgtaaaagcgcgtgagctgcacgatcgactgctgccggtgaccaaaagcgtataccaccgcggttctcatatggaagggaccgtggcgcttaaacatgctttagtcgcgcgtgggatccttgagcatgccaccgtccgctctccgcttttgccgctcgaaaaaggggctgaaaaagagatccacgacgccatgcgcgctgctgagctgggcctcgttcgttaa

SEQ ID NO: 89560 - DNA, 1290 bp, Enterobacter aerogenes
atggtattagttcagtttctggtcgtgctgctgtttctttatatcggcatgcgggttggcggtattggcgtaggttttgccggcggcgctggcgtgattgtcctcagcgccctcggcgccacgccgggggatatgccgatgctggttatcgtgtttatcatggtggtgatcgtggcgattgcggccatgcaggaggccggcggtatcgaatatctggttgacctcactgagcgcctgctgcgccgctatccgcgattgttagtcatcaccgcgccgctttccacctggctattaaccatgatggccagcaccggacaggtctcttttgcctgtatgccggtgattgtcggcgtggcgaaagagaacaatataaaacccacccgggcgcttgctctctccgtcagcgcctctttgcttggcattgtggcatcgcccatttccgcggcggtgattttcttctcggggattctggaaaagagccattctggctggggctatattgagcttattgcggtatccatcccttccacctttcttgcgttacttgtcacctccgtgttttacctgtgctgggacagaattcgtcggcaggataggctctatggcaatccggtgcaggtgaaggcacggactgagcgggagatcccgccttatgccgctcgttcggtgctgatctttatcgttgggctggtggtggtgctgtgctatgcgattgtcaccagccccaaattagggctgattaccaatccggtcatgagcagcgggcaggcgcgggtaggggtgatgttgggcgttgcgctgctgattctggtgagttgccgggttaacgtacaaaaagtcccgtccggctcggtatttaaaaccgggatgacctcctgtatctgtatactcggcgtcgcctggctggggtcaacctttatggacagcaatcaacagtggttgcaaagtacgctctcgtcacatttattggattcacccattatgctggccattattattatggcggcgtcatgtttcctgtattctcaggcggcttcaacaaaaattttatttcccgccgcgctgagtatgggcgttgcccccggtattctggtggcctgtttcccggctaccgcttcgctttttattttaccaaactatccgacgttactggcggcggtagaactggatgttaccggctcgactaaactggggcgacatattatcgatcatccttttctgctgcccggtctggcatcggtgctgctttctattcttttcgcggccggactggcttttttgattcagtga

SEQ ID NO: 89561 - DNA, 300 bp, Enterobacter aerogenes
atgtcagcagtaattgataaagcactggattttattaatggcatgaacacgtcatcttcagcaccgcacaccatggatgaaagtacggctaaaggcattttcaagtatcttaacgagttaggcgctccggccagcgcagctgatgtatatgcccggggcactcaagagggctgggatcctgaatttactaaaacgttagcgggatgggcggaacgaattgagtccggcgagcgtatagttattaagaatcctgagtacttttcttcatacatgcgcgaggaactgcgggctctggtataa

SEQ ID NO: 89562 - DNA, 507 bp, Enterobacter aerogenes
atgattagcgatatcctggcgccggggctgcgggtggtcttttgcgggatcaatccggggaagtcctccgcgcatacggggtttcattttgcccatcccggcaatcgtttctggaaggtcattcaccaggcggggttcaccgagcgacagctgaagccggaagaggagcagcatctactggataccggctgcggtatcaccatgctggttgagcggccgacggtacaggccagcgaggttgccctgctggagctgcgtaatggcgcgcaggagctaataagcaaaatccaggactatcagccgcaggcgctggcggtgctcggcaagcaggcctatgagcaggcgttcagggtgcgtggcgcaaagtggggaaagcaggaagcgaccatcggtgaaaccgaaatctgggtgctgcccaatcccagcggtttgaaccgggcgacgctggacaagctggttgaagcctatcgcgaactggatgaggcgctggcggggcgagggcggtga

SEQ ID NO: 89563 - DNA, 1845 bp, Enterobacter aerogenes
atggagcaaaacccgcagtcacagctgaagcttcttgtccaacgtggtaaggagcaaggctatctgacctatgccgaggtcaatgaccatctgccggaagatatcgtcgactccgatcagatcgaagacatcatccaaatgatcaacgacatgggtattcaggtgatggaagaagcaccggatgccgatgatctgctgcttgctgaaacctccaataataccgatgaagacgcagaagaagcggcggcccaggtgctgtcgagcgttgaatctgaaattggccgtacgaccgacccggtgcgcatgtacatgcgcgaaatgggtaccgttgaactgctgacccgcgaaggcgaaatcgacatcgctaaacgcatcgaagacgggatcaaccaggtccagtgctccgttgcggaatatccggaagccatcacctatctgctggaacagtacgatcgcgtcgaagctgaagaagctcgcctgtctgacctgatcaccggcttcgtcgatccgaacgctgaagaagatatggcgccgaccgccactcacgtcggttccgagctgtctcaggaagagatggacgacgacgaagatgaagaagaagatgatgacgacgacaacagcgatgacgataacagcatcgacccggagctggcccgcgagaaattcgccgagctgcgcacccagtacgagctgactcgcgacaccatcaaagcgaaaggtcgcagccacgccgccgcgcaggaagagatcctcaagctgtccgaggtcttcaaacagttccgcctggtgccgaaacagttcgattacctggtcaacagcatgcgcagcatgatggatcgcgttcgtactcaagaacgtatcatcatgaagctgtgcgttgaacagtgcaaaatgccgaagaaaaacttcatcaccctgttcaccggcaacgaaaccagcgaaacctggttcaacgccgccgtggcgatgaacaagccgtggtccgagaagctgcatgacgttaaagaagacgttcagcgcggcctgcagaaactgcagcagattgaagaagaaaccggcctgaccatcgagcaggttaaagatatcaaccgtcgcatgtccatcggcgaagcgaaagcccgtcgtgcgaagaaagagatggttgaagcgaacttacgtctggttatttctatcgccaagaaatacaccaaccgcggtctgcagttcctcgacctgattcaggaaggcaacatcggcctgatgaaagcggtagataagtttgaataccgtcgtggctacaagttctccacctacgcgacctggtggatccgtcaggctatcacccgttccatcgcggatcaggcgcgcaccatccgtattccggtgcatatgattgagactatcaacaagctcaaccgtatctcccgccagatgctgcaggaaatgggccgcgagccgacgccggaagagctggctgagcgcatgctgatgccggaagacaaaatccgtaaggtgctgaaaatcgccaaagagcctatctccatggaaacgccgatcggcgacgatgaagattcgcatctgggtgacttcatcgaggataccaccctcgagctgccgctggattctgcgaccaccgagagcctgcgtgcggcaacgcacgacgtactggcgggcctcaccgctcgtgaagcgaaagtgctgcgtatgcgtttcggtatcgacatgaacaccgaccacacgctggaagaagtaggtaaacagttcgacgttacccgcgaacgtattcgtcagatcgaagccaaggcgctgcgtaaactgcgccacccaagccgttctgaagtgctgcgtagcttcctcgacgattaa

SEQ ID NO: 89564 - DNA, 1746 bp, Enterobacter aerogenes
atggctggacgaatcccacgcgtatttatcaatgacctgctggcgcgcaccgacatcatcgatttgatcgatgctcgggtgaagctgaaaaagcagggcaagaattatcacgcgtgttgtccattccataacgaaaaaaccccctccttcaccgtcaacggtgaaaaacagttttaccattgcttcggctgcggtgcgcacggcaacgccatcgactttctgatgaactacgacaagctcgagttcgtcgaaaccgtcgaagagctggccgccatgcacaaccttgaagtgccctatgaagcaggtaatggaccgagccagatagaacggcatcagcggcagaatctttatcaactgctggacggtctgaacacgttttaccaacagtctctgaatcaacccgccgccgaacccgcgcgccagtatctggcaaaacgcggcttaagcaacgaggtgattacccgcttcgcaataggcttcgctccccctggctgggataacgttttaaaacgttttggtggcaatcaggaaaaccgccagtcgcttattgatgcaggcatgctggtcaccaacgatcaggggcgcagttacgaccgcttccgcgaacgggtaatgttcccgatccgcgataagcgaggccgggtgattggttttggcgggcgcgtgctgggcgatgcgctgccaaaatacctgaactccccggagaccgatattttccataaaggccgccagctgtacggcctgtatgaagcgcagcaggataacgccgaacctcagcgtctgctggtggtcgaaggctatatggacgtcgttgcgctggcgcagtacggcattaattatgccgtggcctcgctgggcacctcgacgaccgccgaccacattcagctgttgttccgggcgaccaatcaggtcatctgctgttacgacggcgaccgggctggccgcgacgcggcatggcgcgcgctggaaacggcgctgccgtatatgaccgatggccgccaactgcgttttatgtttttacctgatggcgaagacccggatacgctggtgcgtaaagagggcaaagaggcgtttgaagcgcggatggagcaggcacagccgctctccacgtttttattcaatagcctgatgccgcaggtcgacctgagcactccggatgggcgggcgcagctgagcacgctggcgctgccgctgataacccaggtgccgggtgaaacgctgcgcatctatttgcgtcaggagctgggtaacaagctgggtattctggatgacgcccagcttgaacgtttaatgccgaaacaggcggaaaatagcgctccgcgcccggcgccgcagctaaaacgcacgaccatgcgtatacttatagggttactggtgcagaaccccgatctggcgccgctggttccgcccttaacgggtctggatcagcagaagatgccagggcttggtttattcagcgaactggtcaatacgtgtctggcgcagccaggtctgaccaccgggcaacttttagaacagtatcgcgggacaaatgaagcagcaacccttgaaaaactgtcgatgtgggacgatatagcagataaggatatcgctgaacaaaccttcaccgactcgctcaaccatatgtttgactcactgctggaactgcgacaagaagagttgatagctcgcgatcgcacacacggtttaagcagtgaggagcgccgggaactctggactatcagccaggaactggccaaaaaatga

SEQ ID NO: 89565 - DNA, 216 bp, Enterobacter aerogenes; identical to SEQ ID NO: 1207

SEQ ID NO: 89566 - DNA, 1014 bp, Enterobacter aerogenes
atgcgtgtactgggaattgaaacatcctgcgatgaaaccggcatcgctatttacgacgataaacaaggtctgttagccaaccagctgtatagtcaggtgaaattacatgctgactacggcggcgtggtgcctgagctggcgtcgcgcgaccacgtacgtaaaaccgttccgctgattcaggcggcgctcaaagaagcgggcctgacggcgaaagatattgatgccgtcgcctatacggcaggccctggcctggtgggcgcgctgctggtcggcgcgaccgttggccgctcgctggcgttcgcctggaacgtgccggcgatcccggtacaccatatggaagggcatctgctggcgccgatgctggaagataacccgccggcgttcccgttcgtcgctctgctggtttccggcggccacacccagctgattagcgtcaccggcatcggccagtatgagctgttgggcgagtcaatcgacgatgccgctggcgaagcctttgataagacggcgaaactgctggggctggattatcccggtgggccgatgctgtcgaaaatggcgtcccagggtacggaaggccgcttcgtcttcccgcggccgatgaccgatcgtccggggctcgacttcagcttctccggcctgaaaaccttcgccgctaataccattcgtaacaacggcgacgatgagcaaacccgtgccgatatcgctcgcgcatttgaggatgcggttgtcgatacgctgatgattaaatgccgccgcgcgctggagcaaaccggctttaagcgtctggtgatggcggggggcgtgagcgctaaccgtacgctgcgcgcgaagctggcggaaatgatgagcaaacgcggcggcgaagtgttttatgcccgtcctgagttctgtaccgataacggcgcgatgatcgcttacgccgggatggtccgcctgcagggcggcggcaatgctggactcggcgttaccgtgcggccgcgctggccgttggcggaactgccggccgcctga

SEQ ID NO: 89567 - DNA, 1470 bp, Enterobacter aerogenes
atgactgatgtaattaacgcgacgcctgcggcaacctctgcgtcgcccggcggggaagtaaaatggatcggcagcgcggcggacgtctcgcgcctcataaacgaaggcagcagcgggcgcaataacgcgcgtatcgtcatgggaatcgccctcggcggtattttccttgatgcctacgatcttggctcgctggccttcggcctgaaagatatcacccgggaattcaacctgacgcctgccggtaccgggatggtcgcctcggccatcaccttcggcgctatcgttggcgcgctactcggcggttatctgaccgacaaaattggccgctaccgtgtgtttatggcggatatgctgttcttcgtggtagcggccatcgcctgcgcgctggcgccgaatgaatacgtccttaccggcgcacgcttcgtgatgggcctgggcgtcgggatcgacctgccggtggcgatggcgtttctcagcgaattcgcgaggctcaaaggtcccggtaacaaggcggccagcgtggcgatgtggtgcccaacgtggtacgcggcgatcagcatttcctatctgctggtactctttttttatgccgtcctgccggaaagccatagcgactggctatggcggattatccttggttttggcgccatcccggcgctggtgattatcgctatccgtagccgctacatgagcgaatcgccggtgtgggccgccaaccagggtaacctgcgtgaagctgcttctattctacgccaggcgtacaacatcaatgcgcacgttgcccaggacgcgctggaaaaaccggcgccaaaagttcgtagcgcccaatggagtaactatctgcgcctgttccgcggtgtctacctgcgccgcacgacgctctctaccctgctatcggtggtttcctcatttgcctataacgccgtcgcgttcggtctgccggtgatcatctccagcttcttcgtgcaatcgatgctgacgacgattttgatttcgctggcgctgaatctgctgttcgctttcgtgggagggatactggcggtacgcctggtaccgcgcttcggggcgtggcggatgtcgctggcgggttatggctgccagctgacggcgctgctcggcctggcgctgattggccgccctgatggcgcaggtgaaggcgtcgctgccgtggcgatgctggcactgttccttttcggccagggattcggccccggcgcgcacaccatgaccttcgcctcgttaagctatccgacatcgctgcgcggcgttggcgtcgggctcaaccagacgctcatgcgcggcagctcaacgctttctttattcctcttcccgctgctggtcgccgcgctggatacccgcgtcttctggatcatcgccgcggcgccgctgattgggctattgtcgctgttggctatccgctgggagccgtcgggctacgacatcgacgccgaggattatcagcagccttaa

SEQ ID NO: 89568 - DNA, 621 bp, Enterobacter aerogenes
atgagtgcaatcgcgcctggactagttatcctcgcctacctctgcggctcaatttccagcgccattctggtgtgccgtcttgctggtttgcccgaccctcgcgatagcggttccggcaaccccggggcgacgaacgtactccgaattggcggcaagggagcagccgtaacggtattaatttttgatgtcctgaaagggatgctgccggtttggggcgcctgggcgctcggtctgacgccgttctggctcgggctggtggcgatcgccgcctgcgtaggccatatctggccggtgttctttaatttccgcggcggtaaaggcgtggcgaccgcatttggcgctatcgcgcccatcggctgggatctcaccggcgtaatggccggcacctggctgctgactattctgctcagcgggtattcctcgctgggcgctatcgtcagcgcgttggtagcccctttctacgtctggtggttcaaaccgcagtatactttcccggtctccatgctctcctgcctgatcctgctacgccatcacgacaatatccagcgtctgtggcgccgtcaggaaacgaaaatctggtcacgctttaagaagaagaaaaaaacgccagagcagaaataa

SEQ ID NO: 89569 - DNA, 384 bp, Enterobacter aerogenes
atggatattgtatttatagagcaactttcggtaatcaccactatcggtgtttacgactgggaacagaccatcgaacagaaattagtgttcgatatcgaaatggcgtgggataaccgcaaagcggccgccagcgacgatgtgagcgattgcctgagctatgctgatatcagcgaactggttatcaaccacgttgagggcgggcgttttgcgctggtcgaacgggtggcggaagagatagccgatctactgctgcaaaaattcaattctccgtgggtgcggattaaagtcagcaagcctggtgcggtggcccgtgcggccaacgttggcgtgatcattgaacgtggcagtaatctgaaacaaaacgtttctcgtcataatgtttaa

SEQ ID NO: 89570 - DNA, 822 bp, Enterobacter aerogenes
atgggcgatttacactcgctgctgatagcggcaattttgggtgtggttgaagggttgacggagtttttaccggtttccagtacgggacatatgattatcgttggccatctccttggttttgaaggggataccgccaatacttttgaagtcgtgattcaactaggttctattctcgccgtcgtcgtggtgttctggcgtcgactgtttggcctgattggcattcattttggccgtcctctgcagcatgagggcgtaagccaggggcgcttgtcgctgattcatatcctgttaggcatgatcccggcggtggcgctggggctggtgtttcatgacctgattaaatcgctgtttaacccggttaacgtgatgtacgcgctgattgtcggcggcttcctgctgatcgcggcggagctatttaaaccgaaagagccgcgcgctgtgggcattgatgatatgacctatcgtcaggcgtttgccatcggttgcttccagtgtctggcgctgtggccgggcttctctcgctccggggcgaccatttccggcggcatgctgatgggcgttagccgctatgcggcatccgagttctcattcctgctggcggtaccgatgatgatgggcgccaccgtgctggacgtctacaagagcatcggcttccttaataccggggatattccgatgttcgccgtcggttttatcatggcgttcatcgtggcgctgattgcgattaaaaccttcctgcagctgattaaacgtatttcgtttattccgtttgcaatctaccgctttatcgtcgcggcagccgtctacgtggtcttcttctaa

SEQ ID NO: 89571 - DNA, 1242 bp, Enterobacter aerogenes
gtgaagatttatttggtcggtggtgcggtacgagatgcgttattaggactaccggtcaaagacagagactgggtggtggttggtgccacgccccagcagttgctcgacgcgggctaccagcaggtaggccgcgattttcccgtgtttcttcacccgcaaagccgtgaagagtacgccctcgcgcgtaccgaacgtaaatccggttccggctataccggtttcacctgttatgccgccgctgacgtcacccttgagcaagatctactgcgccgcgatctcaccattaacgcgctggctcaggacactgacggtcagatttacgatccctatggcggccaggccgatttacgccagcgcctgctgcgccacgtctccccggcctttagcgaagatccgctacgcgtactgcgcgtcgcgcgttttgccgcacgttatgcccatctcggttttcgcattgccgatgaaaccatggcgctgatgcgcgcgatggcggacgccggcgaactggcgcatttgacggcggagcgggtatggaaagagacggaaaacgcgcttggcacgcgtaatccgcaggtctttttccagaccctgcgcgactgccacgcgctgaaggtgctgttcccggaaatcgacgccctgtacggtgtccccgcgccggccaaatggcatccggaaatcgacaccggcgttcataccctgatgacgctcaccatggcggcgatgctatcgccggccatcgacgtccgcttcgccaccctgtgccacgatctcggcaagggcttaacgcccaaagagttctggccgcgccaccatggccacggcccggcaggggtaaaactggtggaacagatttgccagcgcctgcgggtgccgaacgatattcgcgatctggccagactggtcgccgaattccacgatctgatccacaccctgccgattctgcagccaaaaaccatcgtgaagctgtttgatagcatcgatgcctggcgcaagccgcagcgcgtgcagcaaatcgccctcaccagcgaggccgacgtgcgcgggcgtaccggttttgaatcctgcgattatccgcaggggcgcctgctgcttgaagcctgggaagtggcgcagtcggtctctactaaagaggtggtagcggaaggtttcaaaggaccggagattcgcgaagagctgacgcggcgcagaattgcgtccgtggggcagtggaaagaacaacgttgcccccagccgcaaggctga

SEQ ID NO: 89572 - DNA, 621 bp, Enterobacter aerogenes
atgccaaaattacgccttattacctttacattgctagcgcttagcgccgctacggcggttcacgcagaagaaaagcgctacgtttccgatgagctgagcacctgggttcgcagcggtcctggcgataactatcgtctggtcggcaccattaacgccggcgaagccgtcgacgttctgcaaaccaacgacagcacgaattacgcgcaggtacgcgatagcaacggccgtaccgcctggatcccgctgaaagagctgagcaacgagcccagcctgcgcattcgcgtgccggatctggaaaatcaggtcaaaacgctgaccgacaagctgaacaatattgacgccacctggaaccagcgtaccgccgacatgcagaaaaaagtcgccggtagcgatggcgcgatcaatgccctgaaagaagagaaccaaaagctgaaaaacgagctggttgtcgctcagaaaaaggtgaacgcggcgaatctgcagcttgatgataaacagcgcaccattatcatgcagtggtttatgtacggcggcggcgtgcttggcgtcggtctgatccttggtctggtgctgccgcatctggtaccgagccgcaagcgtaaagaccggtggatgaactaa

SEQ ID NO: 89573 - DNA, 1296 bp, Enterobacter aerogenes
atggctcaagaaatcgaactgaagtttatcgttgcccacgacggcgttgaggcgctgcgccagcatctcaattcgctggatgcgcagcacacgccggcaggccaactgctgaatatttactacgaaaccgccgataactggctgcgtcggcacgacatggggctgcggatccgcggcgatcgggagcgctatgaaatgacgctgaaaattgccggtcgggtggtgggcggcctgcatcagcgtccggaatacaatattccgctggaaaaagcagagctggcgctggataaactgccggcaaaagtctggccgcaggggcagttgccggcagaactggcgcaaaatgtgcagccgttgtttagcactgatttcctccgcgaaaaatgggtggtgaaagagggcaacagccagattgaaatagccctcgaccttggcgaagtgaaagccggtgagcatcaggaagccatttgcgaactggagcttgagttgttgagcggcgatactgccgacattctggcgctggcgcggcgtttactggcaaccggcgtattgcgccagggcagcctgagtaaagcggcgcgcggctatcagctggcgcagggcaatgaagcgcgtccggttaaaccgttaacggtagtaggcgtggcggcgaaagccagcgtcgagcaggggctggaagcggcgctggaaagcgcgctggcgcactggctctatcatgatgaagtctggaaccagggcaacgcggcggctaagcgtgaaatccagcgggcgatggctcgcgtacgccatgcgctggtgttgtttggcggcattgtgccgcgaaaagccaccgtacagttgcgtgaatcgctcactgaggccgaagcggcgctggacggagcggagaaagccgaagcggcgttgttcaaccgcgccacggttggcgccaaactgctgctgaccgaatggctggttacccgcggttggcgttcgttcctcaacgaggcggggcaaaagaaaatcgccggttcgttcaaacgctttgccgatatccagctgtcgcgagcggcggcggagctgaaaagcaacttccagcagacgcaggacgactatagcgatcggctcacgcgtctggcgcgcgagatcgacagcattcaattgctttccagcgcctatgccggggtggctgaggcctggctggaaaactggcaagaggtgcgccgcgctatcgagaacaatgaccgcagcgtcatcgaatatttccgtcgtcaggcgctggccgcggaaccattctggctgcatagtggaaaacgataa

SEQ ID NO: 89574 - DNA, 2835 bp, Enterobacter aerogenes
atggcgctttcttcgcagttacagcagcactggcagacggttgtaaaccggcttccggcagattttcccctgcaaacattaagttcgcaggcgcagtcggtgatgacattcagcgagttcgttgaacagagtctggtcgctcagccgcagtggctggctgaactggaaagcgcgccgccgcaggccgacgaatggcgccattacggcgactggctggcggaacagctacaagaggtgactgacgaggccgcgctgatgcgcgagctacgccagttccgccgccggatgatggttcgtatcgcctgggcgcaggcgctgctgctggtgagcgaagagagcagtttgcagcagctcagcgccctggcggagaccttaatcgtcgccgcccgcgactggctgtacgccgcctgctgccgggagtgggggacaccgtgcaatgcgcagggcgaagcgcagccgctaatgatcctgggcatggggaaactgggcggcggagagcttaacttctcttccgatatcgacctgatttttgcctggccggaacacggcgccacccagggcggacgccgcgagctggataacggccagttctttacccgtctgggccagcgattaatcaaagtactcgatcagccgacgcaggatggcttcgtctaccgcgtggatatgcgtctgcgaccatttggcgacagcggcccgctggtgttgagctttgcggcgctggaagattattaccaggagcaggggcgcgactgggagcgctacgcgatggtaaaggcgcggatcatgggcgataacgacggcgtgtacgccaacgaactgcgcgccatgctgcgcccgttcgtcttccgccgctacattgatttcagcgtcattcagtctctgcgtaacatgaaagggatgattgcccgtgaagtgcgccgccgaggcctgacagacaatatcaagctcggcgcgggcggcattcgcgaaatcgaatttatcgttcaggttttccagctgatccgcggcggtcgcgaaccggccttgcagcagcgcgcgctgttgccgacgctgacggcgattgacgagctgcatttgctgccggaaggcgatgccgcccagctgcgcgaagcctatctgttcctgcgccgtctcgaaaacctgctgcagagcattaacgacgaacaaacccaaaccctgccgcaggatgagctcaaccgcgcgcgcctggcgtgggggatgcgcgtcgccgactggcagacactcagcgcacagcttgaagagcaaatgcgccgcgtgcgtcgcgtctttaacgagcttatcggcgacgacgaggcgcaatcgccggatgaacagctggaagagtactggcgcgaactgtggcaggacgcgctggaagaagacgacactacgccggcgctggcgcaccttgatgacaacgatcggcgcagcgtgctggcgttgatcgccgattttcgcaaagagctcgaccggcgcaccattggcccgcgcgggcggcaggtactcgaccagctgatgccgcatctgctcagcgaggtctgctcacgggcggatgcgccgctgccgctggcgcgaatcaccccattactgaccggaatcgtcacccgtaccacctatctggagctgctcagcgaattccccggcgcgttaaaacacctgattagcctgtgcgccgcttcgccgatggttgccagccagctggcgcgccacccgctgctgctggacgaactgctggatccgaacacgctttatcaaccgacggcgaccgatgcgtaccgcgatgaactgcgccagtatttgctgcgcgtgccggaagaagatgaagaacagcagctggaagcgctgcgtcagtttaaacaggcgcaattgctgcatatcgccgccgccgatattgccggcacgctaccggtgatgaaagtgagcgatcacttaacctggcttgccgaggcgatgatcgacgcggtggtgcagcaggcgtggcttcagatggtcgcccgctacggtcagccgactcatcttcgcgaccgtcaggggcgcggttttgcggtagtgggttacggtaaacttggcggttgggaactgggttatagttccgatctcgatctggtcttcctccacgactgtccgatggaggtgatgaccgacggcgaacgggaaatcgatggccgccagttctatctgcgccttgcccagcgaatcatgcatcttttcagcacccgcacctcgtcgggcatcctgtatgaagtggacgctcgcttacgtccatccggcgcggcgggcatgctggtgaccaccgccgatgccttcgccgattatcagcgcaatgaagcctggacctgggagcatcaggcgctggttcgcgcccgggtggtgtatggcgacccggcgctgcaggcgcgctttgatgcgatccgccgcgatatcctgaccacgccgcgtgaaggcgcgacgctgcagaccgaagtacgtgagatgcgggaaaagatgcgcgctcatctcggcaataagcagcgcgatcgctttgatatcaaagccgatgccggcgggatcaccgatattgaatttattacccaatatctggtgctgcgctacgcgcatgaaaagccaaagctgacgcgctggtccgataatgtgcgtattctggaactgctggcgcagaacgacatcatggatgaggacgaggcgcgggcgcttacccatgcctacactacgctacgcgatgcgttgcaccatctggcgctgcaggagctgccgggcaacgttgcgccggatgctttcgacggcgaacgtcagcaggtgagcgctagctggcagaagtggttgatggcttaa

SEQ ID NO: 89575 - DNA, 1434 bp, Enterobacter aerogenes
atgaaagtaacgctgccagagtttgaacgtgcaggagtgttggtggtaggcgatgtgatgctggaccgctactggtacggccccaccagccgtatttccccggaagccccggtgccggtggtgaaggtggaaaatatcgaagaacgccctggcggcgcggctaacgtggcgatgaacattgcgtcgctcggcgcgacttctcgtctggtcggcctgaccggtatcgacgatgccgcgcgcgcgcttagcaaagcgctggctgacgtaaaagtgaagtgtgatttcgtgtcggtaccgacgcatccgaccatcaccaagttgcgcgtgctgtcgcgcaaccagcagctgatccgcctcgattttgaagagggtttctccggggtcgatccacagccgatgcatgaacgtattcagcaggcgctgggttcgatcggcgcgctggtgctgtcagactacgcgaaaggcgcgctggccagcgtgcagaccatgattaagttggcgcgggatgccggcgttccggtgctgattgatccgaaaggcactgaatttgaacgctaccgcggggcaacgctgctgacgccgaacctgtctgaattcgaagcggtcgccggaaagtgtaaagatgaagcggaaatcgtcgaacgcgggatgaaaatcatcgccgacttcgagctttccgcactgctggtaacgcgctccgagcagggtatgacgctgctgcagccgggtcgtccgccgctgcatatgccgacccaggcgcaggaagtgtatgacgtcaccggggcaggcgacacggttatcggcgtgctggcggcgacgctggcggcgggtaacaccctggaagaggcctgctatttcgctaacgccgcggccggtgtggtggtcggcaagctggggacgtccaccgtttcgccaatcgagctggaaaacgcggtgcgcgggcgtgccgataccggttttggcgtgatgagcgaagaagagctgaaacaggcggtcgccgcggcgcgtaagcgtggcgaaaaagtggtgatgaccaatggcgtgttcgacattctgcacgcgggtcacgtttcgtatctggccaatgcgcgcaagctgggcgatcgtctgatcgtcgccgtcaacagcgatgcctcaaccaaacgtctgaaaggcgaaacccgcccggtcaacccgcttgaacagcggatgatcgtgctgggagcgctggaagccgtcgattgggtcgtgtcgtttgaagaagatacgccgcagcggctgattgccgggatcctgccggatctgttggtgaaaggcggtgattacaagccggagcagatcgccggcagcgaagaggtatgggccaacggcggcgaagtgctggtgctcaactttgaagatggctgctcgactaccaatattatcaagaagattcagaaagatagcgacaaataa

SEQ ID NO: 89576 - DNA, 198 bp, Enterobacter aerogenes
atgaaccataacgatatgtattctatgaagaacttcgattttctggcacgtagtttcgccaggatgcacgcgcaaggccattcggttgatcttcaggctattgtcggcaatatggatgaggaacatcgtgaatggttttgccaacgctatgagctttattgtcgtcaggtgaatagcccggccgagttagagcattaa

SEQ ID NO: 89577 - DNA, 270 bp, Enterobacter aerogenes
atgattgacccgaaaaaaattgaacaaatcgcccgccaggtccatgaatcgatgccgaaaggccttcgcgatcttggagatgacgtagaaaagaaaatccgccaggtactgcaatcgcagttaactcgtctggatttggtcagccgcgaagagttcgatgtgcaaactcaggttctgctgcgcacccgcgaaaagctggctttactggagcagcgcattagcgatctggaaagccgttcagctgcgccgaagagcgaagaacagcaataa

SEQ ID NO: 89578 - DNA, 654 bp, Enterobacter aerogenes
atgaatcagacgctcctttcttcttttggtaccgcttttgaacgtgtggaacacgctttagacgcactgcgcgaaggccgcggtgtgatggtgcttgatgatgaagaccgtgaaaacgaaggcgatatgattttcgccgccgaaaccatgaccgttgagcaaatggcgctgaccattcgtcacggcagcggcattgtctgcctgtgcctgaccgaagatcgccgcaagcagcttgacctgccgatgatggtggagaacaacaccagcgcctacggcaccggctttaccgtgaccattgaagcggcagaaggcgtaaccaccggcgtatccgccgctgaccgcatcacgaccgtgcgtgccgccattgccgatggcgcgaaaccctccgatctcaaccgtccgggccacgtcttcccgctgcgtgcgcagcctggcggcgtaatgacccgcggcggccacactgaagcgaccatcgacctggtgacccttgcgggctttaaaccggcaggcgttctctgtgaactgactaacgacgatggcaccatggcgcgcgcgccggagtgcatcaagttcgctcagcagcacaacatggccgtggtcaccattgaagacctggtggcttaccgccgcgagcacgatcgcaaagccagctaa

SEQ ID NO: 89579 - DNA, 795 bp, Enterobacter aerogenes
atgtcccgtacccgtatgccagcgttgtttttaggccatggtagcccgatgaacgtgctggaagataatatctatacccgcgcctggcgtcatctcggcgaaacgctgccgcggccgaaagctatcgtggttatttccgcgcactggtttactcgcgggacgggcgtgacggcgatggaagcgccgaaaaccattcatgattttggcggtttcccgcaggccttatacgatacgcactaccctgcgccgggatcgccggagctggcgcagcatctggttgacctgctggcgccggtgcccgtcgccctcgataaagaggcgtggggttttgaccacggttcgtggggagtgctgataaaaatgtaccctgatgccgatattcccatggttcagttaagtatcgatagcactaagcccgcggcatggcatctggagatggggcgtaagctggcgtcgctgcgtgatgaaggcattatgctggtggcgagcggcaacgtggtgcataacctgcgtaccgcgcgctggcatggcgaaagcacgccgtatccgtgggcccagtcgtttaacgactatgtcaaagcgaatctgaactggaaagggccggtcgaagcgcatccgctggtgaattatttaagccatgaaggtggttcgctctctaacccaacggctgagcacttcctgccgctgctctatattctgggagcgtgggatggtgaagagccgataacgatcccggtcgaagggatggaaatggggtcgctgagcatgctgtcggtggtcgtgggagccgcgtaa

SEQ ID NO: 89580 - DNA, 1161 bp, Enterobacter aerogenes
atggaaagaatcagcattaccgagcgcccggactggcgcgagaaagcgaccgagtatggcttcaactttcacaccatgtacggcgagccatactggagcgaagaggcctactacaagctgacgctggcgcaggttgaaaagctcgaagcggtcaccgccgagctgcatcaaatgtgtctacaggtcgttgagaaagtgatcgccagcgacgagctgatgaccaaattccgcatccctaagcacacctggggctttgtgcgtcagtcgtggaaaaccaaccagccgtcgctgtactcgcgtctggatctggcctgggatggcgtgggcgaaccgaagctgctggaaaacaacgcggatacgccaacctcgctatatgaagcagcgttctttcaatggatctggctggaagatcagcttaacgccggtaatctgcctgccgacagcgatcagttcaacagcctgcaggaaaaactgattgaacgcttcggcgagctgcgtgaacaatttggcttccagctgctgcatatggcctgctgccgcgataccgttgaagaccgcggcaccgtacagtatctgcaggactgcgcggcagaagcgggcgtcgccaccgagttcctgtatatcgaagatatcggtcttggcgaaaaaggtcagtttaccgatttacaggatcaggtcatcggtaatctgttcaagctctatccgtgggaatttatgctgcgcgagatgttctccaccaagctggaagacgccggcgtacgctggctggagcctgcatggaagagcattatctccaacaaggcgctgctgccgatgctgtgggaaatgttccccaaccaccctaacctgttggcggcttacttcagcgaagataaccatccgcagcttgagaagtacgtcattaagccgatcttttcccgcgaaggcgccaacgtgtcgatcgttgaaaatggcaaagtggtggaggcggtggaaggtccgtacggggaagaaggcaccatcgtgcaggagttttatccgctgccgaaatttggcgatagctatacgctgattggcagctggcttattaacgaccagcctgccgggatcggcatccgtgaagatcgggcgctgatcacccaggatctttcgcgtttctatccgcacattttcgtcgaataa

SEQ ID NO: 89581 - DNA, 672 bp, Enterobacter aerogenes
atgaaacggacaaaaaatattaatcatgcgtcgttccgcaaaagctggagcgctcgccacctgacgccggtcgcccttgccgtcaccgccgtctttatgctcgccggttgtgaaaaaactgacgagacggtttctctgtatcagaacgccgatgactgctccgcggctaacccaagcaaagccgcagagtgcaccaccgcctacaataacgcggtgaaagaagccgcgcgcaccgcgccgaaatacgccagccgtgaagactgcgtcgccgagttcggcgaaggccaatgccagcaggcgccggctcaggcgggcgtcgccccggaaaaccaggcgcaggcgcaaagcagcggcagcttctggatgccactgatggccggctacatgatgggtcgtctgatgggcggcggcatggccgcgcagcagccgctgtttagctcgaagaacccggccagcccggcctacggccagtacaccgatgccagcggtaagagctatggcgcggcgcaaccgggccgtaccatgaacgtgccgaaaaccgcgatggcgccgaaaccggcaaccaccacgaccgtcacccgcggcggtttcggcgaatccgtcgctaagcaatcggcgatgcagcgtagcgccgcgggctccagctcctcttcacgctcgatgggcggttaa

SEQ ID NO: 89582 - DNA, 1455 bp, Enterobacter aerogenes
atgaagaaactttttcccatccttatcggcctgggcctgactggcttcagcgccatgagccaggcagagaacctgttgcaggtttatcagcaggcgcgtattagcaaccctgacctgcgtaaatcggcagccgatcgcgatgctgcattcgaaaagatcaacgaagcgcgaagcccattactgccgcaactcggtctgggcgcggattatacctataccagcgggttccgtgattacaaaaaccagaactccaacgtcaccagcggttcattgcagttaacgcaaaccctgttcgatatgtcgaaatggcgcgcgctgaccctgcaggaaaaagcggcgggcattcaggatgtcacctatcagactgaccagcaaacgctgattctgaataccgcgacggcttactttaaagtcctggccgctatcgatacgctctcctataccgaagcacagaaacaggccatctatcgtcagttggaccaaaccacccagcgctttaacgtgggcctggttgccatcaccgacgtacaaaacgcccgctcgcaatacgacgccgtgctggcaaatgaagtgaccgcgcgtaacgacctcgacaacgccgttgaagagcttcgtcaggtcaccggcaactactacccggagctggcgtcgctgaacgttaacggcttcaaaaccagcaaaccgcaggcggtgaacgcgctgctgaaggaagcggaaaaccgcaacctgtcgctgctgcaggcgcgtctgaaccaggatctggcgcgtgagcagattcgccaggcgcaggatggtcatttacctactcttgatttgaatgcttctaccggtgtctctaataaccgttacagcggttccaaaaacatttcccaggacgccgatgtcgggcaaaacaaagtcggcctgagcttctccctgccgctgtatcagggcgggatggttaactcgcaggtgaaacaggcgcagtacaacttcgtcggcgccagcgagcagctggaaagcgcgcaccgcagcgtggtgcagaccgtgcgttcgtcgtttaacaacgtgaatgcctccatcagcagcatcaacgcctacaaacaggccgttgtctctgcgcagagctccctggatgcgatggaagcgggttattcggtgggtacgcgtaccattgttgacgtgttggatgcgaccaccacgctgtacaacgccaagcagcagctctccaacgcccgttataactacctgatcaacgagctgaacatcaagtccgctctcggcacgctgaacgagcaggatctgatcgcgctgaacaacacgctgggtaaagcgattccgacttcaccggacagcgtcgcgccggaaaatccgcagcaggacgccgccgctgacggttatgcgaacaccgcttccgcacagccggctgccgcccgtacgacgaagaccagcggttctaatccgtttagccactaa

SEQ ID NO: 89583 - DNA, 630 bp, Enterobacter aerogenes
atgagcaaacctaatcagcagggaattaccttctctaaaaacgatgtagaaattattgcacgggaaacgctctatcgcggttttttttcgctcgatttgtatcgttttcgccatcgcctgtttaacggcgggatgagcggcgaggttacccgcgaaatttttgagcgcgggcacgccgccgtcttgctaccctttgacccggtgcgtgatgaagttgtgctggtcgagcagatccgcattgccgcctatgataccagcgagagcccgtggctgctggaaatggtcgccgggatgatagaagaaggcgaaacggtagaagatgtcgcccgccgggaagcgttggaagaggccgggcttgaagttgggcgcaccaaaccaatattaagctatctggcaagcccaggcggcaccagcgagcggttatcgatcctggtgggcgaagttgatgcatcgacagcaaaaggcattcacggcctggccgaagaaaacgaggatattcgggtgcatgtggtgagccgggaacaggcttaccagtgggtagaagaggggaaaatcgacaacgcggcttctgtcatcgccctgcaatggctgcagctgcattatcatagcttacgaaacgagtggaaataa

SEQ ID NO: 89584 - DNA, 423 bp, Enterobacter aerogenes
atgaagcgttatacacctgacttcccggaaatgatgcgcctgtgcgaaaccaatttcgcccagctgcgccgcctgttgcctcgcactgaggcggtcggcgatatggcgaactatcaggtgggggcggcgcaatatcgattaacggtggtcgaatcgacccgctacactacattagtgacaatagaacagactatgcctgcggtgagctactggagcctgccgtcaatgacggtgcgcctgtatcacgacgccatggtggctgaagtgtgttcaagtcagcagatttttcgcttcaaagcgagatatgattaccctaataaaaagttgcatcaacgcgacgaaaagcatcaaattaatcagtttctggccgactggctgcgttactgtttagcacatggagcgatggcgattccggtttgttag

SEQ ID NO: 89585 - DNA, 828 bp, Enterobacter aerogenes
ttggaaagcctgttaaacctacctctggctggtgaggccagagtcaggatattacaaattactgatactcacctgtttgctgaaaaacatgaaacgctgttgggtatcaatatctgggaaagttatcaggctgtattggatgcgatacatgcctcacagcgtgaatgcgacctgattgtagcaacaggcgatctggcgcaagaccactctgccgcggcctatcagcatttcgctgaaggcatcgcgagctttgccgcaccctgcgtctggctgccgggaaaccatgatttccaaccggcgatgtacagcacgctgcacgatgccggcatctctcccgcaaaacgcgtcctgttgggcgatcattggcaaatcctgctgctggacagccaggtctttggcgtgcctcacggcgagctgagcgatttccaactggagtggcttgagcatcaattgaatgcggaacctgagcgctacacgctgctgttactgcatcatcatccgctgccggcgggctgcagctggctcgatcagcatagcctgcgcaacgccggggcgttagaccacatcctgagcaactatccgcgggttaagcacctgctatgcggccatattcaccaggagctggatctcgactggaacgggcggcggatgatggcgacgccatcgacctgcgtgcagtttaaaccgcattgcgctaatttcaccctcgataccgtctctccaggctggcgctggcttgaactgcatcctgatggcgtgttgacgactgaagtctgtcgtctcagcggcgccgagtttcacccggatatcgcttcagaaggatactga

SEQ ID NO: 89586 - DNA, 576 bp, Enterobacter aerogenes
atgtctactcttctttatctgcacggatttaacagctcgccgcgctcggcaaaagcgacggcgctgaaaacgtggctggcgcagtaccacccggaaattaacatggtggtgccggaactgcctgctttcccggcgcaggcggcagagatgctggaagccatcgtgctggagcacggcggcgagccgttaggcgtggtggggtcgtcgctgggcggctactacgccacctggctgtcgcaatgttttatgctgccggcggtggtgattaacccggcggtgcggccattcgaactgctgaacaattttcttggccccaatgagaatccgtacaccgggcagcaatatgtgctagagtctcgccatatttacgatcttaaagtcatgcatatcgacccgctggaagcgcctgaccttatctggttattgcagcaaacgggcgatgaagtgcttgattaccgccaggctgttgactacttcgcctcctgccgtcaaacggtcgaggagggcggtaatcacgcatttgttggctttgaagatcatttcacccagattatcgattttctgggcctgcgctaa

SEQ ID NO: 89587 - DNA, 1896 bp, Enterobacter aerogenes
atgacgcaatcttcatataacgctgatgccattgaggtactcaccgggcttgagccggttcgccgccgcccgggaatgtacaccgacacaacccgtcctaaccatcttggtcaggaagttattgataacagtgtggatgaagcactggccggccacgccaaacgcgtggaggtcatcctccatgccgatcaatcgttggaggttatcgacgacgggcgcgggatgccggtcgatatccacccggaagaaggggttccggcggttgagctgatcctttgtcggctgcacgcgggcggtaagttttccaacaaaaactaccagttctccggcggcctgcatggggtggggatctcggtcgtcaacgccttgtctaagcgcgtggaagtcaacgtgcgccgcgatggtcaggtctacagcatcgcctttgaaaacggggaaaaagttgaagacctgcgcgtcaccggcacctgcggtaaacgcaacaccgggaccagcgtccatttctggcctgacgaaagcttcttcgatagcccgcgtttctccgtctcgcggctaactcacctgttaaaagcgaaagcggtgctgtgcccgggcgtggaaattgtgttccgcgaccaggtgaacaacagcgagcagcgctggtgctatgcggacggccttaatgattatctgtgcgaggcggtcaacggcctgccgctgctgccggaaaaaccgtttgtcggcaacttctccggtgaaacggaagcggtggattgggcgctgctgtggctgccggaaggcggcgaactgctgaccgaaagctacgtgaacctgatcccgactatgcagggcggtacgcacgttaacggtctgcgtcaggggttgctcgacgcgatgcgcgagttttgcgaataccgcaatattctgccgcgtggcgtgaagctgtcggcggaagatatctgggatcgctgcgcgtacgtactgtcggtgaagatgcaggatccgcagttcgccgggcagacgaaagaacgtctgtcgtcgcgccagtgcgcggcattcgtctccggggtggttaaagacgccttcagcctgtggctgaatcagaacgtacaggcggcggagctgctggcggaaatggccatttccagcgcccagcgtcgcctgcgcgccgccaagaaagtggtgcgcaaaaagctcaccagcggcccggcgctgccgggtaagctggcggactgcaccgcgcaggacctgaaccgcaccgaactgttcctcgtcgaaggggactcggcgggcggttcggcgaaacaggcgcgcgaccgtgaatatcaggcgattatgccgctgaaaggcaagatcctgaacacctgggaagtctcttccgatgaagtgctcgcttcgcaagaagtgcacgacatttcggtggcgattggtatcgacccggatagcgatgacttaagccagctgcgttacggtaaaatctgtattctcgccgatgccgactcggatggtctgcacatcgctaccctgctgtgcgcgctgttcgtgaagcatttccgtaccctggtgaaagagggtcacgtgtacgtcgcgctgccgccgctgtatcgtatcgacctgggtaaagaggtttactacgcgctgacggaagaagaaaaagccggcgtgctggagcagttgaagcgtaagaagggcaagccgaacgtacagcgctttaaagggctgggcgagatgaacccgatgcagctacgtgaaaccacgctcgacccgaacacccgccgcctggtgcagctcatcatcaccgatgaagacgagcagcaaacgaccgcggtgatggatatgctgttggccaagaagcgttctgaagaccgccgcaactggctgcaggaaaaaggcgatatggcggatctcgaagcctaa

SEQ ID NO: 89588 - DNA, 315 bp, Enterobacter aerogenes
atgttaacagtgattgccgaaattcgtactcgtccgggccagcaccaccgtcaggcggtactggatcagttcgctaaaattgtccctgtggtactgcaggaagaaggttgccacggctacgcgccgctggttgaccacgccgccggcgtgagtttccagacctccgccccggattcgatcgtaatggtcgagcagtgggaaagcgtcgcgcatctcgaagcgcatctgcaaacgccgcacatgaaggcttacgccgaagcggtaaaaggcgacgtgctggaaaccagtatccgcattttgcaggctggcgtataa

SEQ ID NO: 89589 - DNA, 582 bp, Enterobacter aerogenes
atgagcaacatcctgattatcaacggggcgaaaaaattcgctcactctaatggccaattgaacgacaccctgaccgaggtcgcggatggttatctgcgcgacgtcgggcatgatgttaaaatcgtccgcgcggagagcgagtacgatgtaaaagaagaagtgcagaatttcctgtgggccgacgtggttatctggcagatgccgggctggtggatgggcgcgccgtggaccgtgaaaaagtacatggatgacgtcttcaccgaaggccatggttctctgtacgccagcgatggccgtacccgctccgatgacagcaaaaaatatggctccggcgggttgattcagggcaaacagtatatgctgtcgctaacctggaatgcgccgatggaagccttcaccgataaagatcagttcttccacggcgtcggcgttgatggcgtttacctgccgttccacaaagccaatcagttccttggcatgagcgcgatgccgacctttatcgccaacgacgtgattaaaatgcctgacgttccacatgtcatcgcagaatatcgcaagcatctggcagcgatttttggttaa

SEQ ID NO: 89590 - DNA, 1350 bp, Enterobacter aerogenes
atgaaacgactcgcccgtctgagcctgcgcctgcgcctgacgctgctgtttgtcctgctcaccagcgccgcctgggggattgccagcgtgatcgcctggcagcagaccagcgaaaagctggataagctgtttgatacccaacaactgctcttcgcccgccgcctgagcgccatgaatgtcgatgagctgcaggcgcggccggcgcagatccgcgaaaagaaaaaagttaaacacggccatcttgatgatgacgcgctggccttcgctattttcacccacgacggaaaaatggtgcttaacgatggcgaaaacggcgaagatattcaatggggttcgcagcgcgaaggcttcagcgacggctacctgcgcggcgatgacgacgaatggcgttttctgtggctgaccaccgctgacggccgtcatcgtatcgccgtcggccaggagtgggattatcgccgggaaatggcgatggatatcgtcacctcgcagctcacgccgtggctggtcgcgctaccgctgatgttcgtgctgctcatcgcgctattaagccgcgagctggcgccattgaagaaactggctcgaaccctgcgccagcgcgcgccggattcggcggaacgtctgtcggacgacaaaatcccttcagaagttcgcccgctggtcgatgccctgaatcagctattcagccgtacccacgaaaccatgctacgcgagcgtcgctttacctctgatgccgcccatgagttgcgcagcccgctggcggcgctgaaggtgcaaaccgaagtcgcccagctttcaatggacgatcccgaaggtcgggataaagcgttggcgcaattacatcagggcatcgaccgcgccactcggctggtcgatcaattacttacgctgtcgcggctggattcccttgcgcaactggatgacgtgcagccggtcgccatcgacgacctgttgcagtcggctgtaatggagatgtatcaccacgcgcagcagtccgccattgagttacgcctgcatctgaacgccagcaatatcgtccgcaccggccagccgctgctgctcagcctgctggtacgcaatctgctggataatgccgtgcgctatagcccgcgcggtagccgggtggatatcaccctttccgcccgcgaattccgggtccgcgacaatggtccaggcattagcccgcaagcgctggcacgcattggcgagcgtttttatcgcccgccgggccaggatgcccccggcagcggattaggcttatcgatcgttcgtcgcatcgccgcgctgcacggcatgcgggttgattttgctaacgcgcgcgacggcggcttcgaggcgcgcgtttactggtag

SEQ ID NO: 89591 - DNA, 660 bp, Enterobacter aerogenes
atgcgcatattattggtggaagatgacaaactgatcggtgacggcattaaagccgggctgagcaaaatgggcttcagcatcgactggtttaccgcaggccaggagggcaaaaacgccttatatagcgccccttatgatgccgcgatacttgaccttaccctccccggcattgacggcctcgatattctgcgcgaatggcgcgataaaggccgtaatgaacccgtgctgatcctcaccgcccgcgacgcgcttagccagcgggttgaagggcttcagctcggcgccgatgactatctgtgtaaacccttcgccctcattgaggtggcggcacgtctcgaagcgctgatccgccgcgctcacggccagagcagcagcgagctacgccacggtaaggtgaccctcgacccgaaccgcttaaccgccagccttgatggcgaaagcctggcgctaaagccgaaggagttcgccctgctggaactgcttatgcgcaacgcggggcgcgtattgccgcgtaagcttatcgaggaaaagctttataactgggacgacgaggtctccagcaacgccgtggaagttcacgttcatcatctgcggcgcaaactcggcagcggttttatccgcaccgtgcacggcatcggctataccctgggtgacgcatga

SEQ ID NO: 89592 - DNA, 396 bp, Enterobacter aerogenes
atgaaaaaaattgctgcgatgaccgcgattattgctttggtttccatgccggtactggccgccgggcagggtggattcaccggaccgtctactaccactacctcgcaggccggcggcttcaccgggccgagcggcgcggtgaccaccgtggcgaacgccaagtcgctgcgcgatgacacctgggtgaccctgcgtggtaaaatcgtcgagcgcatctctgatgatctgtataaattccaggatgcctccggcgtggtgaacgtcgatatcgaccacaagcgctggaatggcgtgaccgtcggcccgcaggatacggtagaaattcagggtgaagtcgataaagactggaactcggtagagatcgacgtgaagcagatccgtaaaatcacgccataa

SEQ ID NO: 89593 - DNA, 870 bp, Enterobacter aerogenes
atgaacgatattaaggccagcccggcgtatgtcgggcgttttcagcgagtctgtttgtacattgagaaccatcttgatgagccgctaacgctggaggcgctgagcgcgattgcgtatagctcgccttaccattttcaccggcaatttagcgcgtataccggcgttccgctgtaccggtatattcagtggttacgcctgcggcgcgcctgctggcgcctggccttcaacccgcaggataaaatcatcgatattgcctttgatgccggatttcaaaattcggagtcgttcagtcgcgccttccgtaccgcgtttgatcaaagcccgactcagttccgtcagcgaccggattggggcgagtggcatcggcgcgtaccgaaacatacgctacaggagcaaacttcgatggacgtcaacattattcaatttccagccacaaggatcgccgtattgcaacatcgcgggagcccggacctggtcaacgccaccgccgcgcgttttatcgcatggcgcaaaacgagcgggctgtcgccagtcgccaccagcgaaacctggggcattgcctgggacgatccgcaaacaacgccaggcgacgcgtttcgttttgatatctgcggcaccgttgagcgaccgattagcgaaaacgcgtttggcgtgattaacggcgagatcccggcaggccgttgcgcagtggcccgccatcacggttcgctggacacgctggcgcaaagcgtctggtttctctatcgcgactggctgcccgcctccggggagacgctaagggattttccggtgtacttccgctacctcaattttgtgcatgaagttggcgagcatgaactccgcaccgatatttatttaccgttagcctga

SEQ ID NO: 89594 - DNA, 2259 bp, Enterobacter aerogenes
atgagcgatatggcagagcgcctcgcgctacatgaattcacggaaaatgcctacctgaactactccatgtacgtcatcatggacagggcattaccgtttattggcgatggcttaaagccggttcagcgccgcattgtctatgcaatgtccgagctgggcctgaacgccagcgccaagttcaaaaaatccgcccgcaccgtcggcgatgtgttgggtaaatatcacccgcacggcgacagcgcctgttatgaagcgatggtgctgatggcgcagccgttctcttaccgctacccgctggtagacgggcaggggaactggggcgcgccggacgatccgaaatccttcgcggcgatgcgttacaccgaatcccgcctgtcgaaatacgccgaactgctgctcagcgaactgggtcagggcaccgtcgattgggtgccgaactttgacggtacgctgcaggagccaaaaatgctgccggcgcgtctgccgaacatcctgctgaacggtaccaccggcattgcggtcggtatggctaccgatattccgccgcacaacctgcgtgaagtggcgcaggcggcgattacgctgctggaaaaaccgaaaaccacgctcgatgagctgctggatatcgtgcaggggccggactacccgaccgaagcggaaatcattaccccgcgcgcggaaattcgcaaaatctaccagaacggccgcggttcggtgcgcatgcgcgccgtgtggacgaaagaagacggcgcggtggtgattagcgcgctgccgcatcaggtgtccggcgcgcgcgtgctggaacagatcgccgcgcagatgcgtaacaaaaagctgccgatggttgatgatctacgtgatgaatcggatcatgaaaacccgacccgtctggtgatcgtgccgcgttccaaccgcgtggatatggagcaggtgatgaaccacctgttcgccaccaccgatctggaaaagagctaccgcatcaacctcaacatgatcggcctggacaatcgtccggcggtgaaaaacctgcttgaaatcctgacggagtggttgaccttccgtcgtgataccgtgcgtaaccgtctgaactaccgtctggaaaaagtcctcaagcgcctgcacatcctcgaaggtttgctggtcgcgttcctcaacattgatgaagtgattgagataatccgccacgaagatgaaccgaagccggcgctgattgcccgtttcggcatcagcgaaacccaggcggaagcgattctggaattaaaactgcgtcatctcgccaggctggaagagatgaagatccgcggcgagcagagcgagctggaaaaagagcgcgatcagctgcaggcgattctggcttccgaacgcaagatgaataacctgctgaagaaagagctgcaggccgatgccgatacctttggcgacgatcgccgttcgccgctgcgcgagcgcgaagaagcgaaggcgatgagcgagcacgatatgctgccgtccgagccggtcactatcgttctgtcgcagatgggttgggtgcgtagcgccaaaggccacgatatcgacgcgcagggactgagctacaaagccggtgatagctggaaagcgtcggtgaaaggcaagagcaaccagccggtggtgtttattgataccaccgggcgcagctacgccatcgacccgattacgctgccttctgcccgcggccagggcgagccggtcaccggtaaagtgacgctgccgccgggcgccagcgtagaacatatgctgatggagtcagacgatcagaggctgctgatggcctccgatgccggctacggtttcgtctgtaccttcaacgacctggtggcgcgcaaccgcgccggtaaggcgctgattacgctgccggagaacgcgcatgtgatgccgccgctggtcattgaagacgatgccgatatgctgttggcgattacccatgccggacgcatgctgatgttcccggtgagcgatctgccgcagctgtcgaaaggcaaaggcaacaagattatcaacattccgtcggcggaagccgcctccggccaggatggtctggcgcacctgtttgtcctgccgccgcagagcacgctaactatccacctcggcaagcgtaagatcaaactgcgtccggaagagctgcaaaaagtcaccggcgagcgcggccgtcgcggttcgctgatgcgcggcctgcagaaaatcgaccgcgtggagatcgactccccgcgccgcgcctcagctggcgacagcgaagagtaa

SEQ ID NO: 89595 - DNA, 738 bp, Enterobacter aerogenes
atgttatttatttttcgactaatttttgttgtcatttattgcatcgtcgtgtgcatatttggcagtctttactgcttgttcagcccgcgcaaccctaagcacgtcgcgacgtttggtcatctgtttggccgcctgtccccggtatttggcctgaaagtcgaactgcgtaagcctgcggacgcggaaagctacggcaatgcgatctacatcgctaaccaccagaacaactatgatatggtgacagcgtcgaacatcgtgcagccgccgacggttaccgtgggtaaaaaaagcctgttatggataccgttctttggccagctttactggctgacgggcaacctgctgattgaccgcaataaccgaaccaaagcgcacggcactattgccgaagtggtgaatgcgtttaaaaagcgtaaaatttcgttctggatgttcccggaagggacccgcagccgcggccgcggtctgctgccctttaaaaccggcgcgttccacgcggccatcgccgctggcgtaccgattattccagtatgcgtgtcgaatacatcgaacaaaattaaactcaatcgctggaacaatggtctggtgattgtcgagatgctgccgccggtcgatacaagccagtttggtaaagataacgtgcgcgcgctggcgacacactgccgcgagatgatgtccgctaaaatcgccgagctggataaagaagtggccgagcgcgaagcggctggaaagaaataa

SEQ ID NO: 89596 - DNA, 1413 bp, Enterobacter aerogenes
atgtcactcagtcggcgtcagtttattaaggcttcaggtgtagcgctgtgcgcgggcgccgcgccgctgaaggctcatgccgccggccagcagccggtgctccccattccgcctctgctggaatcccgtcgcggtcaaccgctgtttatgaccctgcaacgttctcactggtcattcacccagggaacgcgcgcgccggtatggggcatcaatggccgctacctggggccgaccatccgcgtctggaatggtgatgacgtcaaacttatctacagtaaccgcctgaccgaaaatgttgccatgacgattcgcggcctgcaggtgccggggccgctgattggcggcgcggcgcgcatgatgtcgccgaatgcggattgggcgccggtattgccgattcgccagagtgcggccactttgtggtatcaggcgaataccccgaaccggatggcgaaacaggtttacaacggcctggcgggaatgtggctggtagaagacgaggtcagcaaaaacctgccgatcccgaaccactacggcgttgatgacttcccggtgattattcaggataagcggctggataacttcggcactccggaatatagcgaaccgggcagcggtggtttcgtgggtgataccctgttggtcaacggcgcgcaggggccttatgtcgaagtctctcgcggctgggtacgactgcgtctgctgaacgcgtctaactcgcgccgctatcagctgcagatgagcgatggccgcctgctgcacgttatctcaggcgatcagggcttcctgccggcgccggtctcacttaagcaattgtcgctggcccccggcgagcggcgtgaaattctggtcgatatgaccaacggcgatgaagtgtcgattacctgcggcgaagcggcgagcattgtcgaccgtatccgcggttttttcgagccgtcgagcattttgatctccacgctggtgctgacgctgcgtccgaccgggctgctgccgctggttaccgatagcctgccggtgcgcctgctgccgaccgagctgctctccggcacgccgctgcgcagccgtgatattactcttggcgacgacccaggcatcaatggccaactgtgggatccgcagcgcattgatatcaccgctcagcagggaacgtgggagcgctggaccgtgcgcgccgaccgcccgcagtcgttccatattgaaggcgtgatgttccagatccgtaacgtcaacgggaccatgccgttcccggaagatcggggctggaaagatacggtgtggattgatgggcaggtggaactgctggtgtattataaccagccttcctggccgcacttcccgttccagtacctgagccagacgctggagctcgccgaccgcggctcgattggccagatcctggtgaatccagcgccgtaa

SEQ ID NO: 89597 - DNA, 2184 bp, Enterobacter aerogenes
atgagcgcaatatccctgatccagccggatcgtgacctattttcctggccgcaatactgggctgcctgttttggccctgcgccatttttaccgatgtcgcgtgaagagatggatcaacttggctgggatagctgcgacattattctggtgaccggcgacgcctacgtcgaccatccaagtttcggcatggctatctgcggccgtatgctggaagcgcagggattccgcgtagggatcatctcccagccggactggaacagcaaagaagacttcatgcgcctgggtaagccgaatctgttcttcggcgtcactgcgggcaatatggactcaatgatcaaccgctataccgccgaccgtaagctgcgccatgacgacgcctataccgccggcaacgtcgcgggtaagcgcccggaccgcgcgacgctggtttatacccagcgctgtaaagaggcgtggaaagacgtgccggtgatcctcggcggtattgaagccagcctgcgccgtaccgcgcactacgattattggtccgataccgtacgccgctcagtgctggtggattcgaaagccgatatgctgatgttcggcaatggcgagcgcccgctggtagaagtggcgcatcgtctggcgatgggcgaggccatcggtgatattcgcgatgtgcgtaataccgcgatcatggtaaaagaagcgttgccgggctggagcggcgttgattccacgcgtctggatacgccgggcaaaatcgacccgattccgcatccgtacggtgaagacctaccgtgcgccgataacaaacccgtgcccccgaaaaaagccgaggccaaagccgttgtcgtgcagccgccgcggccaaaaccgtgggaaaaaacctacgtgttgctgccatccttcgagaaggtcaaaggcgacaaagtgctctatgcccacgcgtcgcgcattctgcaccatgaaactaaccccggttgcgcccgtgcgctaatgcaaaagcacggcgagcgttatatctgggttaacccgccggcgatcccgctgtcgactgaagagatggacagcgtctttgcgttaccgtacaagcgtgtgccgcatccttcttatggcgatgcgcgtatcccggcctacgagatgattcgcttctccattaacatcatgcgcggttgcttcggtggttgttctttctgctcgatcaccgagcacgaagggcgcatcatccagagtcgctccgaagattcgataatcaatgaaatcgaagtgattcgcgacacggtccccggctttaccggcattatttccgatcttggcggcccaaccgccaatatgtatatgctgcgctgtaaatcgccgcgcgctgagcagacctgccgccgtctctcctgcgtctacccggatatctgcccgcacatggacaccaaccatgagccgacgattaatctgtaccgccgcgctcgtgacctgaaaggcattaagaaaatccttatcgcatcgggtgtgcgttacgacatcgccgtagaggatccacgctatatcaaagagctggcgacccaccacgtcggtggctatctgaagatcgctccggagcataccgaagaggggccgctgtcgaagatgatgaagccgggcatgggcagctatgaccgctttaaagaattgtttgatacctattcgaagcaggcgggtaaagaacagtacctgatcccgtactttatttccgcccatccagggacgcgcgatgaagatatggtgaacctggcgctgtggctgaagcgtcatcgcttccgtctcgaccaggtacagaatttctacccgtcgccgctagcgaactcaaccaccatgtattacaccggcaagaacccgctgggtaaaatcggctataagagcgaagatgtggtggtgccgaagggcgacaaacagcgccgtctgcataaagcgctgctgcgctatcacgatccggcaaactggccgctgatccgtcaggcgctggaagcgatgggtaaaaagcatctgattggttcacgccgtgattgcctggtgccggcaccgacgctcgacgagatgcgtgaagcgcgtcgccagaaccgtcatacccgtccggcgctgacgaagcatacgccggttgcgcatcagcgccagacgccagccgcctcgggggcgaaaaagcgtatcaagccgaagacggcgtcccgctaa

SEQ ID NO: 89598 - DNA, 528 bp, Enterobacter aerogenes
atgacgccggtaatcctgtcacgacagcagctagataggttgtgggagatagaccgcagcgaaattatcgacaccctttataagctcgataatggccaactccaggcgtacccgcagtattatgatgtgcgaggttgggatcctcacgatcgccaggtttatacgcctattcacgaggcctgctacgatcgcggcggtatatttttcgcctttttcgagcagaataaaattattgccgcggcggcgatggatactttgccaaggggtgaaaagggcgatctgcgccaactgttattcttttatgtgggcgcggcgcagcgcggccagggatgggggcgacgtttgtttgactatgcgctgcagcagcttcctgctcttggcgcatccggcctgtatatttcgtccatccccaacaaaagcaccgttgatttttatctctcccagggctgtcgtttaattgataagcccgacccggagctgtttgctctggagcctgaggatattcatttaatttgcgaaagcctttag

SEQ ID NO: 89599 - DNA, 828 bp, Enterobacter aerogenes
atgacacatccaaccgttataaaactacacgacggcaacctgatgccgcagttgggtctcggcgtgtggaaagcaggcaacgaggaagtcgtctccgccattcataaggcgctggaagtcggttatcgttcttttgacaccgccgccgcgtaccaaaatgaggctggcgtcggcaacgcgttaagcagcgcgggcgtcaatcgcgatgagctcttcatcactaccaaactgtggaacgacgatcaaaaacggccgcatgaagcgctaaaagagagcctgagcaagctgaaactggactatgtggatctctatttaattcactggccggtgccagcgataggccattacgtcgaagcctggcaggcgctgatcgaattgcagcagcaagggctggcaaaaagcattggggtatgtaatttccaggtgccacatctgcaaaagctgattgatgaaaccggcgtcgctccggtgatcaaccagattgagctccacccgttaatgcagcagcgtcaactacatgcatggaacgccacccacaaaatccagaccgaatcctggagcccattagcgcaaggcggcaaaggggtcttcgatcagaaaattattcaccatctggcggataaatacggcaaaacgccagcgcaaatcgtcattcgctggcatctcgacagcggactggtggtgatcccgaaatccgtcacgccatcacgtattgcggaaaactttgacgtctgggacttccgtctcgacaaagacgaacttagtgaaatcgctaagctggaccagggcaaacgtctcggccccgacccggatcagttcggcggttaa

SEQ ID NO: 89600 - DNA, 1164 bp, Enterobacter aerogenes
atgaataacttcaatttacataccccaacccgcattctgttcggcaaaggcgccatcgccgacctgcgcgaacaaatcccagccggcgctcgcgtgctggtgacttacggcggcggtagcgtgaagaaaaccggcgtactggaccaggtactgagcgcgctggctggctttgacgtgctggaattcggcgggattgagccaaacccgtcttacgaaacgctgatgaacgcggtgaaaatcgctcgtgaagagaacgtgaccttcctgctggcggttggcggcggttcggtgctcgacggcaccaaatttatcgccgcggccgcgcactatgacgcgaatatcgatccgtgggaaattctggaaacctacggcagcaagattacccgcgctattccgatgggctcagtattgaccctgccggcgaccggttccgaatcaaataaaggcgcggttatctcgcgtaaaaccaccggcgataaacgcgcgtttatgtccgaacacgttcagccggtctttgcgatcctcgatcctgtttatacctacaccctgccgccacgccaggtcgctaacggcgtcgttgacgctttcgtccataccgttgagcagtacgtgacctacccggttgatggcaaaattcaggaccgtttcgcggagggcattctgctaacgctggtggaagatggcccgaaagcgctgcaggagccggagaactacaacgtgcgcgccaacattatgtgggcggcgacgcaggcattgaacggcctcattggcgcaggcgtccctcaggactgggcgacgcatatgctcggccacgaactgacggcgatgcacggcctggatcacgctcagacgctggctatcgtgctgccggcgctgtggaatgagaaacgcgataccaagcgcgctaagctgctgcagtacgccgagcgtgtgtggaatattaccgaaggttccgaagagcaacgtatcgatgccgctatcgccgcaacccggagtttcttcgagcagatgggtgtgccgactcgcctttccgattacggtctcgacggtagctccatcccggcgctgctggcgaaactggaagagcacggcatgactaaacttggcgaaaatcaggatatcactctggacgtcagccgccgtatttacgaggctgcccgctaa

SEQ ID NO: 89601 - DNA, 900 bp, Enterobacter aerogenes
atgaaccgtgccgagatatgccagctattaacggataaagttaacaagctgaaagataagcaagaaatgctaagtgaactgctgccggatatccgtctgctgtacgggacgcagccgggcacccgtacgccggtgatgtaccagccggggatcgtttttctcttttccggccataaaattggctatatcaatgaacgaactttccgttatgacaccaacgaatatttattgttaaccgtcccgctgccgttcgaatgcgaaaccttcgcgaccccagaagtgccgctggcgggaatgcggttgaatgtcgatattttgcagttgcaggagctgctgatggatatcggcgaagatgagctttttcagccgtcggtcgcctccagcgggatcaactcggcggtgttatcagaagagatcctctgcgcggcggagcgcctgttagacgtgatggagcggccgctggacgcgcgcattctcggcaaacagattatccgcgagatcctttatcacgtcctgattggcccctgcggcggcgcgctgctggcgctggtcagccgacagacgcactttagcctgattagccgcgttctgaagcgtattgaaagccagtacaccgaaaacctcagcgtcgaccagctggcggcggaagcgaatatgagcgtctcggcgtttcaccataattttaaatcggtcaccagcacctcgccgctgcagtatttgaagacctatcgtctgcataaggccagaatgctgatgatccatgacggcatgaaagccagcgcggcggcgatgcgcgtcggctacgaaagcgcctcgcagtttagccgcgagtttaaacgctatttcggtattacgccgggtgaagatgccgcgcgtattcgcacgatgcaggggatttga

SEQ ID NO: 89602 - DNA, 660 bp, Enterobacter aerogenes
atggttgtcattcaagagattgtcgccgcgctgtggcaacatgattttgccgcattggcaaaccctcacgttgtgggttttgtatatctggtcatgttcgcgaccctgtttctggaaaacgggctgctgccggcttcgtttttaccgggcgatagcctgttgctgctcgccggcgcgctaatcgctaaaggcgtcatggattttgtccccactctcgccatcctaaccgccgccgccagcctcggctgctggctgagctatttacaggggcgctggctgggtaataccaatatggtgaaaggctggctgtcgcatctgccgcacaaatatcaccagcgcgccaccaacatgtttgataaacacggcctgctggcgctgctggccgggcgctttttggcgtttgtccgcactctgctgccaaccatggcgggcatttccggcctgccgaatcgtcgtttccagttctttaactggctgagcggcctgctgtgggttggtgtcgtcaccggtcttggctatgcgctgagcatgatcccgttcgtgaaaaaccacgaagaccaggtcatgacctgcctgatggtgctgccgatcgccctgctggtaaccggcctcgttggtacggttattgtggttatcaagaagaaatactgcagcgcctga

SEQ ID NO: 89603 - DNA, 1188 bp, Enterobacter aerogenes
atggctgataaacatcttgataccgcgctggtcaacgccgggcgccgcaaaaaatatactcagggttcggtgaatagcgtcatccagcgcgcctcatcgctggtattcgataccgtcgaggctaaaaaacacgccacccgtaaccgcgccaaaggcgagctgttttatggccgccgcggcacgctgacccacttttcgctgcaggaagccatgtgcgaactggaaggcggcgccggctgcgccctcttcccctgcggcgcggccgcggtcgctaacacgattctggccttcgtcgaacagggcgaccacgtgttaatgaccaacaccgcctatgaacccagccaggacttctgcactaagatcctcgcaaagctcggggtgaccaccggctggttcgatccgctcatcggcgcggatatcgccaatctgattcaacccaataccaaagtggtgttcctcgaatcccccggctcgatcaccatggaagtgcatgatgtgccggccatcgtcgccgccgtgcgccgcgtcgcgccggaagctattatcatgatcgataacacctgggcggcaggggtgctgtttaaagcgctcgattttggtatcgatatctctatccaggcggcaacgaaatatttaattggccactccgacggaatgatcggcaccgcagtggccaacgcccgctgttgggagcaactgtgtgaaaacgcctatctaatgggccagatggtcgatgccgacaccgcctatatgaccagccgcggtttacgcacgcttggcgtccgcctgcgccaacatcacgaaagcagtctgcgcgtcgccgaatggctggcgcagcacccacaggtggcgcgggtcaatcatccggcgctgccgggcagcaagggccacgaattctggaagcgcgacttcagcggcagcagcggcctgttctctttcgttctcaataagcgcctcaccgacgccgagctggcagcctatctggacaacttcagtctgttcagcatggcctactcatggggcgggttcgaatcgctgatcctcgccaaccagccggaacatatcgcggccatccgccccgaggcggaagtggatttcagcggtacccttattcgactgcacataggtttagaaaatgttgacgatctgctggcggatttagcggcaggcttcgcgcgtatcgtgtaa

SEQ ID NO: 89604 - DNA, 732 bp, Enterobacter aerogenes
gtgggtaataatttgatgcaggcggatctctccgtttggggtatgtatcatcacgccgatattgtcgttaaggttgtgatgattggcttgattctggcttcggtagtcacctgggctatcttcttcggcaagggcgccgaaatgttgtccagcaagcgtcgcctcaagcgtgagcagcagcagctcagcgaagcgcgttctctcgatcaggctaacactatcgcgaatggattccatgccaaaagcctgaccactcagctgattaacgaagccaataatgagctggaactgtcggcaggcgtggatgacaacgaaggcattaaagaacgtaccggtttccgccttgagcgtcgtgtggcgcaggttggccgctatatgggccgcggtaacggttatctggcgactatcggcgctatttccccgttcgtcggcctgttcggtaccgtctggggcatcatgaacagctttatcggtatcgcgcaaacgcagacgactaacctcgcggttgtcgcaccgggtatcgcggaagcgctgctggcaacggcgattggtctgtttgccgcgattccggcggtggttatctataacgtcttcgcccgcatgattgccagttacaaagcgtctcttggcgacgtggccgcgcagattatgctgctgcaaagtcgcgatctcgacctgaacgccagtggttctcagccgctgcgtccggcgcagaaattacgggtaggttga

SEQ ID NO: 89605 - DNA, 426 bp, Enterobacter aerogenes
atggcaatgcattttaacgaaaacctcgatgataacggcgaaatgcacgacattaacgtgacgccatttatcgacgtcatgttggtgctgttgattatcttcatggtggcggcgccgctggccaccgtggacgtcaaagtcaatctgcctgcttcatccagccagccgcagccgcgtccggaaaaaccgatttatctgtcggtgaaagcggacaaatcgatgttcctcggcaacgatccggtgactgaagagagcgtgattgcctcgctggatgcgctgactcagggcaagaaagacaccaccgtcttcttccgcgctgacaaaaccgtcgactacgagacgatgatgaaagtgatggatacgctgcatcaggccggatatctgaagattggtctggtgggcgaagagaccgtcaaagcgaagtaa

SEQ ID NO: 89606 - DNA, 495 bp, Enterobacter aerogenes
atggaacgctttctggaaaacgctatttatgcttcgcgctggctgctggcgccggtttatttcggcctctcgctgggccttatcgcgctatcgataaaattttttcaggagatattccacatcctgccgcatatcttcagcgtcagcgagtcggatctgattctgacgctgctttcgctggtcgatatgacgctggtgggcgggctgctggtgatggtgatgttttcaggttatgaaaacttcgtttcgacgctggatattaacgaaggcaaagagaagctcaactggcttggcaaaatggatgcgacatcgctgaaaaacaaggtggcggcgtcgattgtggctatctcttccattcacctgctgcgggtgtttatggatgcgaagaacgtgccggataataagctgatgtggtacgtcattatccatctcacctttgtgctttcagcctttgtgatgggctatctcgatcgcctgaccaaggtaaagcactga

SEQ ID NO: 89607 - DNA, 867 bp, Enterobacter aerogenes
atgtccgacaatcaataccaaccaccgaaagtatgggaatggaaacagaataacggcggcgcgttcgccaatatcaaccgtccggtttccggcgcgacgcatgaaaaagtgctgcccgttggcaatcacccgctgcagctctattcgctgggcacgccgaacgggcagaaagtgactatcatgctggaagagctgctggcgctgggcgtggctggcgctgagtatgacgcctggctgattcgtatcggcgaaggcgatcagttctccagcggctttgtcgaagtgaacccaaactcgaagatcccggcgctgagcgaccactccacgactccgccgacccgggtatttgaatccggcagcatcctgctctatctggcggaaaaatttggtttcttcctgccgaaagacccggccgggcgcaccgaaacgctgaactggctgttctggctacagggcgcagcgccgttcctcggcggcggctttggccacttctataactatgcgccggtgaaaatcgagtacgccatcgaccgctttaccatggaagcgaaacgtcagctcgacgtgctggataagcagctggcgcgcggccgctttgtggcgggggaagagtacaccatcgccgatatggcgatctggccgtggtacggcaacgtggtgctgggcaacgtctataacgccgcggaattcctcgatgccggcagttacgttaacgtgctgcgctgggcgcaggatgtgggcaatcgcccggcggtgaagcgcggacggatggttaaccgcaccaatggcccgctcgacgagcagttgcacgagcgccatgacgcccgcgatttcgacacgcagaccgaagacaaacgtcaggcgtaa

SEQ ID NO: 89608 - DNA, 561 bp, Enterobacter aerogenes
atgagcgcaccttcgcatctcaatgcccagccgctggtctggggacatggcccacggacttttgaagtattcctcgaaccaacctgtccgttttccgttcgcgccttcaacaagcttgatgaattgctggatgaagtcggcgccgagaacgtcacgattaagattcgcctgcagtcccagccgtggcatctgttttccggggtaatcgtgcgctgcgtgctggccgcctccaccctgccgcacggcagagagcaggcgcacaaagtcctgcaggcggtcgccgatcatcgtgaagagtttgaattcaccgaccactgcagcgggccgaatatgaataccactccgcagcaaattatcgagcgccttgagcgctatagccacgtgtcgctggcggcggcatttgcccgccctgagctgcaaaacgaaatcaaatggcacagtaaatacgcccgccagaacggcatccatgtgtcgccgacgtttatggtcaacggcctggtgcagcccgatctcggcagcggcgatgacgtcagcgtgtgggccgcgcggattatggcctga

SEQ ID NO: 89609 - DNA, 1866 bp, Enterobacter aerogenes
atgagtaaaggatcgaccagtattgacgcccctttcggcacgcttttgggctacgcgccgggcggcgtggcaatttattcttcgaattacagtagcttaaatccacaagattatccggatgacgccgctttccgcagctatatcggcaacgagtatatggggcataaatggcagtgcgtggagttcgcgcggcgctttttattcctcacctacggctttgtctttaccgacgtcggtatggcttatgaaatcttctcgctgcgctttctgcgcgaagtggtcaatgacaacattcttcccctgcaggccttcgccaacggctcgcgccgtccgccgatcgccggttcgctgctaatctggcagaaaggcggcgagtttaaacataccggacacgtggcggtgattacgcaactggtagggaataaggtccgtatcgccgagcagaacgtcatccacgcgccgctgccgcagggccagcagtggacccgcgagctgacgctggaagtgaaagacggcgtctacaccatcaaagatacctttgccgataccgaaattttaggctggatgatccagaccgccgataccgagcatagcctgccgcagccggtgctgccgggcgaggagatgaaaatcagaggcgcgcggctgccgaataaaggccagttccgcggtaactggctcaatgagaaagacgcgctgcaaaaggcctatgttgaagccaacggtcatttcatcaatcaggatccctaccagtacttcaccatcagcgagagcgccgaacaggaactgattaaagcgaccaatgaactgcatctgatgtatctgcacgccactgataaggtgatgaaggatgacaacctgctggcgctgttcgatattccgaaaattctctggcctcgtctgcgcctctcgtggcagcgccgccgtcatcatatgattaccgggcgcatggatttctgcatggatgagcgcgggctgaaggtgtacgaatacaacgccgactctgcctcttgccatacggaaggcggattgatcctcgaacagtggctgaaacagggctatcgcggtaccggccataatccggcggaaaatctgcttgaggagctggcgggggcgtggaagcacagccgcgcgcggccgttcgtgcacatcatgcaggataaggatcttgaagagaactaccatgcccagtttattcagcgttcgctaaccgaggcgggctttgagagcaaaattctctttggccttgatgagctgcgctgggatgccgccggacagcttatcgacggtgatggccgcttggttaactgcgtgtggaagacctgggcatgggaaaccgccatcgagcaggtgcgtgaagtcagcgccgatgagtatgcggcggtgccgattcgtaccggtcatccgcaaaatgaggtgcgcctgattgacgtcctgctgcgccctgaagtattggtattcgaaccgctgtggacggttatccccggcaacaaggcgattctgccggtgctgtggtcgctgttcccacatcatcgctatctgctggataccgattttgtggtcaatgacgagctggcgaaaaccggttatgcggtcaaaccgatctccgggcgctgcggtaataacatcgatctgataagcccgcacgatgaggtattggatcagaccagcgggcaatttgtcgatcgcaaaaatatttaccagcagctgtggtgtctgccgaaggttgacggcaagtacattcaggtgtgcacctttacggtgggcggtaactatggcggtacctgcctgcgcggcgatgattcgctggtggtgaaaaaagagagcgatattgagccattagtcgtgctgaaagacgacgagtaa

SEQ ID NO: 89610 - DNA, 1182 bp, Enterobacter aerogenes
atgcacgatcggcgcctcgccgcccgcgcgggtgaacttaagccctccgccgtccgcgaacttctcaaacacagtaaactgcctggcgtcatttcgcttggcggcggtattccggctccggaactgtttgataccgaaggtctcaacctcgcggtgcaaaaggtgatgagtgaacgttttaatgatgcgttccagtacggccttaccgaaggatatccgccgctgcgccaggcggtgagcgaaatctgccagtcgcgcggcgtggcctgctcggcaagccaggtgtatatcacctccggttcgcagcaatcgctggatatcgtcgcccgcacgctgctcgatccgggcgatgcggtcgtcgttgaacgtccgacctaccttgccgcgctgcaggtattccagctggcgcaggcgaatatcctgagcgtcgataccgacgataacggcatgctggttgaacaactggccgatctgctggaaaccactaaggttaaagcggtctatctggtgccgacatttggcaaccctggcggtaaaaccctcagcgacgatcgtcgccagcggctggtggcgctagcgaagcaacatgattttgtgatcatcgaagacgatccctacggcgaaatcagcttcaccgataaagtacgtcgtccgctgtatcaacatgcgatcgaacaaggctgtgaagaacgggtggtgtacacctccacgttctccaagatcctcgcgccgggaatgcgtatcggctggatcgtgatgccggaatggctggcgcaccaggcggtgatcgtgaagcaggcggcggatctgcatactaatatgctctctcaggttatcaccgctgagtatctggaaatgaatcgcctgaacgatcagatcgctctgatccgcgaagactaccgcaagaagtgcgtggcgctggctgatgcgctggaaagtcgtcttggcgagcatcttgagtttagccgcccggaagggggaatgttcctctgggcccgtttccgctatccgttcgataccatggcgtggcttgagaagacgttggaaaacggcgtggtttacgtacctggtgaagcgttctacaacgataatccggatacccgcacgctgcgtctttcctactcgacggtttctgaagccggtctgctgaccgccgtcgaacgtctggcgaaatcgctgtaa

SEQ ID NO: 89611 - DNA, 189 bp, Enterobacter aerogenes
atgcctactattatcgccagtagtatgaaagaagctaaagaattaattaacgccagaaagtatcgggaaatagtactgaacttcgatgttgacgctgatgatttcttcacccttgcaacggctcagcatgacaccaaaatcacctttgcaaacaaaaatagccactcaccggttacattagaaaaataa

SEQ ID NO: 89612 - DNA, 291 bp, Enterobacter aerogenes
atggccgcttactggattgcccacgtcaacattcacgatcccgagcaatatcagcattatatggatctcgccccagcagcgttcaaacgctaccacgcgcgctttgtcgctcgcggcggccgggcgcaaacgctggagggacaatccttcgccaagcacgtacttattgagtttgacgatatggaaagcgcgctggcctgctaccactcagaggaatatcaacaggcgcgcgccgcacgcgcggacgttgccgacgccatgataaccatcgttgaaggtttacccgcctga

SEQ ID NO: 89613 - DNA, 678 bp, Enterobacter aerogenes
atggttgataaccattcactcaaaattgacgccgttccggtcacattacgcgagttggcgctcacaaaagtgcgccaggcgattatcgccggctatttcaaagctggcgaccggctggtcgaacgccagcttaccgagcagcttggcgtcagccgcagcgtggtcagagaagtgatccgctatcttgaggccgaagggctgattgagacgctgccgaaaaaaggcccaatcgttgccgttttaaactgggaaagcgcagagcagatctacaaaatccgtatgctgcttgaacaagaagccgccagcgattgcgccagactcgctaacgatgatgataagcaccagctatatcagcagctccagctaattgcccaagcctcgcgcgagcaggatgatattaaacgggttgaagcctcacaggccttctatgaaaccctgttccgggttgctaagcacaccattgcctgggaaatcgttcaacgcctcaatagccgcattagccgtttacgtgcgctcacgctggcatcgccggagcggcaagttgccggctttgaacggatgtcgcgcatctatgacgccatcgaaaacaacgatcctcagcaggccagacaagcggtactggagcatctgaccgaagccgcgcagcttgccaaacagattctatcctcacaggagtaa

SEQ ID NO: 89614 - DNA, 603 bp, Enterobacter aerogenes
atgcatccggcaattcgtaaaacgttagtcacaacggaaacgttgtatgtcgatggcggtaaagcagcagaaaaaccgctggtgatgattgccgccgccgcggtgatccgcaatccgtgggcggggctgggctatgtcgatgaccttgcgccgcaaatccgtgaattcgcgccaatccttggcgagctgctcaccggcctgatcctcaaggaagctggtagcggtgaaaaagtcgaagcgtttggtaaaagcgcgatcgtcggccttgatggcgagctggaacacgcttcggcgcttatccacacgctgcacttcggtaaccactaccgcagcgcggtgcagagtaagagctatctggcgtttaacaatactcgcgggccggcgaactcaccggtgctgatcccaatgatgaacaagaatgatgaaggcagccgtgagcactacctgaccatgcagttcaacatctgcgatgcgccgcgttatgacgaaatcgttattgcgctgggcgcggcgctgggcggacgcccgcatcaccgtattggcaaccgttattccgacctgaaagagttaggccatgatgcgcaaaacccagctgctgtctga

SEQ ID NO: 89615 - DNA, 846 bp, Enterobacter aerogenes
atgatgcgcaaaacccagctgctgtctgaacgtcagatgcgggttagctatctggaggctggcgcaggcgagccgctggtgctgatccacggcgtcggtatgaatgcggcgtcctggtacccgcaaattgaggcgctgagccgctatttccgggtgattgcggttgatatgccggggcatggcgatagcgatgcgtttcagcagccggtgatcttaacggactacgtagcctggctgaatgattttttgcgtacccagcctgagcgccgttttgcggtagccggccactcgatgggggcgcttatcgcctccgggctggccattgattatccgcagcgagtgagtcacgcggtggtgatgagcggcgtctaccgccgcaatgaacaggcgcgccgcgccgtactgcagcgggcccgtgaactggcggccggcgaggcgcagttggattcgccgctggcgcgttggttcagcaacgatgcgaaggaagcgattctgcgcgaacaggtcggcggctggctggcggaagtcaatctgcagggctatgccgcagcgtatcaggccttcgccggcggcgatcgggtctatgccgaccgttggcaggagatccgctgtccggttctggtgctgaccggtgaactggatgccaactccagtccacaaatggcgcgggaaatggcagcggcggcgccgctgggtcaggcgatcattattgatggcgcccggcatatggtcagtctgaccgatgccccacgcgtcaaccatgaaatgctgagcttcctgcagtgcggctcggcgcgacagagcaacaatgccaatacggcgggacttactcatgcaaatagataa

SEQ ID NO: 89616 - DNA, 927 bp, Enterobacter aerogenes
atgcaaatagataaacgtagacaactccgcgacgctttcggcgcatttatgactggcgtcaccgtcgtcaccagccgcgataaaaacggcgagccgattggctttaccgccaactcgttctcttcggtctcgctggatccagcgctgctgttggtcagcatcgataagcgttcggccaatttcagcaacttcaccgagtgcgactatttcgccgtcaatattctggcggaacagcagaaagaaacctccaatattttcgcgcagaaagttgaggaccgcttcgctctgatcgactggcgcgcgagtgaaaacggcaccccgcttatcgataacagttccgcgtggtttgattgcgcgctgcatcaggtcatcgacgctggcgatcacgcgattttgttggggcgagttgaaggctttgattccgttggcaccgcggggcttggctactatcgcggcgcttatttcactccgtaccacaacgctgaggtattgatgaatcggctcagcgttgaagtcagcgcgttgattgagttcaacggtcaggcggtgatgatgccgcatggcgatggttatcgtctgccgacccgcagcgtggcgaaaggcagcgtcgacgacaccttaaaagcgctcatggcagagttggggattaatgccagcccgggctttgtctattcggtatatgaagaccgtcagaacaataagcagcatatcgtattgctgtgcgcgctgccgaccgagccggaaagtgagcgaccggccctgcggcaggcgcaatggtacgacctggaaaagctgtcggcgctgccgattggcgattcagcgctgaaatctttaatgaaccgttttgtacgggaaagcgccgtcggcaattacagcatctactacggtgacgaattaagcgggtcaatcaagcaattcgctagctga

SEQ ID NO: 89617 - DNA, 1038 bp, Enterobacter aerogenes
atgaaactgtctctttttattcatatggaacgcatctcgccggatgagccacaggataagctctacaacgagatgatgacgctgtgtgaaatggccgatgaagccggcatgcatgctatctggaccggcgaacatcatgggatgaattttaccatcgcgccgaacccgtttatcaatctcgccgatttagccaaccgcaccaaacgggtgcgtttgggcaccggcaccattattgccccgtttaaccatccgctgcggctggccggcgaggcggccatgaccgatatcatcactggcggccgtctcgagttggggattgcgcgcggggcatacaattatgagtatcagcgtttgatgcctggactcgatgcctgggaagctgggcagcgaatgcgtgaattggtaccggcggtgaaaaaattgtgggaaggcgattacacgcatcagggggagtactggcaatttcctgcatcgacctcctcgccgcagcctaagcagcagccgcatccgccgatctggattgcggctcgggacccgaatagccatgagtttgcagtcagcaacggttgcaacgtgcaggtgacgccgctgcatcagggcgaagaagaaattgtccgcctggcggagtgtttccacgaaacccgtcagcgcctggcgccggagaaaccgctgaaaattatgctgctgcagcatggcttcgtcgctgaagatgaaaatgacgcccaacaagccgccgaagaacttaaccgtttttataactattttggcgcctggtttaagaatgagcgcccggtaagccaggggctgattcagccgcttagcgacgaagagatcgctgccaatacctattattccgccgccgccatgcgcaaaaatctcgccatcggcacgccgaatgaaatcatcacccggctgaaaaaatatgaagcgctgggctatgacgaatttgcgttgtggattgatagcgggatgccgtttgagcggaaaaaggcgtcactaacccgctttattcagcaagttatgcccgaatttcgttaa

SEQ ID NO: 89618 - DNA, 1467 bp, Enterobacter aerogenes
atggaatcgttcgatctttatatagacggtgtgtttgagcgcggcgcagcgcgcttttcatcactcaacccagcaactgcccaaccgtgggcggagattgccgaagcgcgggaagaagaggttgatcgcgcggtagctgccgcgaaacgggcattttacgatccggcctggcgtgggttaaccgccagcgctcggggtaaactgctgatgaaactggctgatctggttgagcaaaacgccgatgagctggcgcgacttgaaacgctggacagcggaaaaatcattcgcgaaacgcgatcgcagattgcctacgtggctgaatattaccgctattatgcgggtctcgctgacaagctggaaggccgcacgctggcgattgataaggcggatactgaaacctggacgcggcgtgaagcagtgggcgtcgtcgccgcgattattccgtggaacagccagctctttttatcggcggtgaagatcggtccggcgctggcggcaggttgtactatcgtggtgaaagcggcggagagcgctcctacgccgctgctagcctttgcccgactgattgccgatgcgggattcccggcgggcgtctgcaacgtgatcactggctttgccgggacgtgcgggacgcggttaacaacccacccggacgtggaccatatcgcctttaccggcggccccgagaccgctcgccacattgtacgcaacagtgcggaaaaccttagcaaaaccacccttgagctgggcggtaagtcgccctttatcgtctttgaggatgcggatttggacagcgccgccaatgcgcaggttgcggcgatatttgccgcctccgggcagagctgcgtcgccggttcgcgcctgctggtggcggaaagcgtcaaagagcaactgctggagaaattagtcgagcgggttaaacgaattgtcatcggcagcccggacgacgcggcgacgcaattcggcccactgtgtaccgagcgccagaagaggctcatcgagcaggtggtcagccgctctctggagcagggcgcccggctggtgagcggccattatgccatcgattccccaggctactactatccgccaacgatccttgattgctcggctacgccgcaggcggaaagcgtagtgcgcgagctattcggcccggtgctttcgcttgtcaccttccgtgatgaagcggaagccatacggctggcgaatgccaccgattacgggctggctgccggcgtctttacgcgtaatctcgctcgcgcgcatcgcgtaacccgcgatctgcgctgtgggatcgtgtggatcaatacctatcgtatggtatcgccgttggcgccttttggtggatatggtctgtccggacacgggcgagagggcggaatggaagcggcactggaatttaccaccacgaaaaccgtgtggctgcgcaccagcgacgagccgatcgacgatccctttattatgcgctga

SEQ ID NO: 89619 - DNA, 1413 bp, Enterobacter aerogenes
atgtcccgaagtcacgtaattgaaaataagacggtggactacgttccggccaatgagcgacacggccaggcgcgcagtcttttcaccttatggttttgtaccaatattgcgccgctggcggtggtgaccggcgcgatatctacgcaaactttccatcttaatattctgtcggcgataagcgcgattattgccggacacatgtttggcgggctttttctggcgctcacttccgcacaggggccgcgggttggcattccgcagatggtgcagagccgggcgcagttcggtcgctacggttcgctgctggtggtcgcttttaccaccatgatttatctcgggttttttatttcgaacgtcacgctgtccgggaaagtcatcaataatgtgataccgacaatcccgctgaccagcgccacggtgattggcgcgattgccgccaccctgatcggcattattggttatcgatttattcatcgaattaataaaattggcgcctgggtgatgggctcggcgctgctggtggggttggtgatgatgctcactcaacccttgccagccggcttctggcagcaaggctcattcagtcttaacggctggtttgcaaccttctgcatctgcgcggtatggcagatgagcttttcaccttatacctctgattattcacgctatttaccagaaaatatcggtgtatttaaaccgtttatctgcacctgggctggagcctgctgcggcacgattctggcctttctggtgggggtcgtggcgattaacgtcgtcggcggtgagggcgatgcgatggcggcagtgcgccaggcgaccggggtattaggaccagtgcttatggtactgtttctgctaaatattatttgccataactcgatgaatctctacggttcggtgctgtcgttgattaccgccatgcagacattccgcccgcagtggcggccggatgcgcgggtgcggatgctgttttctgccgtggtgctggttgggggagtgctcgtctcggtggcggcggcggccaattttgttgctttcttcctgaatttgatctgggcgttaatcggcgtgctcattccatggtgcgtcattaacctgctcgatttttacgttatcaataaacagcattacgatatagacgccatttttagcgccgatggcgggcgctacgggctggtgaaccgccgtgcgctgctggtctactttggcggcgtgttggtgcaggtgccgtttgttgaaaatgctttttacaccgggccgtgggcgcatctgattcccggcgccgacatctcatggatgattagcctggtggtcacaagtttggcgtatatgcgttttcatcaacggggtgcagtggggcattacggccgggaaaaagcgcggataaccggcctgatggataacggttcctga

SEQ ID NO: 89620 - DNA, 801 bp, Enterobacter aerogenes
atgcttattaaatatctcccggtatgcgcgctgtgtatcggtctgctgccaggcgcgctctttgcccagacgggggaagttaaaaccaacgccgagaaatcggcggatgacccgactaaagtgaccaccaaagtcggcgtgacgtggtcagataactacgatctggacgacagcaatctcgcattttccggctcgctggcctttgacgaagcgcggaaactcaatgtgcgtattaatagcgacgccacggaatggcgcgtcggcggttcatggctatttcccattggtatttttaactttaactttgggaaaaatgtttatcccgatgactcctcacaaaccaactattctatcggtacgttcctgccgctgagttattttggttttgaacctgcaggctttcaaatattcccgatggccggttatacctataataccggcgaccatatggcctgtaataaggatcaacatagcgcctgttcgcagtcgggttttaacggcatgccgtcgccggaaaacggttttgaatcgacgaatatctccggcagcagcggttatctcggcgcctttgttctgaaacctttgagcgccgatctacgcctgttaggtttcgccggtggatcgtatggctcgaaaaacgacgatggcgataactataaaggttatttcgccggggtcggcgtgggatataacctgaccgagcataactcagtgaaatttatgacctacgtgcaggataacaacacctatctcgatgaagccgaaaagcgcttcctgttctcctggcagtatcagctttaa

SEQ ID NO: 89621 - DNA, 1383 bp, Enterobacter aerogenes
atgactaatccaagcaatcagaaccgttcgacgtccgattaccaacattcagatgcggctcaccatattcatgccttcctggatcaaaaagcgctgaacgccgaaggggcgcgcgtcatggtacgcggcgaaggactttacctgtgggacaacgacgggaataaatacctcgatggaatgtccggcctgtggtgtacccagttgggctacagccgccaggatctggcggacgccgccgcggcgcagtttgccaaactgccctattacaatatgttcttccacacgacccacccggcggtgattgagctttccgagctactgttcagcctactgccgccgcactacagccacgctatctacaccaactccggttcggaatcgaatgaagtgctgattcgcaccgttcgccgttactggcagatcctcggtaagccggagaaaaaggtgatgattggccgctggaacggctatcacggctccacgctggcggcaagcgggctcggcggcatgaagttcatgcatgaaatgggcggggtgatcccggacgtggcccatatcgatgaaccctactggtttatgcacggcggcgacctgacgccgcaggagttcggcctgcgctgcgcccgtcagttggaagagaagatcctggaactgggcgcggaaaacgtcgccggttttatcgccgagccgttccagggcgcgggcggtatgatcttcccgccggaaagctactggccggagatccaacgtatttgccggcaatatgacgtgctgctgtgcgccgatgaggtgattggcggctttggccgtaccggtgaatggtttgcgcatcagtactttggctttgaaccggatacgctgtcgattgccaaggggctaacctccggttacgtaccgatgggcggcctggtgctgagcaagcgcatggccgacgtgctggtggaaaaaggcggcgttttcccacacggcctgacctattccggccacccggtggcggccgcggtggcgattgccaacctgaaagcgttgcgcgatgaaaaccacgtcacccgagttcgcaccgatagcggcccctatctgcaaaaaacgctgcgtgaagtgtttgaaaatcatccgcttattggcgaggtgcagggagccgggctggtggccgccctgcagtttgctgaagataaagccactcgcaaacgctttgccaacgagaacgaactggcctggcgctgccgcaccatcggttttgaggaaggcgtgattatccgctcgacgctggggcgcatgatcatggcgccggcgctgatagctggacatagcgaactcgatgaactggttgaaaaaaccaaacgcgccgtggaccgcaccgcgaaagagattggcctgctataa

SEQ ID NO: 89622 - DNA, 1509 bp, Enterobacter aerogenes
atgtctgatagaaacttttggcagcgcaagctgcaggagcagcgctttatcagccacgccattatcgatggtcaaccgtacgtcgcgaaaagccgtaaaacctgtcccgccattaacccagccagcaatacgctgctggcggaagtcacctcgctgcagacggaagatatcgatattgccgtcgcctccgcgcgccgcgcgtttacttccggcgtctggtcggggctggcgccgcaggagcgtaaacgcgcgctgctgcgcctctcggcgctgatccttcagcatcgcgaagagctggcactgctggagagcgtcagcatggggaaaccggtcaacgatgcgctgaatattgatgtccccggcgccgcgcacatcctcagctggtatgccgaaagcgtagataaactctacgatgaagtggctcccgccaggcccggcgcgctggcgaccattacccgccagcccatcggcgtggttgccgccatcgtgccgtggaacttcccgctcgacctcgcctcctggaagttgggtccggcgctggccgccggcaatagcgtaatcctcaagccctcggaaaactcgccgtttagcgccctgcgtctgggcgaactggcgctggaggccggtattccgccaggcgtgcttaacgtggtgaccggactgggaaccgaaaccggaagcgcgctgggactgcatcacgatatcgatgtcatcgccttcaccggctcaaccgccgtcggcaaagcctttatggcctattcggcccagtccaacctgaaacaggtatggctggagtgcggcggcaagagcgccaatatcatcttcgccgactgccaggatctcgacctggccgctgaaaaagcagcttttggtatctgttttaatcagggcgaagtctgctcggcaaactcccgcctgttggttgagcgcccgatttacgcggccttcattgccaaactacaggaaaaaatgcaggcctgggctccggcgcatccgctcgaaccgcaaagccgcatgggggctatggtcagcgccgcccatgccgaaaaagtgatggcggctatccgccgcgcgcaagacgagggagcaacgctgcttaccggcggccgtacggtggaaatagacggcgtcgccaactacgttcagccgacgctactgaccgacgtgaacgaagagatggcgctgtggaaagaggaaatttttggcccggtgctggcggtttgcgccttcgatagtgagcaggaggcggtccatctggcgaataaccatatctatgcgctggccgcctcgctgtggaccgacaatctgcaccgcgcccatcgcgtcgccgcgcagctgaccgccggaacgatctcggtaaataccgtcgatgcgctggacgtcaccgttccctttggcggcaacaaacagtcgggctttggccgcgatctgtcgctgcacgcctttgataaattcaccagcctcaaaaccacctggtttcagtttcagcagacaggagagacgaaatga

SEQ ID NO: 89623 - DNA, 930 bp, Enterobacter aerogenes
atgccccatttcaccctgaaacagctcaaatactttgttgccgtcgtcgaggcggaaagtattgctgaagcctcacgccagctgcatatcgcgcagccgtcaatttccattgccgtgaagacgctggaagatatgtttgagcagcagttttttattcgccaccatgcccagggggtatcaatgaccccgagcgggcagcgtttttatgaaaaagccaaagaactgctgcggctctcttatcaatttgaacaaaactcgaaggccgataatgagctggtctccgggattatttccatcggttgttttgagaccgccgcgccgctgtatatgccgtcattgatggccgggtttaagaaaatttatcccgaaatcaccattaaaatttacgacggcgagcagcacgagattgcacacggtctgcaccgcgggcgttttgacctggcttttctctacgacctcgaactggatacctcgatttataccgagagcctcaacgcgccgcagaaaccctatgcgttgttaccggcggaccatccactggcgcagcggcacgccgtacggctgtccgagctgagcaatctgccaatgatcctgttggatgtggtgccaagcaaaaactacttcatcagcattttcaaagataagggctacaacccgcaggtggcctacagttcgccgtcgattgagatggtgcgctgcatggtcggccaggggctgggcttctcggtgctggtgacgcgtccggtgaatgacatgacctatgacggccagcaggtacgctgtgtggaaattcaggatgagatggcgaattcggcgctggtgatggcgcacctgcgcagtagtgaaccgactaaaccgaccaaactgtttatggaatattgccgcaatgcggtgttgagcccgccgcagcaagaagtgaaagtcgcctga

SEQ ID NO: 89624 - DNA, 1266 bp, Enterobacter aerogenes
atgaccgtagaaaaaatacaaattgagacgctggttgttggcggggggcaggccggtatcgccatgagcgagcacctgagtaaacagggtatttcgcatctggtcgtggaaaagaatcgcattgccgaagcctggcgtaccggccgctgggattcgctggtggcgaacggcccggcatggcatgaccgttttccgggcatggagtttaaaggcggcgaccccgatgcctttattgccaaggatgatgttgcgcaatactttgtcgattatgtgcgcgagtttaatcttccggtgcgtaccggcgtggaagtcaaaagtgcggtgcgtaaccacgggcgtccggggtttaccattgaaactaccgacggcgtgattgaagcgctgaatattgtcgcggcgaccgggccgttccagaagccggttatcccgccgatcgccccgcgcgacagcgccatccatcaaattcattcggcgaaatattacaacccgcaacaactgccggaaggcgcggtgctggtggtgggcgcgggctcgtccggtgtgcaaatcgccgatgaactgcagcgcgcgggccgcaaggtttatctgtcggtcggcgcccatgaccgcccgccgcgcgcctatcgtaaccgggatttctgctggtggctgggggtgttaggcctgtgggatgccccggccagcgaacccggtaaagagcacgttaccatcgcggttagcggcgcgcacggcggccacacggttgatttccgtgagctggcgcatcgcggtatcacgctggttggtctcaccgaatccttcgctgggggaaccgtcttctttaaaaataatctcgtcgaaaacattcgcctcggcgatgaaaactacctggcgctgctggatgccgccgatgcttacatcgccgccaatggcctggatttaccggaagagcccgccgcacggcaattcttagcggacccggactgcatgacgtcgccgatcctgtcgctcgatctggcgcaggcggggattaacaccattatctgggccaccggctatgcggtggactacagctggctcaacgtcaacgctttcaacgaacagggccgtcctcagcatcagcgcggcgtctccagcgaaccgggtgtctacttcctcggcctgccgtggttatcgcgccggggatcaacctttatctggggcgtctggcacgacgcgaagcatatcgccgaccatatcgccacccgccgtaaatatagccagtacaaagacgccagccagcgttaa

SEQ ID NO: 89625 - DNA, 423 bp, Enterobacter aerogenes
atgccgacccatactcgtattcggatgttcaataccaaagagacttaccctaatcagacgctggacaatgatttatgtcaggcggtgcgcgccggtaataccgtctacgttcgcggccaggtagggacggattttgcaggcaatctggtgggtcttggcgacccgcgggcgcaggcggaacaggcgatgaaaaacgtcaaacagcttctggaagaggcggggagcgacctgtcgcatatcgtcaaaaccaccacttatattatcgatccgcgctatcgcgaaccggtctatcaggaggtaggcaagtggctaaaaggcgtgttcccgatctccaccgggctggtaatttccgcgctggcgcaaccgcagtggctaatggaaattgatgtaatcgccgtcatccctgatgacgcggcgaaataa

SEQ ID NO: 89626 - DNA, 675 bp, Enterobacter aerogenes
atgacattttcgattgccgcacgctgcccgggaagcgggcagtttggtatcgcgatcagctcttcaagcattgccgtcggcgcccgctgcccgtggctgcaggcgggggtaggggcggtatcgagccagaacattaccttaccggcgctggggcaactcactctggcgcagatggagcaggggctgacggcggagaaagcgatgcgtcgggcgctggcggaagacgactttagccgctatcggcagattatcgccatcgacgccagcggccagaccgcgtggttcagcggcgataaaacgctggggacctggcatgttgtgcagggcgataactgtatcgccggcggtaatatgctggcatctgaggctgttattgccgcgatggcggcaacgttttcgcaaaccgaaggcgagctggcgacgcggctggttgccgcgctgcaggccggtgtagccgagggcggcgaggccgggccggtccattcggcggcggtgaaggtggtggatgattactcctggccgctggtggatctgcgcgtcgactggagtgaaatggacccgattggcgagctggcggcgctgtggcaggcctatgaaccgcaaatgcaggcttacgtgacgcgcgcgctcgacccgcgggaggctcccagttacggagtacccggcgatgaatag

SEQ ID NO: 89627 - DNA, 1149 bp, Enterobacter aerogenes
atgaatagtcgattacaggatattctggcgcggctgctggcgtttgacaccaccagccgcgaatcgaacctggcgatgatcgacgatattgccgattatctccacggcttcgcaatcgaaacgcagcttttttatgatgcggaagggcgaaaagctaatctctatgcacgactgggccctgcggggcccggcggcgttatgctctccggccacaccgacgtggtgccggttgacagccagccatggacggttcccccttttgccctcacgcaacgcgatggccgctgctacggccgcggtagcgccgatatgaaaggcttcctcgcctgcgtactggccgccattcctgattttctcgcccaaccgctacgcatgccgctgcacctggctttttcctacgatgaagaggtgggatgtcttggcgtacgcagcctggtcgcccatctgcaggcgtcggcagagaaaccggcgatgtgcatcatcggcgagccgacggagatgcgcccggtctatggtcacaaggggaagctggcgatgcgctgcgatgttcacggccacgcttgccactccgcttacgcgcctgatggcgtgaatgcgattgcctgggcggcaaaactgattggccgcctggacgagctgggcgagcagctggcgcttcgccaggatacgcgttttgatccgcctttcagcaccctgcaagtgggggtgattaagggtggcgcggcgttgaatattgtaccgcagcactgtcagttcgattttgaaattcgccatttaccggatgtgtcggtcgatgatgcgctggcctcgctgcaggcgtatgccgaaggtgagctgttgccaaaaatgcgcgcgacggcggcggaatcggctattacctttcaaccgcttagccagtatcccggcctgctgagcgacccgcagtcggcgttcgccggctggctggcgcagtgggccgaatgcgaggatttttcaacggtcgcttttggcaccgaaggcggattgtttgatgaggccggcgtggccacgcttgtttgtggtccggggagtatggagcaggggcataaggcggatgagtttgttagcgaggcgcagttggaaaagtgcgcgcagatgttgaaaaacctctgccgctggatgtcagcttaa

SEQ ID NO: 89628 - DNA, 1404 bp, Enterobacter aerogenes
atgacaaaacatcaatctgttaatgtcgagaatcttgaaagtaataccatcagacctatccccttaaatatgcgtcacggcaaaccaggcgatctctttaccatttggtttggctccaacattatgttgttaacggtcatcaccggcgcgatgtcggtgacgattttccacctttcctttttatggtcagtgattgcgctatttatcggcagcctggtcggcgggctctttatggcgctgcattcggcgcaggggccaaaactcggggtaccgcaaatggtccagaccaaagggcaatttggctcctatggttcggtactggtggtctcgattgtcgtactgatgtatatcggctttaccgcctccagtctggtgctcggcgggcagtcgatgcacgcgatttatcagccgatgaactcggacattgggattatcgtggttggcgcgctaagcctgttcgccaccatctttggctataagatcatccactcctacgcgcggatcatgtcgtggatttccggtatcgtactggcggcaaccttcgtgtggatagtcttcatccatggcctgccgggcgattttgccgaccgcggtggcttcaacatcgtcggttttctcggcgccgtgtctatcgccgcgctctggcaactggcctatgcgccctatgtctctgattattcccgctatatgccctacagcaccaacgataaaagcgtcttttacgccagctattttggctgcattctcggctcctatttgccgatggtgctcggggtactggtggcgatttgtatcggtaatgacgatattattcaagggattatggatctgaccggcagcatgggggcgatagtgattatcgtgctggcgctggggatcgccgccaccaattcgatgatgctgtactgcggcgtactctgtaccctgacgctcggccagacctttatcgacggctggtcgccgatggcgcgggcacgcattatcaccgctattttgaccatgctgctggagatattcctcgccatctatggccaggaaaatttcctgttaatctacactaactttattaccgtgctgctgtatgtgctggtgccgtggacggcgattaatctggtcgattattatttagtggcccatggcgaatatcacgttgagtctttctttaaacgcgatggcggtatttacggctactttaatgcaacggcgatatcctgctatatcctcggtattctggtcgaagtaccgtttatgtcgacctcaatttataccgggccaatcgccctcacattcggcggcgcggatctctcctggattgtgggtttattggtggtctcaccggtctattattatttctcgaaagcgaagagtgttaaaagcatggcttttgcaaaagagaaggtttaa

SEQ ID NO: 89629 - DNA, 603 bp, Enterobacter aerogenes
atgaaaattatcgttattggcgccagcggtaccgttggccgcgtggttgcggaagaactgagccgccaacatgaggttatccgcgttggccgcacccacggcgacgagcaggttgatatcacctcgcagcacagcgtgcaggcgctgttcgagaaaattggcccggtcgatgccatcgtctcagcagccggcagcttatactttggcccgctaagcacgatgaccgaccgcgattttgaccagggactgcaggataaattattggggcagattcgcctcgccctcaccggccagcattatcttaacgatggcggttccatcacccttatcagcggcatcgtcgccgatgaacccatcgctcaaggggtgaatgccaccaccgttaacgccggactggccggcttcgttcgcgccgccgcctgtgaattaccgcgcgggatccgcattaacctgataagccccaccgtgctcagtgaatccgtcgaagcctatgacggctttttccccggtttctccagcgtaccggccgcagcggtggcgcaggcctaccgccgcagcgtcgaagggatccaaagcggacgggtttataaagtcggttattaa

SEQ ID NO: 89630 - DNA, 897 bp, Enterobacter aerogenes
atggacaagctgcgtggaatggagacgtttgtcgcggtggtggagtgcggtagcttcaccggcgcggcggcgcgtcttgagatgtcggcggtgatggtcggcaaatatatcgccttacttgaaggccagctcggcacccgcctgttggagcgaaatacccgccggcaaagcctgaccgatgccgggcgagtctattttgacgaggccagacgggtactggagcaggtggcgaatgccgagcgttcagttgaacggctacggctggcccctgccggtacgctacgggtgagcgcgccggtttctttcggcgccagcattatcgcgccgctgaccgcctcctttctgcaggcctggccagaggtacgcgtcgagcttgatttgacgaaccgcatggtggacctggtggatgagggaatcgatctggcgattcgcatcggcgatatccagcgtaccgacctggtggcgaagtatctcgcctcttatcgcatggcgatctgcgcggcgccggattatctggcgcgccatggcacgccgcagacgcccgctgatttagccgggcaccagtgtctttcgcatacggtgtggaccgcgcgcaacgagtggcggctgccgggtgctgcggaagaggtacgctggaagcgcgatgcggtgctgcgctgcaacgatggctacgcgctgcgtatggcggcggtggccggcgccgggctgttattgcagccggaagtgctgctggcggaagatttagccaatggccgactggtgcgtattttacaaaattacaccccggaaccgaggccgatacacctgctgtggcgccaggatctgcgcccgttaccgaaacttacccgcttcgtcgaacatttgttaaaggaagtgaacggtatttataagctatga

SEQ ID NO: 89631 - DNA, 450 bp, Enterobacter aerogenes
atgggattattaagttttgtgaaagaagcgggcgagaagatctgggatgccgtctccggctccagcaaggaagatcaggctgacaagctgaaaaaacatattgatagtcttaacctgcctggtgccgaaaaggtcaatattgccgtagcggacgatggtaccgcgacggtaacgggcgacgtcggttcacaggaagataaggaaaaaattctggtcgcggtaggtaacgtaaccgggattggccaggtcaacgatagcgttactgtgacgcagagcggagcggaaagccgttactatacggttaaatccggtgataccctcagcgccatctcgaaagcgatgtatggctccgccaatgactatcagcgtatttttgaagccaataaaccgatgctgaagcatcccgataagatctatccggggcaggtactgattatcccggcgaagtaa

SEQ ID NO: 89632 - DNA, 396 bp, Enterobacter aerogenes
atgggattattagatcaaatcggcggcgtgcttggcgggcaggctggcaaagctgaacaacttcaggcgatcatgacctggattgaacagcagggcggtatccagggaatcctggaaaaattccgcaacggcggtttaggtgaaatcgtcgagtcgtggcttagtcagcagagtaatatgtcggtgaacagcgatcagattacctcggtgttcggctcgcctgccctgcaggatctcggcgccaaactgggcgttgattcgcaaaccgcctcatcgctgattgcggaatacctgccaaaaatcgtcgatggcctgtcgccgcagggcgaagcgccggcccagggcgacctggtctccgcagggcttaatctactgaaaggtaagttatttagttaa

SEQ ID NO: 89633 - DNA, 1410 bp, Enterobacter aerogenes
atgccgaccaaagaatcatcgccgccgcttattgagaagcacaccattggctatattccgccagaagatcgccacggtaaaacccgcgatctctttaccctgtggtttggcggcaatatcgcaccgctgccgatcgtcacaggcgctctgggggtacagatctttcatctgaatctgctgtgggggatcgttgcgattttagtcggccatctggttggcggggcgctgatggcgctgcactcggcacaggggccgcagatggggatcccgcagatgatccagagccgcgcgcagtttggatcttttggttcgctgctggtggtggcgatcgccggggtgatgtacgtcggtttctttgcctcgaacatcgtgctggccgggcagtcgctgcacggcatcgcccctgccgtcccactgccggtggggatcgtgatcggcgcggtgggatcctgcgtgattggcattatcggctaccgatgtattcacattctcaaccgaatcggcacctgggtgctgggcatcggcattatggtcggctttggctacatcttcacgcatctgcataccgccgatttcttaacccgcggcggcttttccttctcgggctggctggccaccgtatcgctggcggcgttgtggcagatcgccttcgccccgtatgtttctgattattcgcgctacctgccggcggatgtgcccgtcgccgcgacgttctggaccacctatcttggctcgacgctcggttccagtctgtcgtttattttcggcgcggtagcggtgctggcgacgccggtggggctggaaaccatggatgcggtaaagctggcgaccggcgcgatcggcccgttgatgctggtactcttcctgctgagcgtcatcagccataacgcgcttaatctgtatggcgcggtgatgtcggtgataaccctggtgcaaaccttcctgtggcgctggatccccggcagccgcagccgggcgctgctgtcggttatcgtgcttatttgctgtgtggcggcggcgatcttcgcctcggctgactttatcagccactttatcgatctcgttctggctctgctggtggtgctggtgccgtggaccgcgattaacctgatcgacttctacgccattcacaagggcaactacgatattaactcgatatttcaggtggatggcggcatctatggccgttacaacccgcacgcgctgctggcctacgccattggcatcctggtgcagatcccgtttatgaataccccgctatacgttggcccggtctcggcgtggtttaacggcgccgatctctcctggctggtcggcctgctggtgacctcgccgctgtactattggctggcaagccgcgatagcgcctggcgtcgccgtcaggttggcctcaagcaggcgatggattaa

SEQ ID NO: 89634 - DNA, 855 bp, Enterobacter aerogenes
atgggcgaagcgcaactgctggaacgtattacgctcgatcggcaggccatttcgtttaatcgcatgtataccaccagcgtgctttactaccactggcatcaatgcgttgaattgctttatatatccagcggctacggcatcgtggtggtggataaccagcactacaccgcccgtccggggcgattatttatctttccgcccttccgtttgcacaaagtgcaggtcgatcatagcgataaaaatccttatcaccgcaccaccatgcacattgagcagtcggtcgtcgagagcgcgctcagcgctttcccgcgccatcaggcccagttcgcggcgctggccgccagcaatctgccggcgcaaatttacgacctcagcgagcacgcggcatttatcgaaaggatccttgaacagtttcagcgtctggaggataacgagcagaccaccgcctgcgaggtggcgtttttgatgatgcaactaatgacgtttctacccgagcagccgcaacgctacccgccgcgccagcagaccgtcgcctcgcgaattatgaactggatcgaagcccactatgccagcaagttttctctcgatcagctggcttgcgacctaggactttcacgcagctatacctcgcgggtttttcgtcagcagaccggcggcaatatccatgaatatttgctcacccggcgaataaaacgcagttgcgatctgctacgtaatagcgatgagagcattgatgccatcgcgctggcggtgggatttggcgaggtgacctacttcattacctgttttaaaaagatgatgcgccagacgccgctgcagtaccgtaaggccagccagcggcgctccgctttataa

SEQ ID NO: 89635 - DNA, 1839 bp, Enterobacter aerogenes
gtgcaacctgaaaacattcatctggataacccactgacaagccgggaagaggtgctacggctggtcaatgaaatgttgaacgcggtggcgccttattttaaaaacgacgccagccgcattgatttagcgaacttcaccgctcactacggccagcaggtcgcgagcatggaaaccttttcccggctactgtggggcgtgacgccgctgttggctggcggcagcgagccgcagcatttctctttctatttacaggcgataaaaaacggcaccaatccgcagcatgccgattactggggcgaagtcgcgccttacgatcaacgcattgtcgagatggcggcttacggattattgctggcgctggcgggcgaaaccgtactggcgcacttcactgctgcggaaaaagagaacttatggcgctggttaaagcagtgcgagacccaggatatcccggataataactggcacttctttccgattctggtgcaggttggctttcattattgcggtatgccgaccaatccgcaggcgctggaagatcatttcgccgccatggaacgttactacctcggcgatggctggtactcggacggtccgggccgcccgcgcgactattacatttcgatgggcttccatttctatggcctgatttacgcgaagctgatggctgatgtcgatccgcagtgctgtgcggaactgcgtcagcgggccgcgcatttctcctctgacttcatccatttctttgccgatgacggcgcggcgatcccgttcggccgtagtctgacctatcgctttgccgaagcggcgttctggagcgcggcggccttcgccgggctggaagtcttttcaccgggcgtgatgaaaggcatcgtgttgcgccacctgcgctggtggctgaagcagccgatgttcgaccgcgacggcgtactgagcgttggctacagctacccgaacctggcgatggcggaagattacaacgcgccgggttcaccgtactgggggctgaaaaccatgctggtgctggcgttaggcgagggcgacgccttctggcaggcggctgagttgccgctgccgccgctgcccgcgcagcacacaatagcccatgcggatcaggtgctggtacatcaggccgatcacctgtggatgctaacttccggccagctggagctgaacaacttcgttaataccgaagcgaaatactgcacatttgcctactccacccgttttggtttcaccattgagcgggggcgctacgggttgaaccatgccgcccccgattcgatgctgctgctggccgaaaaggataattactggcgcggccgccgcgaatgccagcaggtggtcaccgctgatggcgtcatttacagccgctggctgccatggcgcgacgtggtgattgatagctggctactggcgctgggcgactggcagctgcgcgtccatcgtataactacccaccgcgcgctggattgcgcggaaggcggctttagcctggcgaaccgtccgctgccgcaggcgcaggagcgtgacggcgccagctgcttacgcaacgcccgcgatatctcggcaattttctgtttacatccgcacacccgccgtggcgagacggtactgacgccgccgaacagcaatctgttgttcgccgaacgcgcggcggtgccggtgctgcgcggcgagcttgatgcggggacgcattgcctggtaagcgcggtatgggcggggaatgccgccgacttcgaaccgcaacactgcccacaggccttcattagcgatgacgcggtacgcttcgtgacggcacgacaagaaacgacgctcgttctggccccggaggcatcgctatga

SEQ ID NO: 89636 - DNA, 1281 bp, Enterobacter aerogenes
atgagcacatcatcgtccgtacgcgccgcgcagtacaaaatgagtacctttatttttctctattttttcacctggtcatccagctttggcctgtacgcgctgtggctgagccagaaggtaggtctcgatagcattaccatcggcagcgtgttcgccattaatggcgttttcgcggtggtcctgaaaccggtgtacggctacatcatggacaaaatcggcatgagtaagtggctgctctattttgtctgcgccatttccgcgctgatggcgccgttcttcgcgctggtgtaccagccgctgctgcaaagccacgcgacgctggggattatcatcggcgcgctgtatttgagccttggctggtacgccggggtggcggcttccgaatcttatgccgaccgctttagccgtctgtacgggctggagtttggccgtatcagaatgtggggttcgctgggctgggcgatggcggcttcggtctccggactgctgtttaacttcacgccgctggctaactttttgctcagcagcggcacctcggtactgatgctgctggtgctgattagcctcaaaattggtgatgaacagctgcgcaataacaacgttatttccgcgaataagatcgtctttgccgatgtgttgatgctgctgaaaaatcgcaaattctggatgttcagcctctacgtcgccggagtcgcgtggatgatgttcatcgccgagcagcagttcccgcgctatttcgtctcgttctttgccaccaaagagcagggcaacgcctggtatggctatctgagtaccgtccagtcggggatggagtttgtgatgatgatgtttatcccgtggctggtgaaccattatggcgccaagcgcggcctgctgttctgcggctgcgtggtgggggcgcggctgattgcctccggcttgaccaacgacccgattgtcatctccattatcaaacctttttacggcgttgagatcgcgctgctgctgatttcagttttcaaatacatcgccgaacacttccatcgtcgggttaacgccacgatgtacctgctgggttaccaggcaatgatttacgtcggatcgattgtggtcgcgccgccggcgggttacctgtacgacaaaatcggctttgagcatacctatctgctgatgggctgctgcgccctgacgtttacgctgatttccgcttttacgctatcgcgctgccagtcgaggcgcgatgcctcacgaccctttactccggctttagataccgcctcggttgaaccggccaaacattaa

SEQ ID NO: 89637 - DNA, 1191 bp, Enterobacter aerogenes
atgaccaaatctgttatcaccgaagcgctgcggccgatagaactgcatcaggtcgaccgcctggcgttgagccagaagctggaagacgcgctggctcgcgtgacgcgcaagctggacaaaaatatcgttgccttcggcgataagttccccggcgaagcttgtgaaaacggcatctggccgcgtaccgataacgtagagtggaccaccagtttttggccgggccagctgtggctggcgtgggagatgaccggtaaagcgcactaccgcgaagccgccgagcgctatttaccgtctttcgcccggcgtattgagcagcgtatcgacaccgcgactcacgacctcggcttcctttattcgctctcctgcatcagcgcctggcggctcaccggcaatgaagccgctcgccagtcggcgctgctggctgccgagcgcctgatggagcgttttaacccgacggccaaaattatccaggcgtggggcgacttaaacgatccggaacagcaggggcgaatgatcatcgactgcaatatgaatctgccgctgctgtactgggccagcgagcagaccggcgacccgcgctacgcgcaggcggcaacggcgcatgccggacaggcggcgaattatatcgtgcgtgaagatgcctcgacttatcacacctactatatggatgtgcagaccggcgagccgcgctttggtaacacccatcagggctacagcgatacctcatgctggtcgcgcgggcaggcgtggggcatttacggtttcctgctgagctatcagcacaccggcgataagcagatggttgagctgtcgcgcagcctggcgcactacttcctcaaccgcctgccggaagatgatgtctgccattgggatctggcgttgctcggcaccgatgccgtgcgcgacagttcggcggcggcgattgccgcctgcggcctgctggagctggtcaaggtgctgccaacgctcgacgccaaccgcgcgtattacgaagagatggcgctgcgtattgcgctgtcactgaccgacaactacctggcccacgacgacacaccgaccgaaggggtgctgcagcactcggtatatcacatgggcagcggcaagggcgtcgatcaatgctgtagctggggtgactatttctatcttgagctgctggcgcggctgcgacagatttggtacccgtactggtaa

SEQ ID NO: 89638 - DNA, 558 bp, Enterobacter aerogenes
atgaaaagcgtagccgtgttattagcccccgggtttgaagagggggaagcgatagtcactatcgatatcctgcgccgcctgaatattgcggtgcagacgatttcctgcggcgagagtcgcgaagtgttgagctaccacgctatcccaacgatcgcggatagcaccctgaaggccagcttcgaccaaacctttgatgccgtggtgttgccgggcggcccggaaggcagtgttaatctggcgaaaagcgcggaggtcatttccttcgttcgccgccacgatgaagcgggtaaatatatctgcccgatttgctctgccgccgcccgcgtgctgggcggcaatgggctgctgaaggggcgtcgctatgtctgttccggcgatctttggcagcaggtgagcgatggcgtgtacgtggatgccgacgtcgtggaagacggcaatctgctcagcggccgggggttgggtaaggtgtttgatttcgccttcaccctggcggcgcggttacagggcgatgaagcgccggcgcgcgaacaggcggaacatatttattatccgtggtag

SEQ ID NO: 89639 - DNA, 2175 bp, Enterobacter aerogenes
atgagaattaacaagatcctctggccgctcaccgcgctagtggtagggttgaatagcccgctatccgccgccaaatcttccgatgatagcgatgaaacgctggtcgttgaagccaccgcagaacaagtacttaagcagcagccgggcgtttcaattattaccagcgaagatattaaaaaggaccctccggtcaacgacctctccgatattattcgcaaaatgccgggggtgaacctcaccggcaacagcgcgtcaggcacccgcggtaataaccgccaaatcgatattcgcggtatggggccggaaaacaccttaatcctcattgatggcgtcccggtgacctcgcgtaactccgtacgctatagctggcgcggcgagcgtgatacccgcggcgatactaactgggtaccgccggaacaggttgaacgtatcgaagtcattcgcggcccggcggcggcgcgctatggctccggcgcggcgggcggggtggtgaatatcattactaaacgcccaaccaatgactggcatggctcgctctcgttatacaccaaccaaccggaaagcagcgatgaaggagccacccgacgcgccaactttagcctgagcgggccgctggccggcgatgcgttgacgatgcgtttgtacggcaacctgaataaaaccgatgccgacagctgggatattaactcttccgcggggacgaaaaacgccgccggccacgaaggggtacgcaacaaagatattaacggcgtcgtctcctggaaagtgaatccgcagcaaattctcgattttgacgccggatatagccgtcagggtaatatctacgccggcgatacgcaaaatagctcttccagcgcggtgaccgaaagcctggcgaaatctggcgcagagactaaccgcctgtatcggcagaattacggtattacccataatggggtctgggattgggggcaaagccgctttggagtctattacgaaaaaaccaataacacccgtatggatgaaggtttatccggcggcggcgaagggcgtatttcggcggatgagaaattcaccactaaccgcctgacctcctggcgcaccagcggcgaactcaatattccgctggatctatgggtcgatcagactctgaccgttggcgcggagtggaaccgcgatgagcttgacgatccctcttctactggtttatcggtaaatgataataacattggcggtattcccggttcagcggcggatcgcagcagtaaaaatcattcacaaattagcgccatctattttgaagataatattgaaccgacgcccggaaccaatattattcccggcctgcgttttgattatcttaatgagtccggcggcaactttagccccagcctgaacctgtcgcaggaattaggtgattacttcaaaattaaagccgggattgccagaacctttaaagcgccaaacctctatcaatccagcgaaggctatctgctctattcgaaaggcaacggttgccctaaagatattacttcaggcggctgctacctgattggtaataaagatctcgatccggaaatcagcgtgaataaagagatcggcctggagtttgccctcgacgattatcatgccagcgtgacttatttccgtaacgattatcagaataagattgtggccggcgatgatattatcgggcaaaccgcttccggcgcttatatcctccagtggcagaacggcggtaaagcgttagtggacggcattgaagccagtatggcgttcccgctggtgaaggatcgtctgaaatggaataccaacgccacttacatgattacctcggaacaaaaagataccggcaacccgctctcggttattccgaaatacaccatcaacaactccctggactggacgattacccaggcattttccgccagcgtcaactggacgctgtatggtagacaaaaaccgcgtacccatgcggagtcgcgtagcgaagataccggcggcctgtcgggtaaagagctgggggcttattcgctggtgggaaccaactttaattacgatattaataaaaatctgcgtctgaacgtgggggtcagcaatatcttcgataaacagatctatcgttcatccgaaggggcgaatacctataacgaacccggtcgggcctattatgccggagtgacggcgacattctga

SEQ ID NO: 89640 - DNA, 933 bp, Enterobacter aerogenes
atgtatgcccgcgagtctcgctctacgcgcccgcgcaaggcgctttttgccgttctttcttgcctcaccctcagctatagcgcttcaggcttagcaaaaccggatatgcagccgttggggcccaatatcgccgataagggttcagcgttttaccacttcagcgtcaatcagttcgattccgccgacggcgctcgccactatcgggtatggacggccataccgaataaagccgcgccaccaacgggctatcccgtgctatatatgcttgatggtaatgcggtaatggatcgcctgtctgacgaactactcaagcagctgacggcgcaatcgccgccggtgatcgtcgcgatcggttatcagaccaacctgccattcgatcttaacggccgggcctacgactatacgccggcagtcagaaagaataatgaaacatatgctggccgcaaaagcggcggcagtgaagacttccgtcaattactggaaacgcgtatagccgctaaggcggagcaagggctgaaaatcaacccacagcgccgcggcctgtggggccactcatacggcggcctgttcgcgctcgactcctggctttcgtcctcgttcttccattcatattacagcgccagtccttcgcttggccgggacaactttgccctgctgaaccgaatcacggcggtcgagcctgcatcatattgcgccaaaagcctggccattatggagggttcggcgacgccgggtgataaccgggcaacgcacgccgctgaagtgctaactaaagtacatgccaccctcgccacgctgaaagagaaaggggttaatgccgccttttgggatttccctggcctggggcacgggccgatgtttaacgcctcattccacagcgcgctgctggatatgagtcgcgaaaaagcgtccaaccagcatagttgtccttaa

SEQ ID NO: 89641 - DNA, 1239 bp, Enterobacter aerogenes
atgttcaatatcaatccacatccgccggtttcagcggctatcgccggcctgcgccgccagttggcgaccggcaacattaccgatctttctcatttctggcagcaggccacatcgctgccggtaccgctagtaacaacggtggacggcgcagccgatgaacgtgaagtcacttttttgaggcgcgcccgccatccgctcagaggcgtttatctgcgattaaaccgggtaaccgacaaagaacaggtggcaaaagggctgatgacccagattcccgcaacggatatctggaccctgacgctgcgcctgccggccagctattgcggctcttattcactggtggagatcccgccaggcacgccggaagaggttgttaatcagcttgggagccgctttgccgcactcgccggacaggccgatccgctcaataagacgccggggatcgctattcgcgacggcgtgcgggagtcggtgctggcgcttgataacgcccccgctcaatccgaatggcgcggaggccgccacgccggcaccttgctgacctcagaacggatcgttgccgggcaatcacggcaggtgcgcctgtacctgcccgcggttgataagtcgcagccgttggggctggtggtgctacccgatggcgaaacctggttcgatcatcttggggtgtgcgcagccatcgacgccgcgatcgatagccgccgcattgttcccgtggcgctgctgggcatcgacaatatcgatgagcgcgagcgcaccacgatactcggcgggcgcagcgaactgatacgggacgtcgcggaacatctcctgccgaccattcgccgcgaacagccgcgacaaaaatgggcggatcgctcacgcaccgtcctggccgggcagagcctcggcggcgtcagcgcgctgatggccgcccgccatgcgccggaaactttcggtctggtgctcagccattcgccttccatgtggtggacgccagatggcggcagtcgcccccatttatttagcgcaaccgatacttcatgggtcagcgaacatgtgttgtctgcgccgccgcgtactgtccgtatccgcctgtgtgtgggctcactggaaggttcgacggtgcctcacgtccagcagcttcatcagcagctacaggcgtccggcgttgatagtcattgcgccatttacaccggcgggcacgactacgcctggtggcgcggcgccttgcttgatgggctcggcttactgcagggttga

SEQ ID NO: 89642 - DNA, 3669 bp, Enterobacter aerogenes
atgcctgcgactcactctcccacacccgcgcggtcctggataatccgccttgcgcgcgtgtgctgggaacgtaagaaacttagcgctatcgtggtggtggcgtcggtgtcgaccattctgctggccgcgctgacgccgctactgacgcggcaggcggtaaatgatgcgctggcgggaaatcctacccgcctgccgtggctggcctgcgggctgctactgatcgccttttttgatttcatcggtaactatgtacgacgcggctatgctggcgagctatcgctgtgggtgcagcacaccctgcgaggacgagcgttcgacagtattcaaaagctcgatggcgcaggccaggatgcgctgcgtaccggacaggtgatttcacggaccaatagcgatctgcagcaaatgcataccctattgcagatggctccggtaccgctggcggtatttacctactacatcgccggtattgccgtgatgctgtggatgtcgccggccatgacgctaatcgtggtctgcgtgctggcgtgtcttgccattaccgcgctgcgcgcccgtcgccgggtattcgcacagacggggctagcttcagaccggctggcgaatctgaccgagcacatgcgcgaagttctggcgcagatctcggtggtgaaatcctgcgtggcggaactgcgcgaaacgcgctggctggatcgtcagtcgcggcagatggtgcgcgtgcgcatcggcgcggccatctcgcaggcgatgcctggcgctaccatgctggcgctaccggttctcgggcaaatcgttctactgtgctacggcggctggtcagtgatgcacgggcgaattgacctcgggaccttcgtggcctttgccagtttcctcgccatgttgaccggacctacccgtgtgctggcgtcgttcctggtgatcgcccaacgtacccaggcatccgtagaacgggtattcgctctgatcgacacccgttcgcaaatggttgacggtagcgaagcgctcaatggtcgagttattggcctgcagctagaaaaagtgaacttcggttatggcggcggcagccgtatcctgagcgatgtttccttctccctacaggcgggtgaaacgctggcggtagtcggcgcgtcgggctccggtaaatcgacgctgctaatgctgctggcgcgcttttacgatcccagcgctggcgatatttggctaaacaccagcaccggtcggcagaaccttcgcgatctcaagcttgaggcgttacgccgtcaggtgggggtggtatttgaagacgcctttctgtttgccggaacggtcgcggaaaatatcgcctacggccacccgcaggcgacgatggaagatattcgccgcgcggcggcggcggcaggcgccagcgagtttatcaatgccttaccgaaaggcttcgatacccgcctaaccgagcgcggcactaacctctccggtggacagcggcaacgcatcgcgctggcgcgggcgctgattaccgcaccggaactgttgattctcgatgacaccacatcggcggtagatgccggcaccgaggcggagatcaatgccgcgctgggtcgttacgccgatgaccagcacatgctgctggtgattgcccgccgccgggcgacgctgcggttggccagtcgaattgtggtgttggataaagggcaagtggtggacatcggcagccaggctgagcttgagtctcgctgcccggcgttccgcgcgctgatgaccggcgacggggatttcctcgaacctgccgccggcggctgccgcgatctttggccaacaacgccagcgatgcagaacgaggagccgcaagcgttgccggaagttgacggcaacggttttgtcgcccgcatgacccgcgtgccggaacaggcggttcaacaggcgctggccggagagggacgtagattgacctcgctgctgcggccggtggcgtggatgttcatcatcgccgccctgctgatcgcgctggattctgccgctggcgtcggcgtgttaatactgctgcagcgcggtattgactcgggggttgccgcaggcgatatggcgactatcggcatctgcgccctgctcgccctgtgcctggtggtcataagctggtgttgttattcactacaaaccatcttcgccgccagagcggcggagtcggttcaacatacggtacgcttgcgcagcttcggccatatgctgcgtcttgccctcccctggcatgaaaagcacgttgattcacgcctgacccggatgaccgtcgatgtcgactccctcgcccgctttctgcaaaacggccttgccggcgcggccaccagcctggtcacgatgttcgccatcgccgcggccatgttctggctcgaccccattctggcgttgacggccttaagcgcagtgccgatagtcgcgctggcgacctgggtttatcgtcgcctgagctctccagcctatgcccaggcgcgccttgaaatcggcaaagtgaatagcactctgcaggagaaagtctccggcctgcgcgttgtgcaatcccatggtcaacaggagcaagaggccgcccggctgcgcgcattatcggatcgcttccgcgccacccgcgtacgcgcgcagaaatatcttgcggtctacttccccttcctgaccttctgtaccgaggcctcctatgccgccgtgctcctggttggcgcatcaagggtggccgagggtgaaatgacagccggggtgctggcggcattcttcctgttgctggggcagttttatggcccggtacagcaattatccgggattgtggattccttccagcaggcgacggccagcggtaaacatattgatgaactgttggcgaccgaagagacggaaaacgtcatcccttcctccacccagccggccacaggtgcattacagcttgatgaagttacataccgttatcccggcagcgctgagccagcgctggacaagctcaccctgaccatccccgagggcagtgtcgtggcggtcgttggccgcagcggcgccgggaagtcgacattgattaaacttatcgccggactctattcgcccaccagcgggaccatcggcattggggaacgacagatgacggcgacaacccttgccgattaccgccgtcagatcgggctggtcgatcaagatgttgcgctctttagcggcgatattgcggagaatatacgttattcgcggccatccagcagcaatgctgaagttgagatcgcttcacggcaggcaggcctgtttgagctggtacgtcagctcccgcaaggtttccgcacgccagtcaataacggcggcgcggatttatccgccggacaacgtcagttgattgcgctggctcgcgcccagttggcgaatgcccacgtcctgctgctcgatgaagccacatcgcgcctggatcgccgcgcggaagagcgcctcatgtcttcgttaaccgaagtcgcccgtgccagaaaacgcctggcgctaatcgtggcgcaccgcctgaccactgcccagcgctgcgatctgatcgccgttgtcgataaagggcggctcgcagaatacggtacacacgagcaattacttgcggcgaacggcctctacgcccgcttatggcgcgatagcgtcggcccggcagatgcacgcaaccaacacgacataacgggagaaatcgtgggatag

SEQ ID NO: 89643 - DNA, 1116 bp, Enterobacter aerogenes
atgcgcattctgtttgttggcccaccactctatgggctgctatacccggtgctgtctttggcgcaggcatttcgcgttaacggtcacgaagtgctgatcgccagtagcggtaaattcgcccaaaaggcggccgaggcagggctggtggtgtttgatgccgcgcccggcttcgattcggaggccgattatcgccgccgcgaggcgcagcggaaggaaagtaacatcggcaccaaaatgggcaacttctcgttcttcagcgaagagatggccgaccaactggtggagtttgccggacactggcggcccgaccttatcgtctatcctcccctcggcgtcgtcgggccgctgatcgccgccaaatacgatatcccggtggtcatgcaaaccgtcggcttcggccacaccccctggcatatcaaaggcgtgacgcgctcgctcgctgacgcctaccgccgccacggcgtcgaagctccaccgcaggatatggcgtggatcgacgtgacgccgccgagtatgagcatcctgcaaaacgatggcgaaccgatcattcccatgcaatacgtgccgtataacggcggtgcggtttgggaagaatggtgggaacgcacgcccgatcgcaagcggctcctggtcagcctgggcaccgtcaaaccgatggtcgacggcctcgatctgatctcctgggtgatggattccgccagtgaagtcgatgccgagatcattctgcatctctcagccaatgcgcgatccgatctacgcgcgttgccgtcaaacgttcgtctggttgactggatcccgatgggcgccttcctcaacggcgccgatggttttatccatcacggcggcgctggcaacaccctgacggcgctgcacgcgggtattccacagatcgttttcggccagggggccgatcgcccagtaaacgcccgcgcggtagtcgatcgcggctgcgggatcatccccggcgacggaggtctgtcgagcagcatgatcaatgctttcctcgacgatcgcgcattacgtaaggcctctgaagaggtggcggcggaaatggcggcgcaggcctgcccaaccgaggtggcgaaagaactggccgccatggcgcaaaaagggtaa

SEQ ID NO: 89644 - DNA, 783 bp, Enterobacter aerogenes
atgagcgcgttcgatcactcgtcagatgacacccaggaaactatcggcaacagcctgcgccgacgcccactggcgcgcaaaaagttgtctgaaatggtggaagaagagttggagcagatgattcgtcgcggcgagtttggcgaaggtggacagcttccttcggaacgtgagctgatggcgttttttaacgtcgggcgcccgtcggtacgtgaagcgctggctgcgctcaagcgtaagggcctggtgcaaatcaacaatggcgaacgtgcgcgagtctcgagaccgtcggcggacaccatcatttccgagctttccgggctggcgaaggattttctctccgcgcctggcggtatcgcgcatttcgagcagttacgcctttttttcgaatcaagcctggtgcgctatgcggctgagaacgccacggatgagcagatttccctgttaagcaaggcgctggagattaacggccagtcgctggatgataacgcgcaatttattcgctcagacgtcgatttccaccgcgtgctggcggagatccccggcaaccctatctttatggcgacgcatgttgctttgcttgactggctaatcgccgcgcggccgaaagtgtcggagcaagagcttcatcatcacaataacgtcagttttcaagagcatatcgccatatttaacgccatacgcgatcgcgatccggacgaagccgatcgtgcgttgcaaacccacctcaaaagtgtttccgccacctggcgtgccttaggtaaatccaaaaaatccgctaaatga

SEQ ID NO: 89645 - DNA, 894 bp, Enterobacter aerogenes
atggttagccatttacgtggcgtgatgcccgcgcttctgaccccattcgacgcacagcagaacatcgatcgggcgagcctgcgtcggttagtacgtttcaatattgagcagggcgttgatggggtttacgtcggcggatcgaccggggaggccttcgttcagagcctgtccgagcgcgaagaagtccttgaaatcgtagcggaagaggcgaaagggaaaattaccttaattgcgcatgttggttgcgtcagtacggcggaaagccagcagctggcggcggcggctaagcgctatggttttgatgcggtttccgcggtaacgccgttctactacccgttcagctttgaagagcactgcgatcattatcgcgcaattattgattctgctgatgggataccgatggtggtctacaacattccggcgctgagtggggtaaaactgaccttagagcagattaaccaactggtgacattaccgggggtgggcgcgttaaaacaaacgtctggcgatctctatcaaatggagcaaatccgtcgcgcgcatccggaactggtactctacaacggctatgacgaaattttcgcctccggcttgctggcgggcgctgacggcgggatcggtagtacctataacattatggcctggcgctatctggggatcgtgcaggcgctgaaagagggtgacaccgcgaaggcgcagcagctgcagcatgagtgtaataaggtcatcgatctgttagtcaaagtgggcgtattccgtggactgaaaacggtgctgcactatatggatgtgctctccgtgccactttgccgtaaaccgtttgcgccggtagaggataaattccaggccgaattgaaagcgctggcgcagcagttaatgcaggagcgcggctga

SEQ ID NO: 89646 - DNA, 1491 bp, Enterobacter aerogenes
atgagtacaacaacccagaatatcccgtggtatcgtcatcttaatcgggcgcagtggcgggcattttccgccgcctggttagggtatttgcttgatggttttgattttgtcttaatcgccctagtgctcactgaggttcagggggaatttggtttgacgacggtacaggcggcaagcctgatttccgccgcttttatctctcgctggtttggcggcttgatgctcggggcaatgggggatcgctacggtcgccgcctggcgatggtgaccagcattgttcttttttcgttgggtacgctggcctgcggttttgcccctggctacacctctctctttattgcccggctggttattgggatgggcatggcgggagaatatggctccagcgccacctatgttattgaaagctggccgaaacacttgcggaacaaggcgagtggatttctgatctctggcttctcggttggcgccgtcgtcgccgcgcaggtttatagtctggtggtgcccgtttggggctggcgtgcgctctttttcatcggcattgtccccatcgtttttgccctctggctgcgtaaaaacattccggaagcggaagactggaaagagaagcacgaaggtaaagcgccggtacgtacgatggtcgatattctctatcgcggccagcatcgggtgctaaacatcatcatgacctttgtggcaggcgcgtcgttatggtactgctttgccggcgaggcgcgtattgccgggttggttgcgctgctgggcctggtatgcgccattatcttcatcagtttcatggtgcaaagtagcggtaaacgctggccgaccggcgtgatgctgatggtggtggtgctcttcgctttcctctactcctggcctattcaggcgctgctgcctacttatctgaaaactgaactggcctatgatccacatactgttgctaacgtattgttctttagcggttttggtgcagccgtcggctgctgcgtcggcggtttcctcggcgactggctggggacccgtaaagcttacgtttgcagtttactggcttcgcaactgctgatcgttccggtatttgcgataggcggcaccaatgtctgggtgctcggtttgttactgttcttccagcaaatgctgggtcaaggaatttcagggatcttaccgaagctgatcggcggttatttcgaaaccgatcagcgtgctgcgggtctgggatttacttacaacgtcggtgctttgggcggcgcgttagcgccgattctcggggcgttaattgctcaacgcctggatttaggcaccgcgctgggttcgctctcctttagcctgacgttcgtggtgatcttactcatcgggcttgatatgccaactcgcgtccagcggtggatccgcccggaagccatgcgtacccatgatgcgatcgatggcaaaccgttcagcggcgcagtgccgtttggtcgcggtaaaagcacattagcgaaaagtaaaaattaa

SEQ ID NO: 89647 - DNA, 690 bp, Enterobacter aerogenes
atgtctctacttgaacagcttaatcaaaacattgcgcaatctggtggtttgatagtttcctgccagcctgtgccaaatagcccgctggataagcctgaaattgtcgctgcgatggccctggcggcggagcaggcaggggcggtcgcgctgcgtattgaaggtattgataatttacgcgccacccgcgccgtcgtttctattcctatcatcgggattatgaaacgcgatctcgacgattcgccagtccggatcaccccgttccttgaagatgttgatgcgctggcgcaaggcggggcggatattatcgccgtggatggtaccaatcgcctgcgtccggttaccgttgcggcactgctggcgcgaattcatcagcatgctttgctggcgatggccgactgttcaacttttgaagatgggatggcttgccagcagcagggggccgacattatcgggacgacgctttctggctacacgacggtgaaaacgccggaagaacccgatttcgctctggtgaaaacactcagcgaggccggatgccgggtgattgctgaggggcgctacaataccccggcgcaggcggcaactgcgatgcgccagggggcatgggccgtgaccgttggctctgccatcactcgtcttgagcatatctgccagtggtataactcggcgttaaaaaaggcggtgtcatga

SEQ ID NO: 89648 - DNA, 876 bp, Enterobacter aerogenes
atgactacgcttgctattgatatcggcggaaccaaactcgccgccgcgctggtggatgatgacctgaacctccttaaacgccgtgagttgccgacacccgccagcaaaatgccggaagcgctatgttcggcgctgcaagagctgatcgtgccgttgtttgctcgcgcccagcgagtggcaattgcctctaccggaataattagcggcggcgtgctgtcggccatcaatccccataatctgggcggtttgcagcattttccgctgacgcagaccctggaaaaaatcaccggcctacccacactggcggttaacgatgcgcaagctgcggcatgggcggaataccatgttctgggggatgaatgtcgcgacatggttttcatcacggtatccacaggtgtagggggcggcgtagtgagtaatggtcggctaatcaccgggaatggcggtctcgccggccatctgggccatacgttagcggacccgaatggaccgctatgcggttgtggtcggcgcggctgcgtagaggctgttgcttccggacgtggaatggcggccgccgctcagggagaactcagcggatgtgatgcgaaaacgattttcatgcgtgccgggcaggatgatgagcaggctattgggcttattcaccgttcggcacagaccttagcgagattgatcgctgatgtaaaagcgacaacggattgccagcgcgtggtggtcggtggcagcatcggcctggcggaaggttatctggagatggtgagagcttaccttgcgcaggaaccgtcggtatatcacgtaatgttacaacccgcgcattaccgacatgacgcgggattgctgggagcggtgttactggctcgggagaataactcatga

SEQ ID NO: 89649 - DNA, 474 bp, Enterobacter aerogenes
atgatagcaggtgatattggaacgctaaccacctccgggatacatcccgttttagccgaagcgttgatgctggcggtagccgcttgtccacaggagaaatctcctggacgtttcaatctacgcggtgacgatatttttatgaacgtcatggtatttactacccagccagcggaaagtaaaaaatcggaacagcatgcgcaatatatcgatattcaactgttgctaagcggtgaagaacgtattctgtggggaatggtaaattgtgcacagcagtgcgaagcgatacacgttgaagaggattatcagttgtgtaatgcgattgaaaatcagcaggccattacgctacggcctggtaatttcgtgatatttatgcctggtgagccgcataaacctggatgtattacgacattgccgcaggagattaaaaaggtagtagttaaggttaatgttagccttttgcaaaacgaatactga

SEQ ID NO: 89650 - DNA, 483 bp, Enterobacter aerogenes
atggctattgatatgtatctgaaggttgatggggtaaccggtgaatctaacgactcaaatcataaaaattggatagatgttttgtcatttagctgggcggctgagcagcctgggaatatgagcgttggcggcggtggcggagcgggtaaagttaattttcaggacctttcggtacaagcattgatagataaagcaacgccggcagttctcaagttttgcgctagcggtaaacatgtcgctaaagtcgaactatcaatttgcaaagccggcggctcgcaaattgagtattcgcgtgttgttcttgaagatgttctggtgacgaaaaccagttttagcggtgtgggtcataccgacactattatggtgaattacctgtttcaggcatctaaagttaatctgcattattgggagcagtcttctcaagggaccaaaggcgcagaaactaaatcgggttgggatatcaaacagaataaagaaatttaa

SEQ ID NO: 89651 - DNA, 945 bp, Enterobacter aerogenes
atgccagatattacctccgagataaatgcggttctctccgatcattcccggtttgacgcagagcagctggatattattatttcattcgtcaatgaactggataaaggaactttgagtcagtttgagaacgctccggatcgcacgattatggatacctatgagcgcttgcttgctgccagtaaagagcctgccagaagacaacgtgacgaagaatacgaactggaatctttgacgggggccagtcgtcgtactgccaccatgagcaatcatgctgcgttttttgatcgcttcagaacaacgcccgcgcatatgtatggttacggcggcaacgtctaccgggatcagacaaaaagctattacgatgtggccggtaaaatactggcaggcattggcggtctcgcttcttttggcgcaggtaccgccgccattgccgcctcgcaggcgggttcgtcgctttcgggtatagcggcgcgttatgcgttatcttctgtcggcgcgaccggcctggccgctggcgcgatggcgttgctccgtaataatttttccgatgttcaggtggcgacgaataaagatttcctcgaaaccatcaagtctatcgccaagctaagaaacaaactgaatgatttcttccagggcctcaacaacaaggtctattcggataagacaaaagcagaaacggcgctcaacaatgaaatgaagtcacatccgttacgttttggcgtcggttcaggaagtcaggtagtacatgcaaacctggccccgattcaacgtttggtcactcaggactttgttaccgtaaaccacgagatcagagccaaaattttgccgaagggtacaaattcagcctggagtgttgcggtttcgagctcagaaatgggttgggatgaacgggtattggaccaggctaacatgggtattctgcagcaggtcgttcatcagctttaa

SEQ ID NO: 89652 - DNA, 714 bp, Enterobacter aerogenes
ttggttatagggccatttattaacgccagcgcggtgcttgtcggcggcgtactgggcgcgctgctgagccaacgattgccggaacggatccgcacctcgatgacctcgatttttgggctggcatcactggggattggtattttactggtcatcaagtgcgccaacctgccggtgatggtgctggcgacgctggtcggcgcgctactcggcgaagtgtgtaatatggagaaaggcatcaataccctggtaagcaaactccagcagctattgtcgccaaagggcaggaaaaaggcctcggcccacgagtcttatattcagagctacgtggcgatcatcgtgctgttttgcgccagcggtaccggtgtttttggcgccatgcgcgaaggaatgaccggcgacgccagcatccttatcgccaaagcgtttctcgactttttcaccgctactattttcgcctgcacgctggggctggcggtgtcggcaatctgtgtgccgatgctgctgattcagctgagtctggcggcctgcgcctcgcttatcatgccgctgaccacgccgatgatgatggccgacttcagcgccgtcggcggtatgctgctggtggcgaccggcctgcgtatctgcgggattaagatgttcgcggtggtcaatatgctccccgccctgctgctggcaatgccgatttcggtcgcgtggacggccttttttgcctga

SEQ ID NO: 89653 - DNA, 2139 bp, Enterobacter aerogenes
atgaaatctatgcacattgccgccagctgcgagctggtctcccgtctgtccacccatcgtcaggttgtggcgctggacagcactgattttaccgatgcggcagcggtcgtcatcaccgcggcggatagccgcagcggtatcctggccctgctcaagcgcagcggattcaatctgccggtctatctatttagcgaaacgcaaacggataaaccggaaggagtcgtcgcggtgattagcggcaaagagcaggagtggctggagctggaagcggccgcctgcggctatgaagagaaactgctgccgccatttttcaatacgcttagccagtacgttgagatggacaacagcactttcgcctgtcccggccatcagcatggcgcgttctttaaaaagcatcccgcgggccgccagttctacgagtttttcggcgagaacgtttttcgcgctgacatgtgcaacgccgacgtcaagctcggcgatctgctgatccatgaaggttcggcgaagcacgcgcagaaatttgcggcaaaagtcttcaatgccgataaaacctacttcgtgcttaacggcacttccgcggcgaacaaggtcgtgaccaatgcgctgctgacccgcggcgatctggtactgttcgatcgcaacaaccataaatcaaaccaccatggcgcgctgatccaggccggggcgacgccggtctatctggaagccgcgcgcaacccgttcggctttatcggcggcatcgacgaccactgctttgatgaaacctacctgcgcgagctgatccgcgaagcagcgccggaaaaagccgacgcggcgcgcccgttccgcctggcggtgatccaactgggcacctatgacggcacggtgtataacgcgcgccaggtggtcgataaaatcggccatctctgcgattacatcctgtttgactcggcgtgggtcggttacgagcagtttatcccgatgatggctgactgctcgccgctgctgttggatctcaatgaaaacgatccgggcatttttgtgacgcaatcggtgcataagcaacaggccggtttttcgcagacctcgcaaattcacaagaaggataaccatctgcgcggccaggcgcgtttctgcccgcataagcggctgaataacgcctttatgttgcatgcttccaccagtccgttttatccgctgttcgcctcgctcgatgtgaatgccaaaatccatgaaggagagagcggtcggcggctgtgggcggagtgcgtggagctgggtatcgaagcgcgtaaagcgatactagcgcagtgtaaattattgcggccatttgtgccgccgctggtcggcgggaaaccgtggcaggagcattcgacggcgactatcgccagcgaacgtcgcttctttagcttcgagccgggcacgagctggcacggctttagcggttatgctgacaatcaatactttgtcgatccgtgtaagctgctgctgaccacgccgggtatcgatgccgatagcggagactataccgagtttggcatcccggcgaccatcctggcgcactacctgcgcgaaaacggcatcgtgccggagaagtgcgatctcaactcgattttgttcctgctgacgccggcggaaagcgcggaaaaactgacgcgactggtggcaatgctggcccagttcgaacagcatatcgaagcggattcgccgctcgccgaggtactgccgactatttacaacaaatacccggttcgctaccgcgattacaccattcgccagctgtgtcaggaaatgcacgatctgtacgtcagttttgatgttaaagacctgcaaaaggcgatgttccgcaagcagagtttcccgccggtggtgatgaacccgcaggacgccaaccgtgaatttatccgcggtaacgttgagctggtgcgcctgagcgaggccgaaggccgcatcgcggcggaaggggcgctaccgtatccgccgggcgtgctgtgcgtggtgccgggcgaactctggggcggcgcggtgctgcgctacttcctcgcgctggaagagggggtcaatatgctgccgggcttttcgccggagctgcagggggtttatagcgaaacggatgccgatggtattaagcggttgtatgggtatgtgttgaaagcgtaa

SEQ ID NO: 89654 - DNA, 1254 bp, Enterobacter aerogenes
atgaatcttaagctgcagttaaaaatactgtcgttcctgcagttctgcctttgggggagttggctgaccacgctcggctcttacatgttcgtcaccctgaagtttgacggcgcggccatcggcgcggtgtatagctcgctcggtatcgccgccgttctgatgccaacgctgctcgggatcgtcgccgataaatggatcagcgccaaatgggtgtatgccatctgccacctggtcggcgcgttaacgctgtacctcgcggcgcaggtcactacgccaggcgagatgttcctcgtgatcttgcttaactcgctggcctatatgccgacgcttggcttgatcaacaccatctcctactaccgcctgcagtcggcggggctggatatcgtaaccgatttcccgccaattcgtatctggggcaccatcggctttatcctcgccatgtggggcgtcagcttctctggcttcgagcttagccatatgcagctttatatcggcgcgacgctgtcggtcttgctggcgctgttcaccctgacgctgccgcatattccggtcgccaacgcccagcgcaaccagagctggaccgagatgctcggcctgaacgcttttgcgctgtttaaaaacaagcgtatggcaatcttctttatcttctccatgatgctcggcgccgaactgcaaatcactaatatgtttggcaacaccttcctgcacagcttcgataaagacccgctgttctccggcagctttatcgtcgagcacgcgtcggtattgatgtcgatttcgcagatctccgaaacgctgtttatcctgaccatcccgttcttccttagccgctacggcattaagaacgtgatgctgattagtatcgtggcgtggatgctgcgcttcggcctgttcgccttcggcgacccgacgccgttcggtaccgtgctgctggtactgtcgatgatcgtctacggctgcgccttcgatttcttcaacatctccggttcagtgttcgttgagaaagaggtgcgtccggaaatccgcgccagcgcccagggtatgttcctgatgatgaccaacggcttcggctgtatccttggtgggatggtgagcggcaaagttgtcgagcactttaccgttgaggggatcactaactggcaaagcgtgtggctgattttcgccgcctactcgctggtgctggccgtcgctttcgtggcgctgttcaagtatcaacacgtcagacagcctaccgccgcgcgccagaacgcctga

SEQ ID NO: 89655 - DNA, 1086 bp, Enterobacter aerogenes
atgatgaaaaaatacttagcgctcgcgctgattgcgccattgctcgtgtcctgttccagttccaataaaaaaggcgccgaatataacgaggcctgggtcaaggacactaacggattcgatatcctgatgggccagtttgcccataacatcgagaacatttgggggtataacgaagttctgctcgccgggccgaaggactacgtaaaatataccgatcaatatcaaacccgcagccacatcaactttgatgccggtacgattaccgtcgagaccatcgccggaaccgatccgcaaggacggttacgccaggcgattatcaaaactctgttgatgggcgatgaccccaactctatcgacctctattccgatgtcgatgatattcagatttccaaagaaccgttcctctacggccaggtcgtcgataacaccggcgaatccatccgctgggagtggcgcgccgcgcgctatgccgattatctgctgcaaacccgcctgaagagccgcagcaatggcctgcgcgtggtctatagcatcaccatcaacctggtgcctaaccacctcgataaacgtgcgcataaatatctcggcatggtgcgccaggcctcgcgtaaatatggcgttgatgagtcgctgatccttgcgattatgcaaacagaatcatcgtttaacccctatgcggtgagccacgcggatgccatggggctgatgcaggtcgtacagcatagcgcggggaaagacgtcttccgctcgcagggaaaatccggcctgccgagccgcagctatctgtttgacccggcgaataacattgataccggcaccgcttatctggcgatgctgaacaacgtttatctcgccggcatcgataaccccacctcgcgtcgctacgcggtgatcaccgcctataacggcggcgccggcagcgtactgcgcgtcttctccagcgataaagtccaggcggcgaacatcattaacagcatggcgccaggcgacgtctaccagacgctcaccacccgccatccgtcggcagaatcgcgccggtatctgtataaagtgaataccgcgcagaaaagctaccgccgtaagtag

SEQ ID NO: 89656 - DNA, 276 bp, Enterobacter aerogenes
atgagcagaacgattttttgtactttcctgcagcgtgaagcggacggccaggatttccagctctatccgggcgagctcggtaagcgcatttacaacgaaatttccaaagaggcctgggcgcagtggcagcataagcagaccatgctgatcaacgagaaaaaactcagcatgatgaacccggagcaccgcaagctgctggaacaggagatggtgcagttcctgtttgaagggaaagacgttcacatcgaaggctacacgccgccggaaaaacagtaa

SEQ ID NO: 89657 - DNA, 1059 bp, Enterobacter aerogenes
ttgacttttctcgccgcgcaattttcagcccaggtcctggactggtacgacaaatacggccgtaaaaccctgccctggcagatcgccaagacgccctacaaagtatggctctccgaagtgatgttgcaacaaacccaggtcaccacggttattccctattttgaacgctttatggcgcgtttcccaacggttgttgatttagccaacgcgccgctggatgaagtgctgcatctgtggaccggccttggctactacgcgcgggcgcgcaacttacataaagccgcgcagcaggtcgccacgcaacacggcggcgagttcccgcaaacctttgaagaggtggccgcgcttcccggcgtcgggcgctcgacggcgggggcgattttatccctttcgctcggtcagcattatccgattctcgacggcaacgtgaagcgggtactcgcccgctgctatgctgtgagcggctggccggggaaaaaagaggtggaaaaacggctgtgggaaataagcgaagaggtgacgccggcgcagggcgtagaacgcttcaaccaggcgatgatggatctcggcgccatggtttgtacccgctcgaagccgaagtgcgaactgtgcccgctgagtaacggctgcgtggcctacgctaaccattcatgggcggaatatccggggaaaaaaccgaagcagaccatcccggaacgcaccggctacttcctgctgatgcagcacggcgacgaggtatttctttcccaacgtccgccggtgggtttatggggcggattgttctgttttccgcaatttgaggatgaagccgggctgcgtgagtggctggcgcaacgtcagataaaggccgataatctgacgcaattaaccgccttccgccacactttcagccatttccacctggatattgtgccgatgtggcttacagtgcactcatctggcgcatgcatggatgaaggtaacgcactctggtataacttagcgcagccgccatcggtcggactggcggcccccgtggagcgcttgttgcaacagttgaaagccggaacgccggtctag

SEQ ID NO: 89658 - DNA, 720 bp, Enterobacter aerogenes
atgaaaaacgacgtcatttctccggaattcgatgaaaacggtcgcccgctgcgccgtattcgtagcttcgtccgtcgccagggccgcctgacgaaagggcagcagcatgcgctggataacatttggccggtgatgggcgttgaattcaacgatgcgccgctcgatttcgccgccctgtttggccgcgaagcgccggtcaccttagaaattggtttcggtatgggcgcctcgctggtggcgatggcgaaagctaaaccggagcaaaacttcctcggtatagaagtacactcgccgggcgtcggcgcgtgcctggcttccgcggaagaagaaggcgtacaaaatctgcgcgtaatgtgtcacgatgcggtcgaagtgctgcacactatgatcccggataactcgctgaatatggtgcagctgtttttccctgacccgtggcataaagcgcgtcataataaacgtcgtatcgtgcagccgcctttcgccgagctggtaaaaagcaaactgaagctgggcggcgtcttccatatggcgaccgactgggaagcctatgccgagcatatgctggaagtgatgtcttcgctggaaggctatcgtaaccggtcggaaagtaacgattacgtaccgcgcccggaatcgcgcccggtaaccaaatttgaacaacgtggccatcgtcttggccacggcgtatgggacttaatgttcgagagggtgaaataa

SEQ ID NO: 89659 - DNA, 327 bp, Enterobacter aerogenes
atggccaagaatcgtagccgtcgtctgcgtaaaaaaatgcatatcgacgagtttcaggagttaggtttctccgtagcctggcgtttcccggaagggaccagcgaagagcagatcgaccagacggtcaacgatctgatcgaagaggtcattgagccgaataaactggcctttgacggcagcggctatctctcgtgggaagggctcatctgcatgcaggaaatcggtaaatgtaccgaagagcatcaggccatcgttcgtaagtggctggaagatcgtaaattagcggatgtgcgcaccagcgaactttttgacgtctggtgggactaa

SEQ ID NO: 89660 - DNA, 717 bp, Enterobacter aerogenes
atgcgcaaaacgctgctggcggtggcgctttccgtcaccgctttgtctgcccacgcggactaccagtgtagcgtcacgccgcgtgacgatgtgatcctcagcccgcaacaggtgcaggtgaagggggaaaacggcgatctggtgattaagccggacggtaatctgacctttaacggtaaagcctatgcccttagcgccgcccagcgcgaacaggcgcaagattatcaggccggtctgcgcagcagtctgccgtggattgatgatggcgcgcgctcgcgcgtcgaaaagggccgcaaggcgctggataaaatcatcaccgaacaggttggcgccagcagcagtatgcatagccgcctgaccaagctggacgcgcagctgaaagaacagatgaaccgcattatcgaacgtcgcagcgatggcctgactttccactataaagctatcgaccaggttcgcgccgatggccaacaactggtgaatcaggcgatgggcggcattctgcaggacagcattaacgagatgggcgccaaagcggtgctcaaaggcggcggcaatccgctgcagggcattctcggcagtcttggcggcctgcaaaccgcaatccaggatgagtggaaaaaccaggaagcggatttccagcagttcggcaaagatgtttgcagccgggtggtctcgctggaagagagccgcaaagcgctggttggttcgttaaagtaa

SEQ ID NO: 89661 - DNA, 1248 bp, Enterobacter aerogenes
atgaacagtaagaccgcatcccacaccgcgctggatcgcagcgatgagcgcgttcgtcacgacgaggggctgtttagcgccctgcgcgcgcagataacccgcatcaaaaccggcgatctcggcaccgcgccggtgatagccgggctgattgtgatttccctgattttcacctttctcaacccggtctatatcgcgccgaataacctggtgaacctgctgtttgactgcgcgacggtcgggtttatctcgctcggcatcgtctgcgtgctgatgcttggcgagatagacctgtcggtcggctccatgagcggcctggcatcggctatcgtcggcgtgctgtgggtgaacgcaggatggccgctggcgggagccatcgccgtggcgctggcctgcggcgtggccgtcgggctggtctacgcgctactgtatacccgcgtcggaatgccaagtttcgtcgccactctcgccggcctgctggcgctgctgggcatgcagctgtatatcctcgggccgagcggcagcatcaacctgccctatacttcgccgctggtgcgctttggccaactgctggtgatgcccggctggttctcacacctgatggcattgctgccaggactggcgattattgtctttggtctgaaaaaacgctcgcggcggctggcggccaatctttccgccgagggagtcagctcgctactggcgcgcgcgatcgcgctgacgattatcttcgaggccgcggtgctttatctcaatcaggggcgcggtattccgtggattttcggtctctttgtcgcctgcgtgatgatcctcaactatgcgctgaaacggacaaaatgggggcgttcgatgttcgcggtcggcggcaaccgtgaagcggcgcgccgttcggggattaacgtgcgggcgatttatgtgagcgctttcgttctgtgtaccacgcttgcgacattcggcggtattctcgcggcgtcgcgactggcctccgccagccagcaggccggcaccggcgacgtcaacctcaacgccatcgccgcggcagtgatcggcggcaccagcctgttcggcggacgcggcagcgcctggtccgcgctattggggatcatcgtgattcagtcgatttcaaatgggctgacgctgttgaacctgccgtcatcgctgcgctatatcattaccggcgcggtactggcgattgcggtaatcattgattctctggctcgccgttcacgcgtgtcgcacggccgggcctga

SEQ ID NO: 89662 - DNA, 810 bp, Enterobacter aerogenes
atgccgcaacaacaacacaactccgccgccgggcggccaatactgcaactgcgcaacgtctctaaacattttggcgcggtgtccgcgctgacggatatcgaattagaagtccacgccggcgaggtagtcgcgctggtcggcgacaacggcgcgggcaaatccacgctggtgaagatcctcgccggcgtccaccagccgacctccggcaccattgagtttgacggcaaccccgtcaccctcgatagccccggcaaggcgctggaatacggtattgccacggtgtttcaggatctggcgctgtgtgaaaaccttgatgtggtggcaaacctgtttctgggtcatgaaatttcgccgttccagctcgatgaagtggcgatggaagtgaaagcctggacgctgctgcaggagctggcggcacgtattccgtcggtacgcgaaccggtggcatcgctttccggcggccagcggcagaccgtcgccatcgcccgttcgctgctgctgaaccctaaaatcattatgctcgatgagcccaccgcggcgctgggcgtcgcacagaccgcggaagtgctcaacctgattgagcgcgttcgcgagcgcgggcttggcgtcgtcatcatcagccacaacatggaagacgttcgcgccgtcgccgaccgtatcgtggtgctacgtctcgggcgcaacaaagggatcttcacgcccgatgcttccaatcaggatctggtcgccgcgatcaccggcgcgacggaaaacgccgtttcacgccgggttgaacgtaaatcacagccaacaacttccggagcgatgtaa

SEQ ID NO: 89663 - DNA, 1047 bp, Enterobacter aerogenes
atgaattaccgtaatatttttatcacactcgccgcactatccggcaccgtcacggcttcagcctggtctgcagagtccgccaccgtggcctttttaatgcccgatcaggcctctacccgctatgagcagcacgacttccccggttttaaggcggaaatgagcaagctttgcgcggattgtaaggtcatctatcagaatgccaacgccaacgcgtcgctccagcagcagcagtttaattcggttattgcccagggggcgaaagtgatagtcctggatccggttgactcttccgccgccgccgcgctggtcgaaaacgcccaggcgcagggggtcaaggtcattgcctatgaccgcccggtgccaaacaaaccggctgatttctacgtctcatttgataatgagggcattggttacgccatcgcgaaatctctcaccgaccatctgaaagcgagcggggtgccgcaggatgccggcgtgctgcagattaacggttcgccaaccgatgccgccgcagggctgatccgcgacggtatccatcgcggattgaaagagtccggttacaaaacgctggccgaattcgacaccccggagtgggcgccgccgaaagcccaggagtggaccgccgggcaggttacccgctttggcgacaaaattaagggcgtggtcgcggcaaacgacggtaccggcggcggcgcaattgccgcctttaaggctgccggggtccagccgctgccgccggtcaccggcaatgacgccactatcgccgcgctgcagctgatcatcgccggcgaccagtacaacaccatctccaagccatcggagatcgtcgccgcggcggcggccaaagtggcggttgattttattcagggcaaaaaaccgcaggccagcaccaccctgtacaacaccccttcccagctatttaccccggaagtggtgacggccaaaaacatcaaagcggaaatcttcgataaaaaaatccagacctgggatcaggtgtgtagcggcgagtacgccgccgcctgccagaagttaggcatcagcaagtaa

SEQ ID NO: 89664 - DNA, 1140 bp, Enterobacter aerogenes
atggctaatttgccgcctctgagtctttatattcatatcccgtggtgcgtgcagaagtgcccgtactgcgatttcaattcgcatgcgttaaagggcgaagtgccgcacgacgactacgtccagcacctgcttgccgatctgcgccacgatgcgccatacgcacaaggacgtgaaattaagactatttttatcggcggcggtacgccaagcctgctttccggctcggcgatgcaaaccctgctggatggcgtgcgcgcctgcctgccgctggcggcggatgcggagatcaccatggaagccaatccggggaccgtggaggccgatcgcttcgttgagtatcagcgtgccggggtcaaccgtatctccatcggcgtacagagctttagcgagcccaaattgcagcgtctggggcgtattcacggtccggaagaggcaaagcgcgcggcgcggctggcgagcggcctcgggctgcgtagctttaacctcgatttaatgcatggcctaccggaccagtcgctggatgaggcgctggatgatttgcgccaggcgatcgcgctgaatccgccgcatctgtcgtggtatcagttgactattgagccgaacacgctgtttggttcgcgcccgccggtattaccggatgacgatgcgctgtgggatattttcgagcaggggcatcaattgctgagcgccgcaggttatcagcagtacgagacctccgcttacgccaaaccaggctatcagtgccagcacaatctcaactactggcgctttggcgattatctgggtattggctgcggcgcgcacggcaaagtgaccttccctgatggccgaattctgcgtacggcgaaaacccgtcacccgcgcggctacatggaaggccgttacctggagcgccagcacgacgtggacgcggcggataaaccgttcgagttctttatgaaccgcttccgcctgctggaggccgcgccgcgcgcggagttcagcttgtataccggccttaatgagcaggttatccgtccgcaaatcgatgccgctatcgccgaaggctatctgctggaagatgcgcaaaactggcaaattaccgagcacggtaaactgtttttaaattcgctgctggagctgttcctcagcgaagagtaa

SEQ ID NO: 89665 - DNA, 594 bp, Enterobacter aerogenes
atgcaaaaagttgtactcgctaccggcaacgccggtaaagttcgcgagctggcctcgctgctggaagattttgggctcgacgtcgtcgcccagaccgagcttggcgtcgattccgccgaagaaaccggcctgacctttatcgaaaacgcgatcctcaaagcgcgtcacgccgcgcaggtcaccggcctgccggccatcgccgacgactcgggtctggcggtggatgcgctgggcggcgcgccgggcatttactccgctcgctactcgggtgaaaacgccagcgaccagcagaatctggaaaagctgctggatgccctgcaggacgtgcccgatgagcaacgccaggcccagttccactgcgtgctggtttacctgcgccatgccgaagacccgacaccgctggtgtgccacggcagctggccgggcgtgattactcgccaggcggcgggtagcggcggctttggctatgacccgattttctttgttccatccgagggtaaaaccgcagcggaactgagccgtgaagagaaaagcgccatttcccaccgtgggcaggcgctgaaactgttactggaagcattacgtaatggctaa

SEQ ID NO: 89666 - DNA, 291 bp, Enterobacter aerogenes
atgagtgccgttgaagtctgcgctgacgggctggtgctcaggctgtatattcagccaaaggccagccgcgacagccttgttggtctgcatggcgacgagctcaaagtcgccatcaccgccccacccgtcgacggccaggcaaatgcccatctggttaaatatctcgctaaacagttccgcgtcgcgaaaagccaggtgcttatcgaaaaaggcgaactgggccgtcacaaacaggtaaaaatcattcacccgcagcagatcccgcccgccgtcgcggcgctggctgactaa

SEQ ID NO: 89667 - DNA, 567 bp, Enterobacter aerogenes
atgaagacgttgaccttcctgctctcaacggtcattgagctctacacaatggtcatgttgttacgcgtctggatgcagtgggcgcgctgcgacttttacaatccgttttcacagttcgtcgtgaaagcgacccagccaatcgtcgggccgctgcgccggattatcccggcaatggggccgctggatagcgcctccctgctggtcgccttcgtgctctgcgttatcaaggcgatcgtgctgtttatggtggtcaccttccagccgattatctggattgccgcggtgctgatcctgctgaaaaccatcggttcgctgattttctgggtgctgctattgatggcgatcatgagctgggtaagccagggccgaagcccggtggaatacgtgctgatgcagttggccgacccactgctgcgcccgatccgcaacctgctgccatccatgggcggcatcgacttttcgccgatggtgctggtcctgctgctgtacgtgattaacatgggtatcgccgagctgctgcaagctactggcaatgtcctgcttccggggctgtggatggcgctatga

SEQ ID NO: 89668 - DNA, 705 bp, Enterobacter aerogenes
atgaacgatattgcgcataacctggcacaggtccgggataaaatctcaggcgccgccgcccgctgcggccgcgctccagaagaagttacgttgcttgcagtgagtaaaaccaaacctgcgagcgctatcgaagaagcgatggccgcaggacagcgggcattcggcgaaaactacgtccaggaaggggtggataaaatccgctatttccagcaggcgggcgccagcggtctgcagtggcacttcatcggcccgctgcagtccaacaaaagccggctggtggccgagcattttgactggtgccacaccgtcgaccggttgaaaatcgccagccgcctgagcgagcaacgtccggcggatctagcgccgctgaacgtgctgattcaaatcaacatcagcgatgaacagagtaaatccgggatcccgctggcggagcttgacgctttagccgccggcgtcgccgccttaccgaacctacagcttcgcgggttaatggccattccggcgccagagtcagagtatgaaaggcagtttgccgtcgcccaacaaatggcggtagcattcgcgcaactgaaaacgctctacccttcggttgatacgctctctctgggcatgtcggatgacatggaagccgctatcgcggcgggaagcactatggtgcgcatcgggaccgcaatcttcggcgcgcgcgactacagcaaaaaataa

SEQ ID NO: 89669 - DNA, 981 bp, Enterobacter aerogenes
atggagctggaagaaatcgtggcccttagtgtaaagcataacgtctccgatctacacctgtgcagcgcgtatccgccgcgctggcgtcgtttgggaaagcttgagcctgcaccgtttacttcgccggatgttgaggaaatcctcactcgctggcttaacgacccacagttggcgcagtggcgtgccgatggccaggtggactttgccctggccctctcagatgggccgcggctgcgtgccagcgcttttgcccacgcgcgcggcttgtcgttggcgctgcgtcttttgccgcagcgatgcccgcagttgggtgatttgggcgcgcccgccgcgcttagcgaactgttaaatgaagagagtggtttgatcctggttaccggcgctaccggtagcggcaagtcgaccaccctggcggcgatggtggactacctcaatcaacatcgccatggtcatattttaacccttgaggatcccgtggagtttattcacgccagcaggaactgcctgatccagcagcgcgaaatcggccgccattgctcctccttcgcggcggcgctacgtgtggcgctgcgtcaggacccggacgtcatcttattaggcgagctgcgcgatagcgaaaccatccgcctggcgctgaccgcggccgaaaccgggcacctggtgatggcgacgctgcatacccgcagcgcggcgcaggccgtcgagcggctggtggatgtgtttccggcggaggaaaaagagccggttcgcagtcagctggcggggagtttatgcgccgtggcggcgcaaaaattgttgccaaatgcttccggtggccgggttgcgctatacgaacttttagtgaacacgccagcggtggcaaatttgatccgcgaaggaaaaacgcatcagctacccggcgtgatgcaaaccagtcaacaggcaggaatgcaaacctttgcgcagagttttcaacaacgtgcgttagcaggtgagttatag

SEQ ID NO: 89670 - DNA, 654 bp, Enterobacter aerogenes
gtgattaatttatcggagaatttactgcattcgcgtcaggtgactttcattactcatccgtccattcagagtaatgcatttgcgacgtggttgactgagaagctatccgtaaacgtaactctgcataatatcaacaaaccgctaactcaacatctggcaaaagactctgtaatattgtttgatattgccgtctctaataagaaattgaatggcgtgtggcgagatattattcgcgtacaggcagataatccgcgtctgttgattatcaatagcgcgcaaaagtatgagctttacgaaatggcgcaatggcctgcgttatatggcgtattccgccatgacgatgaccaatcgcgcttaattgagggcgtcaaagccgtattaaatggcgagcagacggctgaattgagcgtgatgcacccggcgctgtattctgcggatcaggtcacggcgccgacggagaactcaccgttgaccgagcgtgaatgtgagatcctcaacgagctgcgctgcggcgcaacgaatatggatattgcccgcgcgctgttcatcagcgaaaacacggtacgtactcatctgtacaatgtgttccgcaaattgagcgtcaagaaccgtacccaggcggtaagctgggcgaatgaacatctgcgtcactga

SEQ ID NO: 89671 - DNA, 417 bp, Enterobacter aerogenes
atgagcggtacctttctgagttttgattttggcactaaaagcattggcgtcgccgttgggcagcgcattaccggcacggcgcgtccgctcccggcgctgaaagcgcaggacggcaaaccggactggaacatcatcgaaaagctgttgaaagagtggcagccggaagcggtgattgtcggcctgccgctgaacatggacggcagcgaacagccgctaaccgcgcgcgcacgtaacttcgccaataaaattcatggccgcttcggcgtgaaaatcaccctccacgacgagcgtttaagcaccgtcgaagcccgcgcagggttgttcgaacacggaggttttcgcgcgctcaataaaggcagcgttgattccgcctctgccgtggttatcctcgaaagctatttcgaacagggatactga

SEQ ID NO: 89672 - DNA, 564 bp, Enterobacter aerogenes
atgaatttacagcatcactttctgattgccatgcctgcgctacaggaccctcttttccgtcgctccgtcgtctatatctgcgagtacaacgacgatggcgccatgggcattatcatcaataagccgctggaaaatttgcaggtggaagggatcctggaaaaattgaaaatcgcgccgcaaccgcgcaacccggatatccgcctggataagccggtgatggtcggcggcccgctggcggaggatcgcggttttattctgcacacgccgccgtctgatttttcctccagcatccgtatctccgacaacacggtgattaccacctcacgcgacgtgctggaaactctcggtaccgataaacaaccgagcaacgtgctggtggcgttgggctacgcgtcgtgggaaaaagggcaactggaacaggaaattctcgataacgcctggcttaccgcaccggccgatcagaatattttgtttaaaacgccgattgccgaccgctggcgcgaagcggccaaacttatcggtatcgatatcgtgacgatgcctgccgacgcggggcatgcataa

SEQ ID NO: 89673 - DNA, 951 bp, Enterobacter aerogenes
atgatcaagctcggcatcgtgatggaccctatcgcatccatcaacatcaaaaaagacaccagcttcgctatgttgctggaagcgcagcgtcgcggctatgaactccattacatggagatgaacgacctgtatctcatcaacggcgaatcccgcgcccgtacgcgcacgctgagcgtcgagcagaattacgacaaatggtatgagttcaccggcgagcaggacctggcgctggcggatctcgacgtcatcctgatgcgtaaagacccgccgttcgataccgagtttatctacgccacctacattctcgagcgcgccgaagagaaaggtacgcttatcgtcaacaagccgcagagcctgcgcgactgtaacgaaaagctgtttaccgcctggttctccgatctaaccccggaaacgctggtcacccgtaataaagcccagttgaaagcgttctgggaaaaacacggcgatatcattctcaaaccgctggatggcatgggcggcgcctcaatcttccgcgtgaaagcgggcgacccgaacctcggcgtcatttccgaaaccctgactgaattgggtagccgctactgcatggcgcagaattatctgccggccatcaaagacggcgacaaacgcgtgctggtggtggacggcgagccggtgccatactgcctggcgcgtatcccgcagggcggtgaaacgcgcggcaacctggctgccggtggccgtggcgaagcgcgtccgctgaccgaaagcgactgggaaatcgcccgccgcgttggcccaacgctaaaagccaaaggccttatcttcgtcggcctggacatcatcggcgatcgcctgaccgaaattaacgttaccagcccgacctgcgtgcgcgaaatcgaagccgctttcccggacgtgtcgattaccggcatgctgatggacgccatcgaaaaacgtatcaacaaataa

SEQ ID NO: 89674 - DNA, 732 bp, Enterobacter aerogenes
atgcgcattcctcgcatccaccacccggaacgcattacccccggcagccacattgccctcagcgaagactcggcaaaccacgttggccgcgtcctgcgcatgagcaaaggtcaggaaatccagctgtttgacggcagcaatcaggtttttgacgcggtcatcaccgaagcgggtaagaaaaacgtcatggtcgaggttatccgtggccagatcgacgatcgtgaatcaccgctgcacatccatctcggccaggtgatgtcacgcggcgaaaaaatggaattcaccatccagaaatcgatcgaacttggcgtaagcctcataacgccactgttttccgagcgctgcggcgttaaactggatgccgaacgcttgcagaagaagattcagcagtggcagaaaatcgctattgccgcctgcgaacagagcggccgtaacatcgtgccggagattcgcccggcgatgcagctggaagcctggtgcgccgaggaagaaaacggccttaagctcaacctgcacccgcgcgccagcgccagcatcaatacgctgccgctgccggttgaacgtgttcgcctgctgattggcccggaaggcggtctgtcggcggaagagatagcgatgaccgctcgctatcaatttactgatatcctgttgggaccacgcgttctgcgtactgagaccaccgcgctcaccgccatcaccgcgctgcaggtgcgttttggcgatctgggctaa

SEQ ID NO: 89675 - DNA, 708 bp, Enterobacter aerogenes
atgtcccgtatgtatgtttttgccgtcgcgttgttcagcgtggcagccagcggcccgcttgcggcagctggtattcatagtttttcccaggcgaaagccgcaggcgtaaaagtgaatgccgacgttcccggcgacttttattgcggttgtaaaatcgactggcagggtaaaaaaggcgttatcgatctggaatcttgcggctacaaagtgcgtaaaaacgagaaccgcgccagccgggtcgaatgggaacatgtggttccggcgtggcagttcggccaccagcgccaatgctggcaggatggtggacgtaaaaactgcgccaaagatccggaatatcgcaagatggaaagcgatatgcataacctgcagcctgcggtcggcgaggtcaatggcgatcgcggcaactttatgtacagccagtggaatggcggcgacgggcagtatggtcaatgcgccatgaaggtcgatttcaaagataaagtcgccgaaccgccggtacgcgcccgcggctcgatcgctcgcacctacttctatatgcgcgaccgctatcagctgactctttcccgccagcaaacccagctatttaccgcctgggataagcagtatccggtgacctcctgggagtgcgagcgcgatgagcgaatcgccaaagtacagggcaaccataatccttacgtccagcaggcttgccaggcgcaaaagagctaa

SEQ ID NO: 89676 - DNA, 459 bp, Enterobacter aerogenes
atgcgtagcctgcgggagcaccttgccaccgccaatctcaagctggaacgccgctatgcggaaccgacgctggtttatcagcagcgcggcacctccgcaggcaccgcgtggcttgagaaaaacgagatccgccttaatccagtgctattgctggaaaatcagcaggcgtttatcgatgaagtggtgccgcacgaactggcgcatctgctggtgtggaaacactttggccgcgtcgcgccgcacggtaaagagtggaaatggatgatggaggtcgtgctgggcgtccccgcccgccgcacccatcgctttgagcttgattcggtacgccagaacaccttcccctatcgctgccagtgccagcagcatcagctcaccgttcgtcgtcataaccgcgtggtgcgcggtgaagccacctaccgctgcgttcgctgcggcgatctgctggtggcggaaaagtaa

SEQ ID NO: 89677 - DNA, 1395 bp, Enterobacter aerogenes
atgcctgacaataaaaaacaagggcgttcaaacaagacgatgacgttctttgtctgtttcctcgccgcgctggccggcttactgttcggccttgatatcggcgttattgccggcgccttaccgttcattgccaatgaattccaaatcagcgcacacacccaggagtgggtggtcagctccatgatgttcggcgccgccgtcggcgcagtgggcagcggctggctctctttcaaacttgggcgtaaaaaaagcctgatgatcggcgcgatcctgtttgtggctggttcactattttccgccgccgcgccgaacgtcgaaatcctgctgatttcccgcgtattgctggggctggcggttggcgtcgcctcttacaccgcgccgctatacttgtcggaaatcgcgccggagaaaatccgcggcagtatgatttcgatgtaccagttgatgattaccatcggtattctcggcgcctatctttccgataccgccttcagctatagcggcgcgtggcgctggatgctcggcgtgattatcatcccggcagtcctgctgctgatcggcgttatcttcctgccggatagcccgcgctggtttgccgctaaacgccgtttcgtcgatgccgagcgcgtcctgctgcgcctgcgagataccagcgctgaagccaaacgcgagctcgatgaaatccgcgaaagcctgaaagtcaaacagtccggctgggcgctgttcaaagagaacagcaacttccgccgtgcggtgttcctcggcgtcctgctgcagatcatgcaacaattcaccgggatgaacgtcatcatgtactatgctccgaagatttttgaactggcgggctatgccaataccactgagcaaatgtggggcaccgtgatcgtcggcctgaccaacgtactggccacctttatcgctatcggcctggtcgaccgctggggccgcaaaccgacgctgatcctcggctttatcgtgatggccgccggtatgggcgtactgggcagcatgatgcatatcggtattcattctgctaccgcacagtacttcgcggtactgatgctgctgatgtttatcgtcggcttcgcgatgagcgccggcccgctgatttgggtactgtgttcggaaatccagccgctgaaaggccgcgatttcggtatcacctgctccaccgcgaccaactggattgccaatatgatcgtcggcgccaccttcctgaccatgctgaactctctcggcagcgccaacaccttctgggtctacggcggtctgaacgtgctgtttatcctgctgactatctggctgattccggaaaccaaaaacgtctcgctggaacatattgaacgcaacctgatgcagggacgtccgctgcgcgaaatcggcgctcgcgattaa

SEQ ID NO: 89678 - DNA, 1155 bp, Enterobacter aerogenes
atggcaaaacacctctttacgtccgagtctgtatcagaagggcatccagacaaaattgctgaccaaatctccgatgccgtgctggacgcgatcctcgaacaggatccgaaagcgcgcgtagcctgcgaaacctacgttaaaaccggcatggttctggttggcggtgaaatcaccaccagcgcatgggttgatatcgaagagatcacccgtaacacggtgcgtgaaattggctacgtgcattccgatatgggctttgacgccaactcttgtgccgtcctgagcgccattggtaaacagtccccggacatcaaccagggcgttgaccgtgccgacccgctggaacagggcgcgggcgaccagggcctgatgtttggttatgccactaacgaaactgacgtgctgatgccggctccggtgacctatgctcatcgtctggtacagcgccaggctgaagtccgcaaaaacggcaccctgccgtggctgcgtccggacgcgaaaagccaggtcactttccagtatgacgacggcaaaatcgtcggcatcgatgcggtagttctgtctactcagcacgctgaagatatcgatcagaaatccctgcaggaagcagtgatggaagagatcatcaagccgattctgccgaccgaatggctgaacgcttcgaccaagttcttcatcaacccgaccggccgtttcgttatcggcggcccgatgggcgactgcggtctgaccggtcgtaagatcatcgttgatacctacggcggcatggctcgccacggcggcggcgcgttctccggtaaagatccatctaaagttgaccgttccgcagcctacgcggcgcgctatgtagcgaaaaacatcgttgccgcaggccttgccgatcgttgtgagattcaggtttcctacgccatcggcgtcgctgaaccgacttcgatcatggtagaaactttcggcaccgaaaaagtgccttctgaacagctgaccctgctggtacgcgagttcttcgacctgcgtccatacggcctgattcagatgctggatctgctgcacccgatctacaaagagaccgcggcttacggtcactttggtcgcgaacatttcccatgggaaaaaaccgacaaagcagccctgctgcgcgaagcggctggcctgaaataa

SEQ ID NO: 89679 - DNA, 348 bp, Enterobacter aerogenes
atgaccctaccaaggcttgcaggtagtgacacgagcagtctgagtgttaatcagtatagatggattaacttctggatggctattttaggtcagaacttcatcgcatttccacatttttttgacatcacccgcattaatggaaaaagcgtggtggaaatttttcctgacaaccccggcaaggcgcgtatttttattttgcattttaccccgcttctcggtataaaacgccgcgcgcggctcattaaaaaagcgcacgaagccccatctcgtgacgccacttccagccgggttaagcactctgttacacagcggcggtttcgccggctgtacgatatgtatataccctaa

SEQ ID NO: 89680 - DNA, 1977 bp, Enterobacter aerogenes
atgtctgacgacatgtctttgggttcgctttcgtcagcaggcgaacacggtgtactacgttccatgcaggaggttgcgatgagctcccaggaagccagcaaaatgctacgtacctacaatattgcctggtggggtaataactattacgacgttaacgaactgggccatatcagcgtttgcccggatcctgacgtcccggaagcgcgcgtcgacctggccgagctggtcaaagcgcgcgaagcccagggacaacgcctgccggcgctgttctgcttcccgcagatcctgcaacatcgtctgcgctcgattaacgccgccttcaagcgcgcgcgtgaatcctacggttataacggcgactatttccttgtctacccgatcaaggttaaccagcaccgtcgcgtgattgaatccttgatccactccggcgaaccgctggggctggaggccggttcgaaggctgaactgatggcggtgctggcgcacgcggggatgacccgtagcgtgattgtctgcaacggttataaagatcgcgaatacatccgtctggcgctggtgggtgagaagatgggccataaggtctatctggtcatcgagaagatgtcggaaatcgccatcgtgctggaagaggccgcccgtctgaacgtggtgccgcgccttggcgtgcgtgcgcgtctggcttcgcagggctccggtaaatggcagtcctccggcggcgagaaatccaaatttggcctcgcggcgacgcaggtgctgcaactggtcgaaattctgcgcgaggcaggccatcttgagagcctgcaactgctgcacttccacctcggctcgcagatggccaacattcgcgatatcgccaccggcgtgcgcgaatcggcgcgtttctacgtcgagctgcataagctgggcgttaatattcagtgcttcgatgtcggcggcggtctgggcgtggactatgaagggacccgctcgcagtccgactgttcggtgaactacggcctgaatgagtacgccaacaatatcatctgggcgatcggtgatgcctgtgaagagaacggcctgccgcacccgacggtgattactgagtccggccgcgcggtgaccgcgcaccacaccgtactggtttccaacattatcggcgtcgagcgcaacgaatacaccgaggcgaccccgccggcggaagacgccgcgcgtccgctgcagagcatgtgggaaacctggctggagatgcacgaaaccggcaaccgccgctcgctgcgtgaatggctgcatgacagccaaatggatctgcacgatatccacatcggctactcctctggcaccttcaacctgcaggagcgcgcgtgggctgaacagctgtatctgaacatgtgccatgaagtacaaaaacagctcgatccgagcaaccgcgctcatcgcccgattatcgatgagctgcaggaacgtatggcggataaaatctacgtcaacttctcgctgttccagtcgatgccggatgcctggggtatcgatcagctgttcccggtgatgccgctggaggggctgaacaagtcgccggaacgccgcgcggtgctgctggatattacctgcgactccgatggcgccatcgatcactatgttgacggcgacgggatcgccaccaccatgccgatgccggaatacgacccggagaacccgccaatgctgggcttctttatggttggcgcttatcaggagatcctcggcaacatgcacaacctgttcggcgacaccgaagcggtagacgtcttcgtcttcccggacggtagcgttgaggttgagctctccgatgagggcgatacggtggcggatatgctgcagtatgttcaactggatccgaatacgttgctgacccagttccgcgatcaggtgaaaaataccggcctcgacgccgagctgcagcagcagttcctcgaagagttcgaagcggggctgtacgggtatacttatcttgaagatgagtaa

SEQ ID NO: 89681 - DNA, 729 bp, Enterobacter aerogenes
atgaaaagcataccgcgttacggtcttattatcggtttattatttttaagcggctgcgcaaaacagccggagtacaatacccgcacggcactctccactgaggttgccacccgctggggcagcgacgttcactcaacgcttaaaggcgtgtctgtagaacgcgtagattcccatcctgatgagatcgtattaattaattattcaggtcaatatcaaaccgggtttgaccagcgctatagcattcgtaatagcgatctggaatatgcggtacgcgatgctaattttaactctctccctattactcgtcgctataataattccacgggaaaatggcaatacgccattgcggcccgcgttggtactcagtatcaattatatgtccgtaattatagccacagcgtggattatgaaattgtcgccacggtggatggtctcgatgtcctgagcggtaaggccggttcacttaacaacaacggctacattgtgcctgctggtggctcgttagcgatcaaaggctttcgtaaaaacagccgtatcgaggcggcattcgaattttcaaacgtcgcgcaatcttatgccgcccattccgtagagggcgacacgcgtaacgttggagtcattggttttgcggccttcgctttacgtggaaaagagcaagcgtcgctaccgccgtgcgcgagccaggccttccaggcggacggtttcgccccggcgccttgtcaaaaataa

SEQ ID NO: 89682 - DNA, 921 bp, Enterobacter aerogenes
atgagcactttaggtcatcaatacgataactccctggtatccaacgcctttggtttcctgcgtctgccgatgaactttatgccgtatgaaagcgatgcggattgggtcatcaccggcgtgccgtttgatatggcgacctccgggcgcgcgggcggccgtcatggcccggcggcgatccgtcaggtgtcaaccaacctcgcctgggagcacaaccgtttcccatggaacttcgacatgcgcgaacgcctgaacgtcgtggactgcggcgatctggtctacgccttcggcgacgcccgcgaaatgagcgagaaactgcaggcgcacgcggagaaactgctggcggccggtaaacgcatgctttccttcggcggcgaccatttcgtcaccctgccgctgctgcgcgcccacgccaagcatttcggtaaaatggcgctggtacacttcgatgcccacaccgatacctacgccaacggctgtgaattcgaccacggcaccatgttctacaccgcgccgaacgaagggcttatcgatccgaaccactccgtgcagatcggtattcgtaccgaattcgataaagataacggttttaccgtgcttgatgcgggccaggttaacgaccgcagcgtcgatgacatcatcgctcaggtgaagcagatcgtcggcgatatgccggtgtacctgaccttcgatatcgactgcctggatccggcatttgcgccaggtaccggtacgccggtgatcggtggactcacctccgaccgtgcgatcaaactggtgcgcggcctgaaggatctgaacatcgtcgggatggacgtggttgaagtcgccccggcctatgaccagtccgaaatcaccgccctggcggcggcgactctggcgctggagatgctttatattcaggcggcgaagaaaggcgactaa

SEQ ID NO: 89683 - DNA, 1221 bp, Enterobacter aerogenes
atggcggcaagatggcaaggggtaatagcattacttttgttaataattatttcctacgtcgatcgggtaaatatctcggtgatgatccttaacccggaattcgctgcccattttcagttaaatgaaaacagaatgttacaaggtatgctaatgacatgctttcttctgggttatgggttttcggcattattattaaccccagttatagaaagtagatggcattatcgtcagggactcttaagcagcattgctatatgggcgctggtgtgcgccatttccccgctactcggctcactgctgggaatgttgatcgcgcgcatcgttcttggcgtggcggaggggccgctgttctctctgaaaacgcgctttatcaacgacaacttcgccgctgatgaaataggcaagccgaatgcgctgaccgcccttggcgtatcgttggggctggcggtaggcttcccgctggtcacctggctgatggcgcacgttggctggatcggttccttctacgtgctggcgctgcttaacctgctgctcggcggtggattaatctggcggtttctccccgcgccgcaagtgaccgcccagcgcgcgaagccgggcttcagccaaactttttccctcgcctggcgtacgccgctgcttggctggatcctgctggtggaaatcgccacgctcagttatctgtgggggagcagcgcctggttgcccgcctggctgcgcgacgagcaccacttctcactacaggccaccgggctgctggcggcagtcccctttctgttaagcctcggctcaaagtttcttggcggcgtgctcctcgacaaaatgcgcccggagcaggcaccgctgctgtttattatcggcggcctactcaccgccggttccgtgctggcgctgatgctcagccagcagccggcgatgctggcgctgtttatgctggcggcgaacgttttctggggattacagggggcagcgatccccgcggtggttcagcatcacgccccgcgcgaagcggtgggcagcgcctatgggatcattaacggcattggcaatatttgcgcggcgtttattccgctgctgatgggagtggtgatgaaatcggtgggatcggtcagttcaggtttttccgttctggtggcctcgcagctgatcacgctgtgcgccggcggcgtactgctgctgcgcatgcgtcgcgcagcagcagtaaatacctctatcccctaa

SEQ ID NO: 89684 - DNA, 324 bp, Enterobacter aerogenes
atgagctggataggcgtatgtgacgcggagcaagtacaggaagatttcccatatagcggcaatatcgacggtaaggaaatcggtatttatctgattgatggcgaatattacgcgctggaagacgtttgccctcatgcctatgcgctcctgagccagggctttgtcgaagatggcaaggtggaatgcccgctgcatgaggcggtattcgacgtgaaaaccggccagtgcctgcatggccccggcggtcgcaaccttaatcgttacccggtgcgggtatacgacaatcagatccagattacctttatcgaggagaacgtggcatga

SEQ ID NO: 89685 - DNA, 309 bp, Enterobacter aerogenes
atgagcgaatccctggacttcaacccggcgctaccggaaagccgccagtttacgccaccggcggaaggcggaaacggcaatatccataagcctggcgactatcacaatctgatttggcaaacccgcagccgggtgccggaaaactgggaactgcagcttatcgccaccctggaaacgttgttcgagcagggcgcggaaagtctcggtgagctggtgaacggcctcaatggcgtcaggatgcatgaccaacagggcgaaccgtggagcgaaagcagcttccaggcatttttacaggtcaacggctactga

SEQ ID NO: 89686 - DNA, 1023 bp, Enterobacter aerogenes
atgacgacaacggtacaaaactatcttgataaaggactgcgcggcctgtggtatccggtgctggcgagctgggaggtgcagtctgcgccggtgggcattacccgtctcggcgagcagatcgtggtctggcggaataaagatggccaggtgcaggcgctggaagaccgctgcccgcatcgcggcgcgcgcctgtcaatgggctggaacttaggcgatcgtatcgcctgctggtatcacggcgtggaagtcgccggcaacggcgaagtcaaagacgtcccggcggttgaccgctgcccgctggtcggccagcagtgcgtgcgcagctacaacgtgcaggaagcgcacggggcaatcttcctgtggttcggcgtcaccgccgaccagcagccggatgaactgagcttcccggaggaactggccgatcacgaaaaatacagtaacttcctgtgcaccgcggcgtggaaatgcaactaccagtacgcgctggaaaacgtgatggacccgatgcacggcacctatctgcactcatcatcgcattcgatggcggaaggcgatcgcaaagccgatatggtgctgcagccgacgaaaaccggctttatcttcgagaaaaaagggcagagcggcgtcaactttgactgggttgaactgggcaacagcggcgcctactggatgcgcctgtctattccgtacaaaaagcgtttcgggccgggcggccacttctggatcgtcggcatggtggttccggaagataacgacaactgccgcgtcttcttctggcgcatccgcggcgttcagggctggcagcgcgatctgtggcgctttatgtaccgcaaccgtctggaaaaactgcactgggaagtactggaacaggatcgcgtggtgctggaaagcctggcgccgaacgcccgcgatcatgaatatctctatcaacatgacgtcggtttgtcccgcctgcgccgcatgatgcagaaagcggcgaaagagcagttagcgcttcgcgaagcgcagcagggtgccgcctga

SEQ ID NO: 89687 - DNA, 750 bp, Enterobacter aerogenes
atgaacggcctgctgaacggtaaacgtattgtcgtcaccggcgcggcgcgcggcctcggttaccattttgccgaatcctgcgccgcgcagggcgcgacggtggtgatgtgcgacatcctgcagggggagctggcggaaagcgctcatcgcctgcagcagaagggctatcagatcgaatcccacgccatcgatcttgccagtcaagcgtcgatcgagcaggtcttcagcgccatcggcgcgcaggggcctatcgatggcttagtcaataacgcggcgatggccaccggcgtcggcggtaaaaatatgatcgattacgatccggacctgtgggatcgggtgatgacggtcaatgtcaaaggcacctggctggtgacccgcgaggcggtaccgctgctgcgcgaagggtcggcgatcgtcaacgtcgcttcggataccgcgctgtggggcgcgccgcggctgatggcctatgtcgccagtaagggcgcggtgattgcgatgacccgctccatggcccgcgagttgggtgaaaagcggatccgtatcaacgccatcgcgccgggactgacccgcgttgaggccacggaatacgttcccgccgagcgtcatcagctgtatgagaacggccgcgcgctcagcggcgcgcagcagccggaagatgtcaccggtagcgtggtctggctgctgagcgatctttcgcgctttatcactggccaactgatcccggtcaacggcggttttgtctttaactaa

SEQ ID NO: 89688 - DNA, 789 bp, Enterobacter aerogenes
atggcgaacgatcaggaagtgaagtacctggtaccgggtctggagcgcggtttacaactgctgctggcgtttggcgaacagcatcgcgatctgacctttgccgagctgcatcggctggtggatatgccgaaagcgaccgcctatcgcgtggtgcagacgctggaatatatgggctttctcgagcgtaacgcccgaaccaataccttttcgctgggcatgaacgtactgcgtctgggctttgaatatatcgcctcactggatgtcgctcaggtgggtcagccggtcatcgagcaactacgcgatatcagccagtgcagcagccatctggcgatccgcgacggccgcgacattatctacatcgcccgcgtcagcgccgccggttcgcgtatcaaccaggtcagcgtcggaacgcggctaccggtgcactgcacctcgcttggccgcatgctgctgaccgatgtttcccgcagcgagtttgaacaattgttcccgaatgaacgtctgccgggcaatacgccgggccagctgtacgaccgcgaagcgctgtggcagatggtgcagcaggataaagcccgcggctacgtgattggcgaatcgttctatcgccacggcatctcatcgattgtctatccggtctttgaccgcagcggccgggtggcggcggtcgtcagcattctggtgccgtcggacgagatcccgcaaagcgatcgcgaacggttgcagaacgacgtcagtatggcggcggacaaaatttccggcttcctcggatatttgtcacaggcaagttaa

SEQ ID NO: 89689 - DNA, 927 bp, Enterobacter aerogenes
atgagtattaccggaattgaaaagctggaatttggcgtagacgacctgaaccacagcgccaaatttatgcgcgattttggcctgaccggcgacgccagcggccgcgcgtttaccaccctcagcggcgcgcgggtcgaacttaacccgaccgatgccgccgacctgccgccagcctttgaggcgggcaacaccctgcgtcgcatgacctggggcgtggcggatcgggcggcgctggatgcgctgcgcccgaagctggaacgtcagcccgctttccgtgaaatcgacggcgcgctggagtgccgcgatcccaacggtatgacgctgcgggtgcaggttagccagcaaacggcggttgaactgaacgttgaaccgatcaaccagtggggcgatgtgcgtcgcatcgacaccccgagcccggtgtacaaccgcgcgcagccgattaacgtcggccacgtggtgttcttcgtggaagaactggcggcggtggaaagtttctatcgcgaagtactcggcttccaggtgtcagaccgctacatcaatcgcgcggtgttcctgcgctgcggcgtgcgcggcggacaccataacctcttcttattgcagttgcccaaccgtaagcgcgggctaaaccacgtcgcgtttaccgtacgggatattcatgaagtgatcggcggcggcattgcgatgaataaaaacgcgtggagcacgtttatcggtcccggccgccatccggtctcctcggcctacttctggtatgtcaacagcccgaccggcggcgcttttgagtactacaccaacgatgactatctgacggaaaactggcagccgcgcgagctggagcattcactcgtgtcctttaccgaatgggcggtggaaggcggtatcgatcacgatacccgtcgccagcagaaaaaaccggaggcggtatga

SEQ ID NO: 89690 - DNA, 1197 bp, Enterobacter aerogenes
atgacggcgcggatagtcattatcggcggcggccaggctggcggctgggcagcgaaaacgctgcgtgatgaagggtttagcggcgagatttgcgtggttgccgaagaacaatgggatttttacgagcgcccgccgctgtcgaaagcggcattgctggaggccgaaccggcgctgccgcggttattcagcgccgaggcgcaacaggcgctggatctgcgctggtaccgcccgctgcgcgcggaatcgatcgaccggcaaaataaaaccctggcgctgagcaacggcgaaacgctggcgtacgaccaactgctgatcgccaccggcggccgcgcgcggctgccgtccgaggcctgggcgcagcatccgcaggtctataccctgcgccactggcaggacgcgcagcgtctgaagcagcggctggcatcggcaacgcggctggcgatcgtcggcggcggctggattggcctcgaaatcgccgcctcggcgcgcaaaagcggcgtagccgtgaccctttatgaacagcagccggctctgtgcatgcgctcggtcagtatggaggtctcgcaggcactggatgagttgcatcgcgggcagggcgttgatattcgccgcggctgcggcgcgctggagctggaagatgataacggcctgccgacgctgcactgcgatggccagcgggaaaccttcgatgcggtggtggtggggatcggcgtcgatctgaatctcgaactggcgcgcgatgctgggctcactgtcgaacgcgggattgtcgttgatgcccaggggcgcagcagcgatccggcgattttcgccgccggcgatgtcgcccagcaccatcaatacggcctgtgcattcagtcgtgggcctttgcgcaaaatcaggccatcgcgacggcgaaagcgatgctcgatccgcaggccagcggctacgacgaggcgccgtggctgtggtcggatcaatacgatcgcaatatccagatcctggggatcccgcaggcgggcagccgcaccatcgtgcgtgacgagccgcagggcgcgctctacttctcgctgaatgccgatggacgtttaacgcaactggtggccttcaataatgcacgtaccgtgaagctggcgaagcgctggatggcggcggggagggatctctctgacgtcccgctcgctgacccgactttctcgctgatgtcattgcgataa

SEQ ID NO: 89691 - DNA, 1257 bp, Enterobacter aerogenes
atgaccacattagagactaacgccgcgcctgctgaggcgagcggcgagggcgtccgcacgcctgaaaaggcggttcgttgggccattccgctgtcgctgctggcctgcgtactgctggcgtttttcgacaaaatcagcatcgccgcgctgttttccgatagccatttccagcaggcgatggggatcgatttcgataccacccggctgggtattctgatgagcgcctttctgttgagctacggcttctcgtcagtgttgttaagcggtcttggcgaccggattgcgccgctgcgcttgctaactggaatgatggtggtgtggtgcatcctgatggtgatcatgggtttcacccacaactacgcgctgatggtgacgctgcgcatcctgttgggcattgctgaagggccgctgttcccgttggcgttcgccgtggtgcgtcacaccttcccgcagcggctacaggctcgcgccaccatgttgtggctgcttggcacgccggttggcgcggcgctgggtttcccgctgtcaatttggctactcaataccttcggctggcagagcacctttttcgtgatggcgatgctgacggtaccggtgctgatttttgtgcgcatcgggctgcgcggcgtgcagctggaggcgaaagtcggcagcgataaaacgtcgcaggaagcacgccgcagcgcgcgtcgcgagctcttcgtgagtccgcatttctggatgatctgcattttcaacatcgcctttctcgcctatctgtgggggatcaacggctggctgccgggctacctgattaaaggcaaaggcattcatctggaacacgccggctggctgtcttcgatgccgtttatcgccatgttgctgggcgaaattatcggcgcctggctgtccgaccgcgtcgataagcgcgccgccgcctgctttatttccctggcgggcgccggaatcgggctggcggcggtgatgcattttagcgcgccgttaccggtgatcgcggcgatgagttttagcacctttatgtggggcaccggcgcgccaaacattttcgcgctgctggctaaagcgacccatccacgggtcagcgccacggcgggggggattttcaacgggctgggaaactttgccggggcgctatcgccggcggtgatgggcgcgcttatcgccttcacccatagcatggattccgggctgatttttctggcggtgatggcggcggtgggctgcgccctgttactgccgctgctgagacgttactga

SEQ ID NO: 89692 - DNA, 531 bp, Enterobacter aerogenes
atgactgattcaaccgtaactgcaaaacagagtttgaaacctgaccatatgacgatggaagagtgggtggagtcgcgtatcgcacgctttgaaggccgtaaatacgactggaatgcgctgaaattccaggccgatttcgatccgaaatatcgccgcgcgcagatgcgctacatcggcaccggcgccaccggcgtcgccagtgataccaacaccgttccggccgagcacttcaccttctccaccatggtgttgccgtccaaatgtgaaggcccgctgcacctgcatgatgacgtagaagaggtgttcttcatgctcaaagggcagatcaccctgatgattcaggacggcgacaactataccgaaaccgtgctgcgcgaacgcgatctgatctcggtgccgcctggaatttaccgcggtttgtttaaccacggcgaagaagaggcgctgatgtgcgtgatgctcggcacccataagccgcatattccgacctacccggaagatcatccgctggcaaaagtaaaacgtaactaa

SEQ ID NO: 89693 - DNA, 771 bp, Enterobacter aerogenes
atgacgggttttcgtgaacaaggaagcggtattccgctgacgctgctgcacggcatcagttccggcgcggcctcctggcataaacagatggcgctgcccggctaccgcgtgctggcctgggatatgcccggttatggcgaaagcccgatgctggcggcggtgccggcggatgccggtgattacgccgacgcgctggcgcgaatgctggaccgcgctggagtagagcaaaccgtactggtcggccattcgctgggcgcgctggtggcggccgccttcgccgcgaaatacccgcagcgggtgctttacctggtgctcgccgacgtcgcgcagggctacggccaggcggaagccgcacagcgggaaaaagtctggcagggacgtcaacagcagatagcgctgggtggcgaggcgatggcgcaggggcgggcggcaaaactgctgcgccccggcgcgcgcgaagccgatgtggcgacggtggcggcaggtatgcgcaggctgcgtagcgaaggctacctcgccgccgcctggatgctggcgcatgacgacatccaccgctggcttgccgactatcgcggtcgtctctcggtgtggtgcggcgagcaggatgccattacccaaccggagctggtgcagggagtggcgctgcgttacggcgccccttacatcgccatcccgcaggctggacatgccagctatctcgataacgaaaccttttttaatcaacagcttttacgcataggggaagaggtgcgcgatgaatgcacaaattga

SEQ ID NO: 89694 - DNA, 795 bp, Enterobacter aerogenes
atgaatgcacaaattgaaggacgcgtcgcggtagtcaccggcggctcgtcagggatcggctttgaaacgctgcgcctgctgctgggcgaaggggcgaaggtcgcgttttgtggccgcaacccggatcggctggccagcgcccatgcggcgttgcaaaacgaatatccagaaggcgaggtgttctcctggcgctgcgacgtactgaatgaagcggaagttcaggccttcgctgacgcggtcgccgcgcgtttcggcggcgccgacatgctgattaataatgccgggcagggctatgtcgcccatttcgccgacacgccgcgcgaggcctggctgcacgaagccgaactgaaactgttcggcgtgattaacccggtaaaggccttccagccgcagcttgaacagtcggatatcgcctcgattacctgtgtgaactcgctgctggctctgcagccggaagagcacatgattgccacctctgctgcccgcgccgcgctgctcaatatgacgctgaccctgtcgaaagagctggtggagaaaggcatccgcgtgaattccatcctgctgggaatggtcgaatccgggcagtggcagcgccgtttcgaaaaccgcagcgataagagccagagctggccgcagtggaccgccgatatcgcccgcaaacgcgggatcccgatggcgcgcctcggcaaaccgcaggaaccggcacaggcgttgctattcctcgcttcgccgctggcctcctttaccaccggcgcggcgctggacgtttccggcggtttctgccgccatctgtaa

SEQ ID NO: 89695 - DNA, 765 bp, Enterobacter aerogenes
atgaaaaaggtcatgttaatcggctatggcgcgatggcgcaggcggtgattgaacgcctgccgccgcaggtgacgttgggttggatcgtcgcccgcgaatcgcatcatgcggcgatccgccagcagttcggccacacggtgacgccgcttaccgatccgctgcagtgcgaagagacgccggatctggtgctggaatgcgccagccagcaggcggtcgcgcagtacggcgaagcggtgctggcgcgcggctggcatctggcggtgatctcgaccggcgcgctggcggacagcgaactggaacagcgtttacgtcaggcgggcggcaagttgacgctgctggctggcgcagtagccgggattgacggcttggcggcggccaaagagggggggcttgaacgagtgacctatcagtcgcgtaaaagcccggccagctggcgcggcagctatgccgaacagcttatcgacctcagcgcggtcaatgaagcgcaaattttcttcgaaggcagcgcccgcgaggcggcgcggctattcccggcaaatgccaacgtggcggcaaccatcgcgctgggcggtatcggccttgacgcgacccgagtacagctgatggtcgatccggcgacgcaacgcaacacccatacgctacacgccgaaggattgttcggcgagtttcacctggagctgagcggtctgccgctcgccagcaatccgaaaacatcgaccctcgcggcactgagcgcggtacgcgcctgccgtgaactggcataa

SEQ ID NO: 89696 - DNA, 1470 bp, Enterobacter aerogenes
atggacgaattagacatttttatcggcggccagtggcgtcgcggcggcggcaatttgatgcacagccagtttccggcggatggcgctattaacgcggcgctgtatgcggcaagcctcgatgatttacaggaggcgatcgactgcgccgatcgcgcctggcggcagccaacgtggcgggcgatgctgccgcatcagcgggcgaagatcctgcataaagtcgccgatctgattgaagcacagcttgatgcgctcacccaaaagcagagccgcgataacggtaaaccgctggcggaagcgcgagggctggtgatgagcgcggcggggacggcgcgctattttgccgccgcctgcgaactactggaaggggaattgccgacgccgcggcagacggatctattgactctgagccgctatgagccgttgggcgtggtggcggcgatcaccccgtggaactcgccgatcgccagcgaaatgcagaaggtggccccggcgatcgccgccggaaatgcggtgatcctcaaaccggcggaagccacgccgctcatggcgctggagctggcgaagatcttcgagcaggccggtttacccgccggactgctgagcgtgctgccgggtaaaggatcgattatcggcgatgcgctggcccgccatcctaaggtgcgcaaaatttcctttaccggcggtaccaccaccggacgtcacctggcgcacgtggcggcggaaaagctgatcccggcgtcgctggagctgggcggcaaatcgccgaccatcgtgctggaagatgccgatatcgaacaggcggcgcggggcatctgctacggcattttcagctccggcggtcaggcctgcattgccggctcgcggctgtttgtccatgacaaagtgtatccgcaattaatggcccgcctgctggagttaacccaagggctgcgggttggtcatccgttcagcgctggcacccacgtcgggccgctgatcaacgataaacaccgccagagcgtgctggagtacgtcgagctggcgaaacgcgaaggcggcagcgtgctatgcggcggcgagatcccggcggatccggcgctggcggcggggagctacttcctgccgaccatcattgaagggttgaacaatcaggcccgcgtttgccaggaagagatcttcgggccggtgctggtggcaatgcgttttcacgatgaagcggcgttgatccgcgaggccaatgattcggtcttcggactggcggcggggatctggacgcgcgataccggccgcgcgctgcgtctgagcgagcaactggaagccggtacggtgtggatcaacacctacaaagttttctccatttcgaccccgtttgggggctttaaagagagcggtctgggccgcgaaaaagggatccaggggctgaaagcctggatgcaacaaaagagcatttatctggcgacgggtaatagcgtcaaccactggtgcgactga

SEQ ID NO: 89697 - DNA, 1641 bp, Enterobacter aerogenes
atgagcgaaatgataaccgtcggcgatgccatcgccagaacgctggagcagtatcacgttgaagccatttatggcgtcatttctatccataacctgccgatcgccgacgccgtcggccagcgggaaaaaatccgctttgttccggcgcgcggtgaagcgggctcggtgaccatggctgacgcccacggccgtttttccgggctcggcgtggcgctgaccagtaccggcgcgggcgcgggtaatgcggttggcgcgctggttgaggcgatgaacgccggtacgccgctgctgcacctcaccggacaggtcgaaaaagcctggctggacgccgacaccggttttattcatgaaacccgcgatcagttgaccttcctgaaagccagttcgaagcgcgcttaccgcattagcaacgccaaccaggcggtggctatcctgcataaggcgattcaggaggcgcagacgccaccgtgcggcccggtatcggtggaaattcccatcgatattcagagcgccaaaattccgctttcactgctgaccgcgccgttggaacgcgctccggcggttgagccggaagtgtcgctggtcgatgcgctgtgggcgcagcttaagcaggcgaagcagccgctgctgtggcttggcggcggcgcgttagagagcggcgaggcggtgaagacgctggcggatgccggggtgacggtgatttccagtacccacggccgcggcattctggcggacagccatcgcgccagcctacgcgcgtttcataattctccctcggttgaagcgctgatttcacaatgtgatttcacacttgttgccggttcccggctgcgcagcaacgaaacgcgctcgtggacgttggagctgcccgcgccgcgggtgcagattgatatcgacccggcggcggccagccgtaactacctgatggacaacacgctggtggcggactgccgcgctttattagacgcgctggcgaagcgagtacagggccggatgtggggcgatgcgcgttgggatagccagcttaaagcggcggtagaggcggcggagcaggggctgcgcgaccagtgcggcgcttacgctaaattgaatgacgcgattgcgcaggcgctgcccgatgacggcatcctggtgcgcgatattaccgtttccggcagcctgtggggcagccgcctgttccgcgctcacggcccgctgatgaatatccattctctggccggcgccatcggtatggggctaccgatggcggtgggcaccgcgattgccaatccgcaacggaaagtggtcggcctggtcggcgacggcggcctgagcctcaaccttggcgagctggcgactctggcgcaggagaaggccaacgtgacgctgttgattatgaacgatggcggctacggcgtgatgcgcggtattcaggataagtactttggcggccgccagtattacaacgagctgcacacgccggactttaccctgttggcgcaggcgattggcctgcaggcgtggagcgtggaacgggcggaggatttccaggcggtgatgaccgaggcgctggcgatgccggggccatcggtggtggaagtgaaaatgggccagattggcgcgctgcgctttgccggcccgccgcagaagacgctgtattaa

SEQ ID NO: 89698 - DNA, 1302 bp, Enterobacter aerogenes
atgaatatatcgacagacagagaagtgccctcagtgaaaaaagaattatcattactcgcacttggcattattgccgccgcgccggctttcgccagccaacaatctaccagtcagggctttattgaagacagccacctcgatctctttttacgtaacgcttatatcaaacgcgattatcgcgatggtttgccggataaagccgaatggggtcagggtatcatcgctaccttcgagtccggctttactcaagggccggtcggcttcggcgttgacggcattgcgcagtacgccgtgcgcctcgacggcggccgcggccgcagcggcgcaggcggtatcgactttttcgcccaggatgatgatggccgcgcgaagtccgatttagcaaaatttggcgctaccgctaaaatgcgcttctcgaataccgtactcagctacggcagccagcgcccgatgctgcccatcgtctacgccgatgactcgcggctgctgtatgagagctataccggtaccatgctgacctcaagagaaatcgacggtctggaaattaacgccggttatctcaccgatcagcagcgcaaaagcgacgacagccacaatagcggcctgaagagcctgacctttggcggcgccagctatcaattcaacgaccagctcagcggcgcgctttacgcttcgcacgtcgaggacgtgctgaataagcagtatctcggcctgaactacaagcagccgttcgccgccgaccagcagctgattgttgacttcaatggctataactcccgcttagatcaagagtatgccgacgccaatgacaccgggcgcagcaacagcatctggagcctggccgccagctatatctgggatattcatacctttaaagtcgcttaccagcaaagcagcggcagcaccggctaccactacggcgggtatcagaatcagggcggcgttggcgatggcggcaacaccatctggctggctaactcctactggtccgattttaacggcgaggatgaacgttcctggcaggcctcctatggcctggattttgccggactgggcgtaccgggcctgagctggaccaccgcctacgttcgcggcgataacattaaaaccgccgagaccagcaacggcaaagaacacgaatggttcaaccaggtgcagtaccaggtgcaaaacggcatggcgaaagatttgaaattgagactccgctattcgatgctgcgcgtttccagcaacgccagcgactataacgtcagcggtaatgaagtgcggttctacgtcgaatttccgtttaacgtgttttaa

SEQ ID NO: 89699 - DNA, 759 bp, Enterobacter aerogenes
atgaaaattcgctcaacccttcttgccttcgggatcgcagcaacgttaaccggatgtcagaacatggactccaacgccctgctgagctcgggcgcggaagcattccaggcctactctcttagcgacgaacaggtaaaaaccttaagtgaccaggcgtgtaaagagatggacgccaaagccactatttctccggccagcagcgagtacagcaaacgcctgagcaagattgccgcggcgctgggcgataacatcaacggtcagccggtcaactacaaggtttatgaaacaaaagacgtcaacgccttcgcgatggccaacggctgcatccgcgtttacagcggcctgatggacctgatgaacgataacgaagtagaagcggttatcggccacgaaatgggccacgttgcgttgggccacgtgaagaaagggatgcaggtcgcgctgggcaccaacgccgtgcgcgcggcggcggcctccgctggtggtatcgtcggtagcctgtcgcagtcgcagctgggcgatctcggcgaaaaactggtgaactcgcagttctcccaacgccaggagtcggaagcggacgactactcttacgacctgctgcgtaaacgcggcatcaatccatcgggactggccaccagcttcgaaaaactggccaagttggaagccggccgtcagagctccatgtttgacgatcacccggcatcggaagcccgcgcgcagcatattcgcgatcgcatgaaggccgacggtattaaataa

SEQ ID NO: 89700 - DNA, 1299 bp, Enterobacter aerogenes
atgacagaaagtagcattaacgagcagggttccctggagcagggcgatacccggcgccgtgtatgggcaattgtgggggcatcttcagggaacctggtggaatggtttgatttttatgtctactcattttgctcactctattttgcgcacatcttcttcccttcaggaaataccaccactcaattgttacaaacggccggagtttttgctgctggcttcctgatgcgccccatcggcggctggctatttggccgtattgctgaccggcgcggacgtaaagcctcaatgcttatttcggtatgcatgatgtgtttcggctcgctggtgattgcttgtctaccggggtacgccactatcggtacctgggcgccggcgctgctgttgctggcacgtctgttccagggcctgtccgttggcggggaatatggcaccagcgcgacctacatgagtgaagtcgcagtagaaggaaagaaaggattctacgcctccttccagtacgttacgttaattggcggtcaactgctggcggtactggtcgttgtcgcactgcagcaaatcctcagtgatgaagatttgcatgcctggggatggcgtattccttttgcgctgggcgcagtactggccatcgtcgcgctgtggctgcgtcgtcagttggatgaaacctcgaagcaggaaacccgtgcgctgaaagaggccggttcctttaaaggtttgtggcgtaatcgccgggcttttgtcatggtgctgggctttactgccgccggttcgctgactttttacaccttcaccacgtatatgcaaaaatatctggtgaataccgccggcatgtcggccagtactgccagcatgattatgacggcggcgcttttcgtgtatatgctggtacaaccgctgtttggcgccttctcggataaggtggggcgccgtacttcaatgctgtgtttcggcgtgctggcgacgctgtttaccgtgccaatcttgagtgcgctgcagaatgttagctcgccgtatgccgcatttgcgctggtgatttgcgcgttgctgatcgtcagcttctacacctccatcagcgggatcctgaaggcggaaatgtttccggcacaggttcgcgcgctgggcgtgggcctgtcctatgcggtagcaaacgcgctgttcggcggttcagctgaatacgtcgcgctgtcgcttaaatctataggaatggagaatgccttctactggtacgtgacggtaatggcggcgattgccttcctggtctccctgatgctgcatggtaaagggaaggggttgcgtttgtaa

SEQ ID NO: 89701 - DNA, 324 bp, Enterobacter aerogenes
atgcgctacttcatcattattgcccctttactactcagcggctgcagccatatggccaatgatgcctggagcggtcaggacaaggcccaacactttctcgcgtcggcaatgctctccgccgccggcaatgaatatgcgcagcatcaggggtacagccgcgatcgcagcgccgccatcggtctgatgttttccgttagtctgggggcatcaaaagagttatgggacagccgcccggcagggagcggctggagctggaaggatttcgcctgggatgtcgccggcgccaccaccggctatacggtgtggcgactggcgcatcaataa

SEQ ID NO: 89702 - DNA, 1356 bp, Enterobacter aerogenes
atgttgtcaaaatttaagcgtaataaacatcaacaacaccttgcccaactccctaagctctctcagtcagttgatgatatcgagttcttttacgcgccggctgatttccgccaggcgctactggcaaagatagcccacgccacccagcgtatttgcattattgcgctctatcttgagcaagatgatggcggaaaaggaatactgcaagccctgtatgacgctaaacgccagcgtccagaactggatgtgcgcgtgctggttgactggcatcgcgcccagcgtggccgtatcggcgcggcagcctccaataccaatgccgattggtactgtcgcatggcccaggaaaacccagggattgatatcccggtgtatggcgtcccggtcaatacccgggaagcgctcggcgtgctccattttaaaggcttcatcatcgatgacagcgttatttatagcggcgccagcctgaacgatgtgtacctgcatcagcatgataaatatcgctacgatcgctatcagtgcatccgcaacggcaagatggccgacgtgatgttcgactgggtcgagcagaatctggtacagggtcgcggcgtgaatcgactcgatcgcccggatcgaccaaaaagcccggaaatcaaaaatgatattcgccagtatcgccaggatctgcgcgaaagcggctatcacttcaccggcaatgccgatgaagatcaactgtcagtcacaccgctggtcgggctcggtaaatcgagcctgctcaacaagactatcttccacctgatgccgtgtgcggaacataagctgaccatctgcaccccgtatttcaacctgcccgccgtactggtcagaaatattatttctctgctacgcagcggaaaaaaagtggaaatcatcgtcggcgacaagaccgcgaacgacttctatatcccggaagatcagccgtttaaaatcatcggcgcattgccttatttgtacgaaattaacctgcgtcgcttcctgagccgtctgcagtattatgtgaataccgatcagctcatcgtacgtttatggaaagatgacgataacagctaccacctgaaaggcatgtgggttgataacgagtggatgctgctgaccggcaacaacctcaatccgcgcgcctggcggctggatttagaaaatgccgtactgatccacgatcctaagcatcaactgcgcgaaatgcgggaaaaggagcttcagctcatccgtacacatacgacggtagtgaagcactatcgcgatctacaaagcatcgccgactatccggtgaaggtgaaaaagctcatccgccgtctgcggcgcatccgcatcgaccgcctcatcagccgcattctctaa

SEQ ID NO: 89703 - DNA, 2676 bp, Enterobacter aerogenes
atgagccaacgaggcctggaagcactgctgcggccaaaatcgatcgccgtcattggcgcatcgatgaaaccgcagcgcgctggctatttaatgatgcgcaatttgttggccggcggttttaatggcccggtcctgccggtgacgcccgcctggaaagcggtgcttggcgtactggcgtggccgactatcgacagcctgccgtttaccccggatctagcggtgctctgtactaatgcccgtcgcaatctcgagttgctcgaggccttagggcggaaagggtgtaaaacctgcattatcctctcttcacagccagaccagtacccggcgctgctcgagtgcgccgcccgttatcaaatgcgtctgctcggtcccaacagcctggggctgctggcgccgtggcagggtctgaacgccagcttttcgccggtccctatccagcgcggcaagctggcgtttatctcgcaatccgccgccgtctctaacaccattctggactgggcgcagcagcgtgaaatgggcttctcgtactttattgcgcttggcgatagtcttgatatcgacgtcgacgacctgctcgattttctcgcccgcgatagcaagaccagcgctattttgctctatctggagcatctcagcgatgcccggcgttttgtctccgctgcccgtagcgcatcgcgtaataaacccattctggtcatcaaaagcggccgcagcccggcggcgcagaaattactgcatgtcaactcagggatggatcccgcctgggatgccgctattcagcgggcggggctgctgcgcgtacaggacacccacgagctcttttccgccgttgaaaccctgagccatatgcgcccattgcgcggcgaaaagctgatgattatcagtaatggcgccgcgccggcggcgctggcgttggacgaactgtggctgcgtaacggcaaactcgccaatctcagtgaagccatctgcgaccagctcaggcaggcgttaccgacgggcgtcgaggttgctaatcctctggatctgcgcgatgacgccagcagcgagcactatctcaaggcgctgaatgtgttgctggacagccaggattatgatgcgctgctggtgatccactcccccagcgccgcggcgccgggcaccgaaagcgcgctggcgttgattgatgcccttaagcgtcatccacgcgggaaatacgtcacggtgctgacgaactggtgcggggagtactcttcccaggaggcgcgacggttgtttagcgaggccggtatcccaacctatcgcacaccggaaggcactattaccgcctttatgcatatggtcgagtaccggcgcaaccagaaacagctacgggaaacgccggtattgtccgatacgttgaccgccaataccgcagaggcccacacgctgttgcagcgcgcgctaagcgaaggcgcgacctcgctggacacccatgaggtcagcccgctgctgcgcgcctacggcatccatactcttcccacctggattgccgccgacagcgccgaagcggtacatatcgccgagcagattggctacccggtggcgttgaagctacgttcgccggatattccgcataaatcggaagttcagggcgtcatgctctatttacgtaccccagctgaagtccagcaggcggcggacgcgattatcgaccgggtaaaaatggcctggccgcaggcgcgcattcatggcctgttggtacagagtatggccaaccgtgccggggcgcaggagctccgggtcgtcgtcgagcatgacccgcttttcggcccgctgattatgcttggcgagggcggcgtcgaatggcgagcggaaaatcaggccgcggtcgccctgccgccgctgaatatgaacctggcgcgttatctggtgatccaggccatcaagagtaaaaagatccgcgggcgcagcgcgctacgtccgttggatattcccggcctcagccaactgctggtgcaggtctctaacctgattgtcgattgccccgagatccagcggctggatattcaccccttgcttgcttccggcaacgagtttaccgccctcgacgttactctcagcctggcgccatttagcggcgacagcgaaagccgactggcggtcagaccctatccgcagcaacttgaggaatgggtggaaatgaaaaacggcgagcgctgcctgttccggccaatcctgcctgaggatgaaccactattattggcctttattgagcgggtcaccaaagaagatctctattaccgctacttcagcgagatcaacgaattcacccatgacgacttagccaatatgacgcagatcgactacgatcgtgaaatggcctttgttgcggttcgcgccacggagcaaggaagcgagatcctcggcgtgaccagagcaatttccgatcctgataatattgatgccgagtttgccgtgctggtgcgttctgacctgaaaggtttaggccttggtcgacagcttcttgaaaaactgatcgcctatacgcagagccatggattacagcgcttaaatggcatcaccatgccaaataaccgcggcatgataggccttgccagaaagcttggttttgcagtggatatccagttagaagacggaatagtgagcctgtctcttgcgctgaatacgttacattcggtgacaagcgacagcaattaa

SEQ ID NO: 89704 - DNA, 699 bp, Enterobacter aerogenes
atgattgataacgctgtccttcggctacgcgccgaacgcctcgcgcgcgcaacccggccttttcttgctcgcggcaaccgcatccgccgctgccagcgctgcctgctccccctaaaacagtgtctgtgcgcaacgctggcgccagcgcaggccgacagccgcttttgcctggtaatgttcgacaccgagccgatgaagcccagcaataccgggcgccttatcgccgatattctgcccaacaccgaagcgtttcagtggtcgcgtaccgagccgccgcaggcgctgctcgatctggtcgccaaccccgattatcagcccatggtcgtctttccggcctcttatgccggagcggaacgccaggtactgagcgccccgccggagggtaagccgccgctgtttattatgctcgacggcacctggacggaagcgcggaaaatgtttcgcaaaagcccgtatctcgatgcgctgccggtaatttctgtcgacctgtcgcgcatctccgcctatcacctgcgcgaagcccatgccgacggtcagtactgtacggcggaagtcgccatcgccctgctggacttagccggcgacgcgcaggcggcggccgcgcttggcgatcactttagcctgttcagaagccgctatctggcgggaaaaacgcagcataagggcagtatcacagcacaacaggctgaaagcgtttaa

SEQ ID NO: 89705 - DNA, 426 bp, Enterobacter aerogenes
atgaataccgtttgtgccagttgtcaggctcttaaccgcatccccgaagaccgtagcgccgatggcgccaagtgcggacgctgcggccacgatctctttgacggcgatgtcatcaacgcgaccggggcaacgctggataaactattaaaggacgatctgccagtcgttattgatttctgggccccgtggtgcggcccatgccgtagctttgcgccgatctttgaagatgtggctgaagagcgcagcggcgaaatgcgttttgtgaaagtgaacactgaagccgaacgcgaactgagcgctcgcttccgcatccgtagcattccaaccattatgatgttcaaaaatggtgaaatggtcgacatgctgaatggcgccgtccccaaagcgccgttcgatagctggctgaacgaagccaaccagcagtaa

SEQ ID NO: 89706 - DNA, 1071 bp, Enterobacter aerogenes
atgagcgacgaactgaaaaataaaagcggcaaggtcaaagtgatgtatgtccgcagtgatgatgattctgacaaacgtacccataacccgcgtaccgggaaagggggagggcgtccaggaaagtcacgtgttgacggccgcagccgccctgcgcgcgatgaacgtaacagccgcggcgacgatcgcaaacgcgacgatcgcaagcgtaatgattttaatcgcgatgatgcgtccccatggcgcaccgtttcccgcgctccgggtgatgagacgccggtaaaagaagatcacggtggcatcagcggtaagagctttatcgatccggaagtgctgcgccgtcagcgcgcggaagagacccgcgtctacggcgagaacgcctgtcaggcgctgttccagagccgtccggaagccatcgtacgcgcctggtttatccagagcgtcactccgcgctttaaagaggcgctgcgctggatggcggccaaccgtaaggcctaccacgtagtggacgaagccgaactggcgaaggcgtctggtaccgaacaccacggcggcgtctgcttcctgatcaaaaaacgtcatggtacttccgtggcccagtgggtggcgaaagcagaagccgaagattgcgtactggcgctggaagatgttggcaacccgcacaacctcggcgcgattatgcgtagctgcgcgcactttggcgtgaaaggcgtggtagtacaggatgccggcgtgctggagtctggcgcggcgatccgtactgcagaaggcggcgcggaacatgttgagccgatcaccggcgacagctttatcgataccctgacgcagttccgtcaggctggctacgccatcgtctcgacctccagccataacggtacgccgctgtttaaggccgagctgccgaagaaaatggtgctggtattaggccaggagcgcgacggtctgtccgatgcggcgatctccagctctgacctcaacgtcgccatcgatggcaccggcaacgtcgaaagccttaacgtctccgtggcgaccggcgtgctgctggcggaatggtggcgtcaaaataaggcctga

SEQ ID NO: 89707 - DNA, 690 bp, Enterobacter aerogenes
atgaccaccccattaacctggcacgacgtgctggcggaagagaagcagcagccctattttctcaacaccctcaagaccgtcgccgaagagcgccagtccggcatgactatctatccgccgcagaaagacgtctttaacgcctttcgctataccgaactgggcgaggtcaaagtggtcatcttaggtcaggatccctatcacggcccgggacaggcgcacggtctggccttttctgttttaccgggagtgcagataccgccgtcgctgctgaacatgtataaagagctggaaggcaccatccccggctttcagcgcccggcgcatggttatctggaaagctgggcgcgccagggcgtgctcctgcttaataccgtgttaacggtgcgcgccggtcaggcgcattcacacgccagtctcggctgggaaacctttaccgataaagtgatagcgctgattaaccagcattgtgaaggagtggtatttctgctgtggggggcgcacgcgcagaaaaaaggcgccattatcgatcgccagcgccattgcgtcctgaaagcgccgcacccgtcaccgctgtcggcgcaccgcggtttcttcggctgcaaccactttgtgcaaactaaccagtggctggccgaacgcggcgaggcgcccattgactggatgccggtgctgcccgctgaaagcgagtaa

SEQ ID NO: 89708 - DNA, 384 bp, Enterobacter aerogenes
atgattactggtatccaaattactaaagcggcaaacgacgacctgctgaactctttctggctgctggatagcgaaaaaggcgaagcgcgctgcctgtgtgccaaaggtggttttgcggaagatgatgtagttgcggtgagcaaactgggtgaaatcgaataccgtgaaatcccggtagacgtgaaaccggaagtccgcgtggaaggcggtcagcacctgaacgtgaacgtgctgcgtcgcgaaactctgctggatgccgttgagcacccggaaaaatacccgcagctgaccattcgtgtttccggctacgcggtacgttttaactctctgactccggaacagcagcgcgacgttatcgctcgtacctttaccgaaagcctgtaa

SEQ ID NO: 89709 - DNA, 1332 bp, Enterobacter aerogenes
atgactgtaacgactttttccgaacttgaactcgacgaaaacctgctggaagcgctccaggataaaggtttcacacgcccgacagccattcaggccgccgctattccgcctgcgcttgatggccgtgatattctcggttctgcgccgacaggcaccggtaaaactgcggcatatttgctgccagcgttgcagcatctgcttgattttccgcgcaagaaatcggggccgccgcggatccttatcctgacgccgacccgcgagctggcgatgcaggttgccgatcacgcccgcgaactggcgaagcatacccatctggatattgccaccattaccggcggtgttgcgtacatgaaccacgcggaagtgttcagcgaaaaccaggatatcgtggtcgccactaccggtcgcctgctgcagtatattaaagaagagaacttcgactgccgcgcggtagaaacgctgatccttgatgaagcggaccgcatgctggacatgggctttgcccaggatatcgaaaccatcgccggtgaaacccgctggcgcaagcagaccatgctgttttccgccacgctggaaggcgatgcgattaaagactttgccgaacgcctgctggaagagccggttgaagtttctgcaaatccgtcgacccgcgaacgtaaaaaaattcaccagtggtactatcgcgccgatgatatcgatcataaaaccgcgctgctggttaatctgctgaaacaaccggaagcaacccgctctatcgtcttcgtgcgtaaacgcgagcgcgttcacgaactggccgctaagctgcacgaagcaggcatcaccacctgctggctggaaggcgaaatggtgcagatcaaacgtaacgaagcgattaaacgcctgaccgatggtcgcgtgaacgtgctgattgccaccgacgtcgccgcgcgcggtattgatattccggatgtcagccacgtgtttaacttcgatatgccgcgcacagccgatatctatctgcaccgtattggccgtaccggccgtgcaggtaagaaaggcaccgctatttcgctggttgaagcgcacgatcacctgctgctgggcaaaatcggccgctacgttgaagaaccgctgaaagctcgcgtgattgatgaattgcgcccgaaaacccgcgcgccgagcgagaagttaaccggtaaaccatcgaagaaagtgctggcgaaacgcgccgagaaaaaagagaaagaaaaagagaagccgcgggtgaagaaacgccaccgcgataccaaaaacatcggtaagcgccgtaagccaagctctgccgtgacgccgtcaacgtccaacgaagagtaa

SEQ ID NO: 89710 - DNA, 738 bp, Enterobacter aerogenes
atgtctcagtcgaagtttgcgctgccgcgcaatggttttacctttaaacaattttttgtcgcccacgatcgctgcgcaatgaaagtcggtaccgacggtattctgctgggcgcctgggcgccgattgctcaggtgaagcacgtgctggatatcggaaccggcagcggtttgttggcattaatgttagcccagcgtactgcggatacggtccaactggatgcggtggagttggatgaagaggccgcgacgcaggcgcgggataacgtggcggccagcaactggcctaaacgcatcgccgtataccaggcgccgattcagcagtggcagccgcagccgccacggcgctatgagctcatcgtcagcaatccgccgttttttgccgaaggcgtaccttgcgcgacgtcgcagcgcgaacaagcgcgttataccacctcgctcgatcatacgacgctgctcacctgcgccgcggatctgattaccgaggagggctttttctgcgtggtgctgccggtggatattggtaatgcgtttgtcgaacgggcgaaagcgatggggtggcatttgcgcttacgcactgacgtggcggaaacagaaatgcgcccaccgcatcgggtcctgctggcattctctcccagcgccggcgagtgtttcagcgatcggctggtggttcgtgggccagagcagcagtactctgaaggctttaccgcgctgacccgcgacttctatctctttatgtga

SEQ ID NO: 89711 - DNA, 1620 bp, Enterobacter aerogenes
atgaagacgactcctgacttttcctgtgatgtgttgattatcggcagcggcgctgccggattgtctctggcgctgcgcctggcggagcgccactcggttaccgtcctgagcaaagggccggttagcgaaggctcgacgttctacgcccagggtggaattgccgccgttttcgatgaaaccgacagcatcgaatcccacgtcgaagatacgctcatcgccggggccggactttgtgaccgtcatgccgtctccttcgtcgccagcaacgccaaaccctgcgtgcagtggcttatcgatcagggggtactgtttgatacccaggtccaggccaacggtgaagagagctaccacctcacccgcgaaggtggtcatagccatcggcggatcctgcatgccgccgatgccaccggcaaagaggttgagacgacgctggttggcaaagcgctggcgcatccgaatatcaccattctggaacgtagcaacgcggttgacctgattatctccgataagattggcctgccgggtacccgtcgggtcgtcggcgcgtggatctggaaccgtaataaggaaaaggtagaaacctgcagcgcaagagccgtggtgctggcgactggcggcgcagctaaagtttatcaatacaccaccaatcctgatgtctcctccggcgacggcatcgccatggcctggcgcgcgggatgccgtgtggccaatctcgaatttaaccagttccaccctaccgcgctgtttcatccacaggcgagaaacttcctcttaacggaagccctgcgcggcgaaggcgcgctgttgaaacggcctgacggtagccgctttatgccggacttcgacgaacgcggcgaactggccccgcgcgatatcgtcgcccgcgccatcgaccatgagatgaagcgcctcggcgtcgactgcatgtatctggatattagccataagcccgaagcgtttattcgccagcattttccgatgatttatgaaaagctgctcggccttggtattgatttaaccaaagagccggtacctatcgtccccgccgcccactacacctgcggcggcgtgatggtggatgataacggacgtaccgacgtcgacggtctgtacgccatcggcgaggtaagctacaccgggctgcacggcgccaaccgcatggcctcgaactccttgttggagtgtctggtgtacggctggtcggcagccgaggacatagcgaaacgcctgccgctggcgcaagcggcggaacagctgccgccatgggatgaaagccaggttgagatcccggatgaactggtggtgattcaacataactggcacgaactgcgcctgctaatgtgggactatgtcggaattgtgcgtaccacccgccggctggaacgagcgctgcggcgcattactatgctgcagcaggagctggatgagtattacgcgcgttttcgcgtctccaataacttactggagctgcgcaatctggtgcaggtggccgagcttatcgtgcgttgcgccatgcagcgtaaggagagccgcggcctgcactatacgctcgactacccggacacgctggaaaacagcggcccgtcggtgctctcgccgcttgctcacataaagagatag

SEQ ID NO: 89712 - DNA, 576 bp, Enterobacter aerogenes
atgagcgagcagttaacggatcaggtcctcgttgaacgggtccagaaaggagatcagaaagcttttaacctactggtagtgcgctatcagcacaaggttgcaagcctggtctcccgctatgtaccgccgggcgatattgctgacgttgttcaggagtcgttcgtgaaggcgtggcgtgcgctggattctttccggggggatagcgctttttatacctggttgtatcgtatcgccgtaaacacggcaaagaattatctggttgctcagggacgccgtccgccatcaagcgatgttgacgccaacgaggcggaaaacttcgaaagcggcggggcattgaaagaaatttcgaaccctgagaacttaatgttgtcagaagagctgagacaaatagtttttcgtaccattgaatcgcttcccgaagatttacgcatggcaattacgttgcgggagctggatggcctgagctatgaagaaatagccgccattatggattgtccggttggcacggtacgttcgcgtatcttccgggcacgtgaagctattgataataaagttcaaccgctaatcaggcgttga

SEQ ID NO: 89713 - DNA, 651 bp, Enterobacter aerogenes
atgcagaaagaaaaactttcggccttaatggatggtgaaacgctggataacgagctgctcaatgagctgagtcgttcttctgaaatgcaaaaaacctgggagagctaccatctcatccgcgacacgctgcgaggcgataccgccgagatgctccaattcgatatctcagctcgcgtgatggccgccatcgagaacgaacctgctcgtcaggttgcgccgcttattcctgagtctcaacctgctccacaccagtggcgtcaaatgcctttctggcagaaagtacgcccgtgggccagctcacttacccaaatgggtgtggcagcgtgcgtttctctggctgtgatcgttggcgtccagcagtataacggacactccgatgcctcccagcagccggaagcgccagtcttcaacaccatgccgatgatgggcaaagccagcccggttagcctgggcgttccggctgatgcctccgccggcagcggtcagcaggcgcaggttcaggagcaacgtcgtcgtattaatgctatgctgcaggactatgaattgcagcgtcgcctgcacgctgagcagcttcagtttggccaggcccagactcagcaagccgctgttcaggtgccaggttatcaaactttaggaacgcaatcgcagtaa

SEQ ID NO: 89714 - DNA, 957 bp, Enterobacter aerogenes
atgaagcaactttggtgtgccatgtcgctcatggcgggcagcctgttcttctccaccaacgcctcggctgatacatcgtccggggcgttgttgcagcagatgaacctggctagccagtccctcaattacgagctgtcttttgtcagtatcaacaaacagggcgttgagtcgctgcgctatcgtcacgtgcggttgaacaaccagccccttgctcagttgctgcagctcgacggtccgcgtcgggaagtggtgctgcggggtactgaaatcagctattttgaacccggtctcgatcccttcaccctgaacggcgactatatcgtcgattccttgccgtctctggtgtataccgatttcaaaaagctggcctcgtattatgatttcatctccgttggccgtacgcgtatcgccgatcgcctgtgcgatgtggtgcgcgtggtggcccgcgacggtacgcgctacagctacattgcgtggctggatgccgagaccaagctgccgctgcgcgtcgacctgctcgaccgcgacggtgaaaccctggagcagttccgggtggtctcattcaatatcggtgataacgtaagctcgagtatggaagcgctgtcgaaagccagcctgccgccgcagctgtcggtcccggaaagcggcaataaagccaactttaactgggcgccgacctggctgccgcagggcgtgacggaagtttccagcagtcagcgtcgtttaccgaccttcgatggtcctgtcgagtcgcgtctctattccgatggtctgttcagcttctccgtcaacgttaaccgcgcgacggtaaacagtagcgatcagctgctgcgcaccggccgccgtaccgtcagtacctcggtgcgcgataacgccgaaatctcagtggtgggcgaattaccgccgcagacggcaaaacgtatctccgacagtattaagttcagggccgcgcaatga

SEQ ID NO: 89715 - DNA, 480 bp, Enterobacter aerogenes
atgatcaaagagtgggcgactgttgtctcctggcacaacggcgtggcgcaggttcactgcgatgttaaagcctcttgcagcagctgcgcctcgcgcgccgggtgcggtagccgggtgctcaataaactggggccgcaaaccagccataccattagcgtcccctgtgagcagccgctgacggccgggcaaaaagtggagctgggcattgctgaaagcagcctgctgggttcggcgctgctggtctacatggcgccgctgttcgggctgtttgtgatggcatctatttttcaggtgttgtttgccagcgatatcgcttcgttgtgcggcgcgctgttgggcggcgtcggcgggttcctggtggcgcgtgggctgtcgccgacgctggctgctcgccagtcgtggcagccggtgattttaagcgttggtttaccgccggatctgctgcgcgtcgatacgccttcctctgaaatggggcagtga

SEQ ID NO: 89716 - DNA, 1800 bp, Enterobacter aerogenes
atgaagaatatacgtaacttttcgatcatcgctcacatcgaccacggtaagtcgacgctgtctgaccgtatcatccagatttgcggtggcctttctgatcgcgaaatggcggcccaggttctggactccatggaccttgaacgtgagcgtggcattaccatcaaggcgcagagcgtcaccctggattacaaagccagcgatggtgaaacctatcagctcaactttatcgacactccgggccacgttgacttctcctatgaagtatcgcgctccctggcggcgtgcgaaggcgcgctgctggtggttgacgccgggcagggggtagaagcccagaccctggcgaactgctataccgcgatggaaatggacctcgaagtcgtcccggttcttaacaagatcgacctgcctgcggccgaccctgagcgcgtagcggacgagattgaagatatcgttggtatcgacgctcacgacgcggttcgctgctcggcgaaaaccggtgtcggcgtgccggatgtgctggaacgtctggttcgtgatattccgccgccggaaggcgatccggacgcgccgctgcaggcgctgattatcgactcctggttcgataactatttaggcgtcgtgtcgctggtgcgtattaaaaacggcaccatgcgcaaaggcgacaaaattaaggtgatgagcaccggtcaggtctataacgccgaccgtctgggcatcttcaccccgaaacaggttgaccgtaccgaactgaaatgcggcgaggtgggttggctggtttgcgctattaaagacatcctcggcgcgccggtgggcgataccctgaccgcggcgcgtaatccagcggataaggcgctgccgggcttcaaaaaagtgaagccgcaggtctacgccggtctgttcccggtgagctctgatgactatgagaacttccgcgatgcgctgggtaaactgagtctgaacgatgcatccttgttctatgagccggaaagttctacggcgctgggcttcggcttccgctgcggattcctcggcctgctgcacatggaaatcattcaggagcgtctggagcgtgaatacgatcttgacctgattaccaccgcgccgacggtagtctatgaagtagaaactacctctaaagaggttatctacgtcgatagtccgtcgaagctgccgccgctgaataatattcaggaactgcgtgagccgatcgccgaatgtcacatgctgctgccgcaggagttcctcggcaacgtgatcaccttgtgtatcgagaaacgcggtgtgcaaaccaacatggtttaccatggcaaacaggttgcgctgacctatgaaatcccgatggcggaagtggtcctcgacttcttcgaccgtctgaagtccacctctcgcggctatgcgtcgctggattataacttcaagcgtttccaggcctctaacatggtgcgcgttgacgtgctgatcaacggcgagcgcgtcgatgcgctggcgctcatcacgcacaacgacaatgcgccgtatcgtggccgcgagctggtcgagaagatgaaagatctgatcccgcgtcagcagttcgatattgcgattcaggcggctattggtaaccacattatcgcgcgctctaccgtgaaacagctgcgtaaaaacgtcctggcgaaatgctacggcggcgacgtcagccgtaagaaaaagctgctgcagaagcagaaagaaggtaaaaagcgtatgaaacaggtcggtaacgttgaactgccgcaggaagcgttcctcgccattctgcacgttggtaaagacggcaaataa

SEQ ID NO: 89717 - DNA, 975 bp, Enterobacter aerogenes
atggcgaacatgtttgccctgattctggtcattgcgacccttgtgacagggctgttgtggtgtctggataagttcatattcgcaccaaaacgtcgtgaacgtcaggccgctgctcaggcagcgaccggcgagcaactggacaagaagacgctgaagaaagtcggcccgaaaccgggctggctggaaaccggcgcctcggtcttcccggtactggcgattgtgctggttgtgcgttcgtttatctatgaacctttccagatcccgtcaggttcgatgatgccgactctgctgattggcgattttatcctggtggagaaattcgcctacggcattaaagatccgatctaccagaaaacgctgatcgaaaccggtcatccgaaacgtggcgatatcgtggtgtttaaatatccggaagatccgcgtctggactacatcaaacgcgcggtcggtttaccgggcgataaagtcacttacgatccggtggctaaacaggtgacgattgagcctggctgcgcgtcgggtcaggcatgcggtagcgccttgccgatcacctactccaacgtcgaaccaagcgatttcgttcagaccttctcccgccgcaacggcggcgaagccaccagcggtttctggcaactgccgaaaggcgaaaccaaagccgatggtattcgtctgaccgagcgtaaagagacgctgggtgaagtgacccaccgtattctgacggtacccatcgctcaggatcaggtggggatgtactatcgtcagtccggccagccgctggcaacgtgggtcgttccgccgggtgaatacttcatgatgggcgacaaccgcgacaatagcgccgacagccgttactggggcttcgtgccggaagcgaacctggtgggtaaagccaccgccatctggatgagcttcgaaaaacaggaaggcgagtggccaaccggcgtacgtttatcgcgcattggcggcatccactaa

SEQ ID NO: 89718 - DNA, 681 bp, Enterobacter aerogenes
atgaaccccatcgtaattaatcggcttcaacgaaagctgggctacacttttgttcatcaggagctgttgcaacaggcattaactcaccgcagtgccagcagcaaacacaacgagcgtctcgagtttttaggcgactctattttaagttttgtgatcgccaatgcgctctatcatcgtttccctcgggtagacgaaggggatatgagccgtatgcgcgcgacgctggtgcgaggcaatacgctggcggaaatcgcccgcgaatttgaactgggcgagtgcctgcgccttgggcctggcgagctgaagagcggcggttttcgtcgcgaatcgattctggctgataccgtagaagccttaatcggcggggttttcctcgacagcgatattcagaatgttgaacgcttaatcctctcctggtaccagactcgtctggacgaaatcagcccgggcgataagcaaaaggatccgaagacgcgtctgcaggagtatctgcagggtcgtcatctgccgctgccgtcttacctggtcgtccaggtacgcggcgaagcgcacgatcaggaatttactatccactgccaggtcagtggcctgagtgaaccggtggttggcacaggttccagccgtcgcaaggcggagcaggctgccgccgaacaggcgctgaaaaaactggagctggaatga

SEQ ID NO: 89719 - DNA, 906 bp, Enterobacter aerogenes
atgagcgaagaaaaaagttattgcggatttgtcgccatcgttggtcgtccaaacgttggcaaatccacgctgttgaacaagctgcttgggcagaagatctcgatcacttcccgtaaagcgcagactacccgtcaccgcatcgtcggtatccataccgaagggccgtatcaggcgatttatgttgataccccgggcctgcatatggaagagaagcgcgcgattaaccgcttaatgaacaaagcggccagcagctcgattggcgatgtggaactggttatcttcgttgttgaaggcactcgctggacgcaagatgacgagatggtgctaaacaagctgcgtgatgcgcgcgcgccggtgattctggccgtcaacaaagttgataacgtgcaggagaaagcggatctgctaccgcacctgcagttccttgccagccagatgaacttcctcgacattgtgccgatctctgcggaaaccggcaccaacgttgatactatcgcgtcaatcgtacgtaaacatctgccggaagcgattcatcacttcccggaagattatattaccgaccgttcccagcgctttatggcctccgagatcatccgcgaaaagctgatgcgtttcctgggcgctgaactgccgtactccgtgaccgtcgaaattgaacgtttcgtgagtaacgaacgcggcggttacgacatcaacggcctgatcctcgtcgagcgtgaagggcagaagaagatggtaattggcaacaaaggcgccaaaatcaaaaccatcggcatcgaagcgcgcaaagacatgcaagagatgtttgaagcgccggtgcacctcgaactgtgggtcaaagtgaaatccggctgggccgatgacgagcgcgcgctgcgcagtctcggttacgttgacgacctctga

SEQ ID NO: 89720 - DNA, 738 bp, Enterobacter aerogenes
gtggatggatggcagcgcgcctttgtcctgcatagccgaccgtggagcgaaaccagtctgatgctggacgtctttacggaagagtccggtcgcgtgcgcctggttgccaaaggcgcacgctccaaacgctctaatctcaagggcgccttacagccctttacccccttactggttcgcttcggcggccgcggcgaagtcaaaacgcttcgcagcgcggaagccgtctcgctggcgctgccgctcagcggtatcacgctctacagcggtctttacgttaacgaactcatctcccgcgtgctcgagcacgaaacgcgcttctctgaactctttttcgactacctgcattgcatccaggcgcttgccggggccagcggttcgccggagcccgcgctgcggcgctttgagctggcgctactcgggcacctgggctatggcgttgatttccttcactgcgccggcagcggcgacccggtggatgacaccatgacctaccgctatcgcgaagaaaaaggctttatcgccagcttggtgattgataacagcacgtttaccgggcaccatttgaaagcgttggctagccgcgagtttccggatgtagatacgctgcgcgccgcgaagcgctttacccgcatcgccctgaagccgtatcttggagggaaaccgctcaagagccgggaattgtttcgccagtttatgcccgcgcgaaaggcgcgagccgataatacgaataatgattaa

SEQ ID NO: 89721 - DNA, 732 bp, Enterobacter aerogenes
atggctgaattactgttaggggtcaatattgaccacattgcgacattgcgtaacgcgcgcggtaccgcttatccggatccggtgcaggcggcttttattgctgaacaggccggcgccgatggtatcaccgtgcacctgcgcgaagaccgccgccatatcaccgatcgtgacgtgcgcatcctgcgccagacgttgcatacccgaatgaatcttgaaatggcggttaccgaagagatgctggcgatcgcctgcgaaactaaaccgcacttttgctgcctggtgccggagaagcgtcaggaagtgaccaccgagggtgggctggacgtggccgggcagcgcgataagatgcgcgatgcctgtcagcgcctggcggatgccggtattctggtctccctgtttatcgacgcggatgatgagcagatcaaagcggctgccgaagtgggcgcgccgtatattgaaatccataccggctgctatgccgatgccaaaaccgatgccgaacaggctaaagagcttgagcgtatcgccaaagcggcgacctatgctgccagccttggcctgaaggtgaacgccggtcacggtctgacctatcacaacgtgaaagccattgccgccttgccggaaatgcacgaactgaatatcggccatgccattattggtcgcgcagtgatgagcggcctgaaagaggctgtcgcggaaatgaaacgcctgatgctggaagcgcgcggctaa

SEQ ID NO: 89722 - DNA, 381 bp, Enterobacter aerogenes
atggcgattcttgggctgggtaccgacatcgtcgaaatcgcccgcatcgaagcggtgatcgcccgtagcggcgatcgcctggcgcgccgggtgctgagcgatcacgaatggagcatttgggagcaacatcagcagccggtgcgttttctggcaaaacgctttgcggtcaaagaagcggcggcgaaagcgctcggaaccggtattcgcaacggcctggcgtttaatcagttcgaagtttacaacgatgaattgggcaagccgaaactgcggttatggggcgaagcaaagcttttagccgaacggatgggggtaagcgctattcacgtcactctcgccgatgaacgccactacgcctgcgccacggtgatcgtcgaaagctaa

SEQ ID NO: 89723 - DNA, 261 bp, Enterobacter aerogenes
atggcgctgttaatcaccaaaaaatgcatcaattgcgatatgtgcgaaccggagtgcccgaatgaggccatttcgatgggcgagagcatttatgagattaacagcgaccgctgcaccgagtgcgtgggccactacgacacgccaacctgccagaaagtgtgcccgatcccgaatactattctcaaagatccggcgcacgtcgagaatgaagaacagttgtgggataaattcgtgctcatgcaccacgcggataagctttaa

SEQ ID NO: 89724 - DNA, 849 bp, Enterobacter aerogenes
atgaactgtttaatccgcatccgccaacgttacccgtcgctggcggcgagcgacaaaaaacttgccgactttattctggctcagccggaccaaacccgccatctcagctcacagcagctggcgggcgaagcgggcgtcagccagtccagcgtggtgaagttcgcgcaaaaaatggggttcaaaggctttccggcattaaaactggcgctgagcgaagcgctggccagcagtccggatccgcactctgtgccggtacataaccaaattcgcggcgacgatccgctgcgtctggtgggtgaaaagctgatcaaagataacatcgcggcgatgcacgcctcgctggacgtcaacagcgaagagaaacttctggaagcagtggccctgctgcgcgatgctcgccgggtgatcattaccggcatcggcgcctccgggctggtggcgcgcaattttagctggaagttaatgaaaattggcatcaacgccgtcgccgagcaagatatgcatgcgctgctggcaacggtgcaggcgatgtcggcggacgatctgctgctggctatctcctactccggcgaacgccgcgagatcaatatggcggccgctgaagcgctccgcgtcggcagcaagatcctcgcgatcaccgggtttactcccaatgccttacagcagcaggcctcgcagtgcctttacaccatcgctgaggagcaggcgacgcgcagcgcagccatctcctccaccagcgcgcaaatgatgctcaccgatctcctctttatggcgctggtgcagcaagatcttgaacacgcgccggaacgcatacgccatagcgaagcgctggtgaaaaagctggtctga

SEQ ID NO: 89725 - DNA, 636 bp, Enterobacter aerogenes
ttgaacagtaacgcgcgacgagtcgtgtttttcgatcttgatggcacattgcaccagcaggatatgttcggcagctttattcgttacctcttacgtcgtcaaccgctcaacatactgtcagtggcggccttgtcgccaatagtactgctgggcctgttggttaacggacgcgcggcgcgctggccgatgagcctgctgctgtgggccgccacctgcggccggcgtgaaagccatcttaagcgtctggaggcggagttcgttagctggtttcgccagcacgtgaccgcctttccggtggtacagggccggctaaacgactatttaaccagtaccgatgccgacgtctggctgattaccggctcaccgcagtcgctggtggaacaggtctatgccgatacgctttggctgccgcgcgtaaagcttatcgccagtcgcatgagccgccgtcgcggcggctgggtgctgacgctgcgttgtctgggccatgagaaagtagcgcagctggaacagcggatcggcgcgccgctacgcttatatagcggctatagcgatagcgagcaggataacccgctactctgtttttgccagcatcgctggcgggtgacgccgcagggcgatctccagcagctcgaataa

SEQ ID NO: 89726 - DNA, 504 bp, Enterobacter aerogenes
gtgtctgaccacgaatttaatgatgaatactggatgcgccatgcgctgacgctggcgaaacgcgcctgggaagagggcgaggtgccggtgggcgccgtgctggtgcataacaatcaggtcatcggcgagggctggaaccggccaattggtcgtcacgatcccaccgcccatgccgaaattatggcgctgcgtcagggagggctggtcctgcagaactatcgtttaattgatgctacgctgtacgtcacgctggagccttgtgtgatgtgcgccggggcgatggtgcatagccgcatctcgcggctggtgttcggcgcccgcgatgctaaaaccggcgcggccgggtcgttaatcgatgtgctgcatcatccggggatgaaccaccgggttgaaattaccgaaggaattctggctgaatcttgctccgcgatgctgagcgatttcttccgctggcggcgggaagagaaaaaggcattgaagaaagcgcgtcaggaagagggctaa

SEQ ID NO: 89727 - DNA, 1650 bp, Enterobacter aerogenes
atgttgccaactggcgcattcttaagcaaaatgccgctcaacttacggcaaccttttactttttccggatatacccagctgaggaactccacgctgcagaaaattaactatttgaaaaaattaaagattaattatctgctgatcggcgtcgtcacccttttgttggcggcggcgctgtggccgtctttaccgtggatgggaaaaccggagaaccgcgttgccggaatcattgctcgcggcgaactgcgcgtgagtacaattaactcgccgctgacctacgccgccatcaacaacaaagactacggtctcgattacgaactggcgaaacgcttcgccgattaccttggggtgaagctgaaagtcaccgtgcggcagaatattagccagctatttgacgatctcgatgccggtaaaaccgatatgctggccgccgggctggtctataacaccgagcgggtaaagaactatcaggcgggccccacctattattccgtttcgcagcagctggtctatcgcgttggcggtaatcgtccgcgtacgctggccgggatcaatgccgaacagctcgccatcgccccaggccacgtcgccctcaacgacttgcaggcgctgaaggagagcaaatacccggacctcaactggcgcgttgatgaaaagcgcggcaccaccgccctgatgcaggcggtcatcgacggcacgctggaatataccgtcgccgattccgtcgccgtcagcctgttccagcgcgtacatccggagctggcggtggctctcgacatcagcgatgaacagccggtcacctggtttagcgaaaaaagcgaagacaattcactatcggcagccatgctcgatttctttaatagtatgaatgaagacggcaccctcgcccgcctggaagagaagtatctcggccacggcaacgacttcgactatgttgatacccgcaccttcctgcgcgcggtacagaatacgctgccggatctgaagccgctgtttgagaaatacgcccgacagatcgactggcgactgctggcggcgattgcctggcaggagtcgcactgggatccgcaggccacctcgccgaccggtgtgcgcggtatgatgatgctaacccgtaacactgcccaaagtttaggtctgacagatcgtaccgatgccgaacagagcctcgacggcggcatgcgctatctgcaggatatgatggccaaagtaccggaggcgatcccgaaagaggagcggatctggtttgcgctggcggcctataatatgggctacgcgcatatgcttgacgcaatggcgctgactaaaaaacaaaaaggcaacccgaacagctggtccgacgttaagcagcgtctgccattgctgagccagaagccctactacagccgcttaaaatatggctacgcccgcggccatgaggcttacgcctacgtggaaaatattcgtaagtaccatatcagcctggttggatatttgtctgaacaggaaaggaaagcggcgcaagaaatggcgattgccgaagcttatccagccgtcgcgccggaagaactcgatagcgagcataaagagtatgcgatgcccttctttaaattccgcggcgaaaagcttgtcgacaacgttaagctgaagttgccgacgatgggacgttag

SEQ ID NO: 89728 - DNA, 4020 bp, Enterobacter aerogenes
atgtcacatttattgataaaactgatgaatcattttatttctacgcaaacggtttcgtcggggctcaggattctctataatggcgcccgtttccccctggctcaccttgaaagcttcgaagacgagagacttatgatggatattttgcgtggttcacctgcactgtcggcattccgtatcaacaaactgctggcacgttttcaggcggccaacctgccggttagcaccttatacgcggagtatgttcactttgccgacctgagcgccccgctaagcgatgaggagcgcgaaagactggtcagactgcttaaatatggcccaagcctcagcagccatacgccaaccggtaaattactgctcgtcacccctcgccccggcactatctccccctggtcctccaaagctaccgacatcgcccataactgcggtttatcgcaggtcgtgcggctggaacgcggcgtggcgtactacgttgaagcacagggtctgagcgatgcgcagtgggacgccgttgcggcggagctgcacgatcgcatgatggagagcgttttcactgagctggaagagggagagaagctgtttgctcaccatcagccgacaccggtggccagcgtggacctgttgggccagggacgtcaggcgctgattgacgccaacctccgtctggggctggcgctggccgatgacgaaatcgactacctgcaggacgcattcgttaagcttggccgcaatccgaacgacattgaactgtatatgttcgcgcaggccaactcggaacattgccgccacaaaatttttaacgccgactggattatcgacggccaacaacagccgaagtcgctgtttaaaatgattaaaaataccttcgagaaaaacccggaatatgtgctgtctgcctataaagacaacgccgcggtaatggaaggttccgaagtcggacgctatttcgccgactaccagaccgggcgctatgacttccatcaggagccggcgcacattctgatgaaagttgaaactcacaaccacccgacggcgatttcgccgtggccgggcgccgcaaccggctccggcggcgagatccgcgacgaaggcgccacggggcgcggcgcgaagccgaaagcgggtctggtcggcttctcggtttctaacctgcgtatcccgggttttgaacagccgtgggaagaggatttcggtaaacctgagcgtatcgtgaccgcgctggatatcatgaccgaaggcccgctgggcggcgcggcgtttaacaacgaatttggtcgtccggcgctgaatggctacttccgtacctatgaagagaaagtgaccagccacaatggcgaagagctgcgcggctatcacaaaccgatcatgctggcgggcggtattggcaacatccgcggcgagcacgtccagaagggcgaaatcaccgttggcgccaagcttatcgtgctgggcgggccggcgatgaacattggtctcggcggcggcgcggcgtcgtccatggcttccggccagtctgatgccgatctggatttcgcctctgtacagcgcgacaacccggaaatggagcgccgctgtcaggaagtgatcgaccgctgctggcagctgggtgatgcgaacccgattctgtttatccacgacgttggcgcgggcggtctctctaacgccatgccggagctggtgagcgatggcggccgcggcggaaaattccagctgcgcgatatcctcagcgatgagccgggcatgagcccgctggagatctggtgtaacgaatcccaggagcgttacgttctggcggtcgcgccggaacagctgccgctgtttgaagagctgtgccgccgcgagcgcgcgccttacgcggtgattggcgaagccacggcggagcaacaccttagcctgagcgacagccactttaacgatcggccgatcgacctgccgctggacgtcctgctcggcaaaacgccgaaaatgacgcgtgacgtgcaaacgctgaaagcgcagggcagcgagctggatcgtcaaccaatgacgattgccgatgcggttaaccgcgtgctgcatctgccgacggtggctgagaaaaccttccttgtgaccatcggcgatcgcaccgtgaccggtatggtggcgcgtgaccagatggtggggccgtggcagatcccggtcgccaactgcgcggtgaccaccgccagcctcgatagctactacggcgaagcgatggcgatgggtgaacgcgcgccggttgcgctgctcgactttgccgcctctgcccgcctggcggtcggcgaagcgttgacaaacatcgccgctacgcagattggcgaactcaaccgcgtcaaactgtcggcaaactggatggcggcagccggtcacccgggtgaagacgccggtctgtatgaggcggtaaaagcagtcggtgaagaactgtgtccagcgctgggcctgactatcccggtgggtaaagactcaatgtcgatgaaaacccgctggcaggaaggaagcgagcagcgcgaaatgacctcgccgctgtcgctggtgatctccgcgtttgcccgagttgaagacgtgcgcggcaccgtgaccccgcaactctctacggaagataacgccctgctgctgatcgatctcggcaaagggcgtaacgcgctgggcgccaccgcgctggcgcaggtctatcgccagctaggcgaccagccggccgacgtgcgtgatgtcgcgcagctgaaaggcttctgggacgcgatgcaggcactggtggcgcagcgtaaactgctggcctaccacgaccgctccgatggcggcttgttagtgacgctggcggaaatggcgttcgccggtcactgcggcgtaactgccgatatcgccgcgctgggcgacgatcgtctggcggcgctgttcaacgaagaattgggcgcggtgattcaggttcgcgccgcggatcgcgaagcggtggaagcgctgctggcgatgaatggtctggcagattgcgtgcactacttaggccaggcgacggcaggcgatcgttttgttatcaccgccgacggtcagccgctgttcagcgaaagccgcaccacgctgcgtatgtggtgggcggagaccacctggcagatgcagcgcctgcgcgataatccggagtgcgccgatcaggagcaccaggcgaagtctaacgatagcgacccgggccttaacgttaagctgtcgtttgatatcaatgaagatgttgccgcgccgtatattgcgaccggcgcgcgcccgaaagtggccgtgctgcgcgagcagggggttaactcccacgttgaaatggcggccgctttccatcgcgccggcttcgatgccatcgacgtgcatatgagcgatctgctggcgggtcgtactggtcttggcgacttccatgcgctggtggcctgcggcggtttctcctacggtgacgtactgggggcaggcgaaggttgggcaaaatcgattctgttcaacgaacgcgtacgcgatgagttcgccactttcttccatcgcccgcagacgctggcgctgggcgtgtgtaacggttgtcagatgatgtccaacctgcgtgagctgatccctggaagcgacctgtggccgcgcttcgtacgcaaccactctgaccgctttgaagcgcgtttcagcctggttgaagtcacccagagcccatcgctgctgctgcagggcatggccggttcgatgatgccgattgccgtttctcacggcgaagggcaggtggaggtgcgggacagcgcgcacctggccgcgcttgaaagcaaaggcctggtggcgctacgtttcgtcgataacttcggcaaagtgacgcaaacctatccggcgaacccgaacggctcggtgaacggcattaccgcggtgaccagcgaaaacggtcgcgcgacgatcatgatgccgcacccggaacgcgtcttccgtaccgtcagcaactcctggcacccggaaaactggggtgaagacagcccatggatgcgtatcttccgcaacgcgcgtaagcaactgggttaa

SEQ ID NO: 89729 - DNA, 1437 bp, Enterobacter aerogenes
ttgaagcgattctctcttttcccccgttccttgcgccaactggtgacgctgtcctttgtgctgatcatgctgccgctgctggtgctggcatggcaggcctggcaaagcctgaacgcgctcagcgcccaggccgcgcatattaaccgcaccaccttgactgatgcgcggcgtagcgaagcgatggtcaatgcctcgctggaaatggagcgtagctatctccagtattgcgtgctggacgatcctacccttgagcgggtctatcaaaatcaacgtaagcgttatagcgaaatgcttgaggcgctctccggcgtgttgccggatgctcacatttggcagaccctgcggcagaacctcgccgacctggcccaattgcgttgccataatagcgcgccggacgccaaagccgcggcgagcctcgaagcctttgccgatgctaacagtgaaatggtgcaagcgacccgcacggtaatcttctcccgcggccagcagctacagcaggagatcgccgagcgcgggcagttcttcggctggcaggcgctggttctgtttctgctgagcctgacgctggttttgctgtttacccgcatgatcatcggcccggtgaagggcatcgagaagatgattaatcgcctgggagagggaaagtcgctggatgatgcggcactgttcaccggcccgcgcgaactgcgatcggtcggtaaacggattatctggttgagtgaacgtctggcgtggctggagtcccaacgccaccagtttcttcgtcatctgtcacatgaactgaaaacaccgctcgccagcatgcgtgaaggtacggaactgctggcggaccgggtagcggggccgctgacgacggaacagcaagaaatcgttgagatccttgataacagcagccgcaatctgcaaaagctgatcgaacagctgctcgactataaccgcaaactggccgatggcccggtcgagcggcagaaagtggatattgctgaactggcgcagaccgtcgtttccgcgcatagtttaccggcaagagccaagatgatgtctaccgagctggcgctgggtgaacgcttctgcctggcggagccgacgttgctgaccagcgtgcttgataatctgtactccaatgcggtgcactatggcgctgaatccggtaacattcggattcatagttaccgccacggcgagcaggttcgtatcgatgtcgccaatagcggcgagccgatccccgtcgccgaaagaaatatgattttcgagcctttttatcagggaagccacctgcgtaaaggggcagtaaaaggcagcggtctggggttgagtatcgcccgcgactgcgtacggcaaatgcagggagagctgagcctggtcgatgacaatcccgggttcatctgttttcgcatctcgctccccgccgctgagccgggaaaaaccaacacatga

SEQ ID NO: 89730 - DNA, 714 bp, Enterobacter aerogenes
atgaatcaacattgggtgaatatgtcccactttttcgcattgcgccgtcctttacggggatggctgctgtcgggcctatgctgcctgacgctggcgggctgttccgccgctatgtcgccgcgcgccgctgacggcaatgcgccgcccgagctgccggaacatcaggtggcggattttctctccgtagattgcgccaatatctggtcgctggaaaacgatgccagtgataaaaacccgctgtactggctgcgcggcattgactgcgcggatcgcctggcgccggtacaggcccgtgccgaagccaaattgcataatgatgataactggcaggatgcgttcaaacgcggcattctgctggccgacgccaaaatcacccccgacgagcgtcgcgaaatggttgcccgcatcgacagctttagcccgcaaatcgccgcgcaggttcgcccgctataccggctgtggcgcgagggtcaagcccggcaactgcagttattcgaggagcgctcccgctacggcaaactacagcaatcaagcgatgctgaactggaaaccttgcgccagcaggagcagcagctgcgtagccaactggagctgaccacccgcaagctggaaaaccttaccgatattgagcgccagctctccagccgtaagcccggcggcaattttaatagcggtagcgataaggtaccggaggtgatccatgacgatccgtaa

SEQ ID NO: 89731 - DNA, 1338 bp, Enterobacter aerogenes
atgacgatccgtaaacccgcccacctgctgctggtggacgacgatccggggctgttaaagctgctggggatgcgactggtcagtgagggttatagcgtggtcacggcggaaagcgggcccgaggcgctacgcgtgctgacgcgcgagcgggtggacctggtggtgagcgatttacgcatggatgaaatggacggcctgcagctgtttgctgaaatccagaaggcgcaacccggcatgccggtcatcatcctgaccgcccacggctctattcctgacgccgttgccgctacccagaaaggggtgtttagttttctgactaaaccggtcgataaagacgcgctatataaagcgattgacgatgctctcgagcagagctcgccggccaccgacgagcgctggcgacaggcgattgtcacccgtagtccacagatgctgcggctgctggagcaggccggtatggtggcgcagtctgacgttagcgtgttgattatcggccagagcggtaccgggaaagagattgtcgcccaggcgatccacaacgccagcccgcgccacgaaaaaccgtttatcgcgattaactgcggcgcgttgccggaacaattgctggagtccgaactgttcggccacgcgcgcggcgcctttaccggcgcggtcagcaaccgcgaagggctttttcaggccgccgagggcggtacgctgtttcttgatgaaatcggcgatatgcccgtcgcgctgcaggtaaagctactgcgcgtcctgcaggagcgtaaggtgcgcccgctgggcagcaaccgcgatatcgacatcgacgtgcgcattatctcggcgacccaccgcgatctgccgaaggcgatggcgcgcggtgagtttcgtgaagatctgttctatcggctcaatgtggttaacctgaagatcccaccgctttccgagcgcgcggaggatattccgctactggctaatcatctattgcgccagtccgccgaccgtcacaaacccttcgtgcgcgccttctccaccgatgcgatgaagcggctgatggccgccaaatggccgggcaacgtgcgccagctggttaacgtgattgaacagtgcgtggcgctgacctcatcgccggtgatcagcgatgcgctggtggagcaggcgctggagggggagaataccgcgttgccgaccttcgttgaggcgcgtaatcagtttgagctcaactatctgcggaagcttttacagataaccaaaggtaacgtgacgcatgccgcgcggatggccgggcgcaaccgcaccgagttttacaaactgctgtcgcgccacgagctcgacgccaacgactttaaagagtag

SEQ ID NO: 89732 - DNA, 339 bp, Enterobacter aerogenes
atgaaaaagattgatgcgattattaaaccgttcaaattggatgacgtgcgtgaagcgctggcggaagtcggtatcaccggcatgacggtgacggaagtcaaagggtttggtcgtcagaaagggcataccgagctgtaccgcggcgcggaatatatggtggattttctgccgaaggtgaaaattgaaatcgtggtgacggacgatatcgtcgatacctgcgtcgataccatcattcgtaccgcccagaccggtaaaatcggcgacggtaaaatctttgtcttcgacgtggcgcgggtgattcggatccgtaccggtgaagaagacgacgcggcgatttaa

SEQ ID NO: 89733 - DNA, 1191 bp, Enterobacter aerogenes
atgctcgacgctcaaaccatcgccacggtcaaagccaccattcccctgcttgtagagaccggcccaaacctaaccgcgcatttttatgaccgcatgtttactcataacccggagctcaaagagatcttcaatatgagtaaccagcgcaacggcgatcagcgcgaagcgctgttcaacgctatcgccgcctacgccagtaatatcgacaacctgccggccctgctgccggcggtcgaaaaaatcgcccagaaacataccagcttccagattaaaccggagcagtacaatattgtcggcagccatctgctggcgaccctcgacgaaatgtttagcccaggccaggaagtactcgacgcctggggcaaagcttacggggtgctggcgaacgtcttcatcaaccgcgaagcggagatctatcaggataacgccagtaaaaatggcggctgggaaggtacccgcgcgttccgcattgttaagaagaccccgcgcagccagcttattaccagctttgaactggagcctgtcgacggtcagccggtcgccgattatcagccaggacagtatctggctatctggttgaagccggaagccttcgaatatcaggaaattcgtcaatactctctgacccgcagagcagacggtaaaggctatcgcatcgcggtgaaacgcgagaatggcggccaggtgtccaactggctgcataaccacgccagcgaaggcgacgtagtctatttagccgcgccagcgggcgacttcttcctcaacgtggaagcgcagacgccggtgaccctgctctccggcggcgtcggccaaacgccaatgctggcgatgctggatacgctggccaaaagccatcatcagggccaggtgaactggttccacgcggcggaaaacggtgacgttcacgcctttgcggacgaagtgaaggcgcttggcgcggcgttgccgaagtttacctctcacgtctggtaccgcagcccgaacgaggccgaccgtcaggcaggacgttttgatagcgaaggtttgatggatttagcgccgctggcggaaaatattcgcgacccgcagatgcaattctatctctgcggcccggtagcgtttatgcagtttgcggcgaagcagctggtagaattaggggtcaataaagacaacattcattacgaatgtttcggcccgcataaggttctgtaa

SEQ ID NO: 89734 - DNA, 1254 bp, Enterobacter aerogenes
atgttaaagcgtgaaatgaacattgccgattatgatgccgaactgtggcaggctatggagcaggaaaaagtacgtcaggaagagcacatcgaactgatcgcctccgagaactacaccagtccgcgcgtgatgcaggctcagggttcccagctgactaacaaatatgccgaaggttatccgggcaagcgctactacggtggctgcgagtacgtggatatcgttgagcaactggctatcgaccgcgcgaaagaactgttcggcgccgactacgctaacgtgcagccgcactccggctcgcaggctaactttgccgtctataccgctctgctgcagccaggcgataccgtgctgggtatgaacctggcgcaaggcggccacctgacccacggctccccggttaacttctccggtaaactgtacaacatcattccttacggtatcgatgagtccggtaaaatcgactacgacgacatggcgaagcaggcccaggagcacaaaccgaagatgatcatcggtggcttctccgcttactccggtatcgttgactgggcgaaaatgcgtgaaatcgctgacagcatcggcgcttacctgttcgtcgatatggcgcacgtagcgggcctgattgccgccggcgtttatccgaacccggttccgcacgcccacgttgttactactaccacccacaaaaccctggcgggtccgcgcggcggcctgatcctggcgaaaggcggtagcgaagagctgtacaagaaactgaactccgccgtgttcccaagcgcgcagggcggcccgctgatgcacgttatcgccgcgaaagcggtggcgctgaaagaagcgatggagccagagttcaaagtttaccagcagcaggttgccaaaaacgccaaagcgatggtggaagtgttcctgaaccgcggttacaaagtggtttccggcggtactgaaaaccacctgttcctgctggatctggtagataaaaacctgaccggtaaagaagctgacgccgccctgggccgcgccaacatcaccgttaacaaaaacagcgtaccgaacgatccgaagagcccgttcgtgacttccggtatccgtatcggttctccggctgtgactcgccgcggctttaaagaagcggaagtgaaagagctggctggctggatgtgcgacgttctcgacaatatcaacgacgaagctgttattgagcgcgtcaaaggtaaagtgcttgatatctgcgcccgtttcccggtttacgcgtaa

SEQ ID NO: 89735 - DNA, 468 bp, Enterobacter aerogenes
atgtgtattacgtttagatcacacgcctgtgataaaggactgattatgaacacgctacgctattttgactttggctcttcccgccctgtcctgctgttaatcgcacgtattgcgatcgtgctgctgttcattatttttggctatccgaaactgatggggtttagcggaacggtacaatatatggcttcttccggcgcgccgatgccgacgctggcggcgatcatcgcggtcatcatggaggtacccgccgctattctgattattttaggtttcttcacccgcccgctggcggtgatctttatcttttacaccctgggtaccgcggttatcggccatcattactgggatatgaccggcgatgcggtattgccgaatatgattaacttctataagaacgtcagtatcgccggggccttcctgctgctggcgataaccggaccaggttcgatttcgctggaccgtcgataa

SEQ ID NO: 89736 - DNA, 1137 bp, Enterobacter aerogenes
atggtcttgcactccacgcgctggctggcgctaagttacttcacctacttttttagctacggtatttttttaccattctggagcgtctggctggcaggcgttggcctgacgccggaaaccattggcgtgctgctcggcgccgggctggtggcgcgttttctgggcagcctgctaattgcgccgcgggtcagcgatccttctcgtttgattagcgccttgcgtatcctggcgttgctgacgctgctgtttgctctcgccttctgggtcggcgggcaggtggcctggctgatggtggtcatcgtcggattcaacctctttttctcgccgctggtacccttaacggatgcgctggccaacacctggcaaaagcagatcaccatggattacggccgggtgcggttgtggggatcgattgcttttgtcatcggttctgcgctgaccggcaagctggtgagtctgtttgattaccgggcgatcctgttgttgttaagcctgggcaccgcttcgatgctgttgggcatgctgctgaaaccttcagtgatgccgcagggggagagccgccatcaggaggcggccggactaccggcgtggcttagcctggtgcggcaaagctggcgttttctagcctgcgtctgtctgttgcagggagcgcatgccgcctactatggcttcagcgcgctatactggcagcaggccggttattctgcctccgccgtcggttatttatggtcgctcggcgtcgtcgccgaagtggtgattttcgccttgagtaaaaaagtgttccgtcggtttagcgcccgcgacctgctgctgctctcggcggtgtgcggggtggcgcgctgggcgattatgggctggacgaccgcgctgccatggctactggtcgcgcagatcctccactgcggaacgtttaccgtctgtcatctggcggccatgcgctatatcgccgcacggcagggaagtgaggttatccgcctgcaggccgtttactcggcggtggcgatgggcggcagcatcgcggtgatgacggtgtttgctggtttcctctaccagcacctgcatcagggcgtcttctgggtgatggcgctggtggcgctaccggcgctgatcgtgcgaccgaaggcggtgagcgcctaa

SEQ ID NO: 89737 - DNA, 1278 bp, Enterobacter aerogenes
atgatgacagtgattgaaccaccatctgcgctttccagtccacagcgccgtagccaggtgctcctgatgttctatcttccgggacaatccgtcacgccgcaacagctggtcaggctcaaccaggtggatgaggcgacggcccaacaggatatcgcggagacggggcgcgaaattcagcgttatcatcgactgactctcgcgtcgcagatggacggcagctatcggattgaaggcgccgcgctcgatcaacgcctgtgcctgctgcacgctctccggcgtgggctacgcctgtgcccgcatttcgttcatcaccattttaccccggcgttaaaaacgcagcttaaacagcagggtatcgcgcgaaccttatatgatgataccaatcttcaggcgctggtgaatcgctgcgctcgcgcgctcaatcggcagttcgactgccgggacggtcagttcctgcgcctgtatcttcagtactgcctgctacaacatcatctgggccagtcgccggatttcacccgtgagcagcgcaactgggcgcaggccgcggcggaatttaacctcgccgccgaaatcgtccaccactggcagcgccgggtcagcgccacgccccatgccggcgaacaacttttcctgaccctgctgtttatgttactgaaaaccccggatcccattcacgacggtcatcaacaggacagacgcctgcatctggcgatctcccgcttgatccatcgtttccaggatctggcgggacggccattcagcgatgaacaagggttgagtgaccaactctatatccatctttcgcaggcgttgaaccgcagcgtattcgccatcggtattgataacgctttaccggaggagatcgaacgcctgtatccgcgcctgatgcgtaccacccaggaggcattacgcgatttcgaaacggcctatcatattcaatttaatcaggaagaggtcagcttaatcgcggtgattttcggcgcgtggttgatgcaaaaagccgacctgcatgaaaagcaggtagtgctgctgacgcgggaaaatagcgaactggaacaggcgctggaaatgcaattgcgggaattaacgctgctgccgctgaatattaaatacttaagcgtgactcagtttcagcaacaaggcgcgccgaaggatgtgaccttagtggtcacgccttacaccaccgcgctaccgctgttttcgccgccgctgtttcatgctgaagagaattttagcgatcaccagcggcagcagatttgcaaaatgcttgaggattag

SEQ ID NO: 89738 - DNA, 639 bp, Enterobacter aerogenes
atgaagaaagtgaaacactgcgtcggtgcggcatttttcatggttttatcattgtcagccgttgcgcatccgcacagcttcattaatttgcagagtgaagccgtggtgaaagacggtctgttgaccggttttaagatgcgctggacgatggacgaaataacttcagcggatctgctctatgatgccggcaatgcaaaggcgggcagcgaagtatggaaaaaactggcggcggaggtcatggccaacgtactcggccagcactacttcagcgaactgtggcataacggccagcgggttaagtttgctaaccgcccggatggctacggccttgcgcgtagcgggctgcaggcggtactcaccttcaccttgccgttggcgacaccgcaacctgttgccggacaaacctttactttatccaccttcgatccgacctactacgtcgatatgttttatgagcaggatagcgatttttcgttgcctgccgcgctgcgggcctcctgcaaggccacggtaatgacgccgaaacccaacgacaaaatgttgtcttatgcgcagtcgctcgataaagaggacgcgccgccggaagatatggaactgggtaactacttcgcccagaaggtgaccttgacatgtcagtag

SEQ ID NO: 89739 - DNA, 981 bp, Enterobacter aerogenes
atgtcagtagtctttacgccgcgagcgcgggcgccgcgctggaaatcattctggccgctggcgttgtttctgacgctgaccgtcgtgggcggtatctggttgtggctcgcctggccgcaggtactgttgcaaagcgcggtctggcagcgttcactgaatcttgagctcagccaactgctgcaggcggtggcggataatccgtcagcggcggggctgtcactgctcgggttcagttttgtctacggcgtactgcacgcgcttggccccggtcacggaaaaatcgtgattaccacctggcttgccacccatccctcaaagttgaaatcgagtattgtgctgacgctggcggcatcgctgttgcagggaatggtggcgatagtgctggtggtggtggtattgacgctgctgcagcttccggcgcgtcaactgcatctcagcagcttctggctggagaaggggagctatctgctggtcggcgcattggggcttttactgtgctggcgggcattgaaaaaactgcgagtcttgctgcggcggccaacgtttaccgcttttaccccgcatcacgtccatgatgaacattgcggctgcggccatcagcaccttccggcgccggatcaactacagagtggcgacgactggcgcgccaggctggcgattgtactgtcgatgggcatgcgtccctgctcgggagcgattatggtgctgctgttcagcaaggtaatcggcgtctttggctggggcatggctgccgcgctggtgatggcggcgggaacgtcgctgaccataagcgggctggcgctgttggtgcatggattccgccagttggctatccgcctgagtcgccatcaggcgccggcgatgtggaaacaggttggttgggcgacgctggcgctggccggcggcgtggcgctattgacggcggctgtcgtgatgtggagtagcgcgatcccgccgggcggcggcttgcggccgttttag

SEQ ID NO: 89740 - DNA, 804 bp, Enterobacter aerogenes
atgcatccgatgctgaacattgccgtgcgcgcagcgcgcaaggcgggtaatttaattgccaagcactacgaaacgccagattccgtagaaaccagccagaaaggcagcaatgactttgtgactaacgtcgataaagccgcagaagcgattattatcgaaaccattcgcaagtcttacccacagcacaccatcatcaccgaagaaagcggcgagcacgctggtgaagatcaggatattcaatgggttatcgatccactggatggcaccaccaacttcgttaaacgtctgccacacttctctgtttccatcgccgtacgcattaaaggccgtactgaagtcgcggtggtttacgatccaatgcgtaatgaactgttcaccgccacccgcggccagggcgcgcagctgaacggctaccgtctgcgcggcagcaacgctcgcgatctcgacggtactatcatcgccaccggtttcccgttcaaagcgaagcagcacgctaccgcttacatgaacatcctcggcaatatgttcaccgagtgcgctgacttccgtcgcaccggttccgccgcactggatctggcctacgttgccgctggccgcgttgatggttactttgaaatcgccctcaaaccgtgggatttcgccgcaggcgagctgatcgctcgtgaagcaggcgccatcgtttgcgacttcaccggtggtcataactatatgctgaccggcaacatcgtagccggtaacccgcgcgtcgtgaaagcgatgctggcgaacatgcgcgagcagctgagcgaagcgctgaagcgttaa

SEQ ID NO: 89741 - DNA, 735 bp, Enterobacter aerogenes
atgctgcaaaatattcgaatcgtactggtagaaacctcacacaccggcaatatgggctccgttgcccgcgcgatgaaaaccatgggcttaactaacctgtggctggtcaacccgctggtgaaacctgattcccaggccatcgcgctggccgctggcgccagcgatgtgattggtaacgcgcagatcgtcgatacccttgatgaagcgctggcgggctgtagcctggtggttggcaccagcgcgcgctcccgcacgctgccgtggccgatgctggatccgcgcgaatgcggtctgaaaagcgtcgccgaaggtcagcatgcgccggtcgcgctggtctttggccgcgagcgcgttggcctgactaacgacgaactgcagaaatgccactatcacgtggcgatcgccgccaaccccgagtacagctcgctgaacctggcaatggcggtgcaggttatcgcctatgaagtgcgaatggcctggctggcgactcaggaacaggcgcaaccggcggttgaacatgaagaaacgccgtatccgctggtcgatgatttagaacgtttctacggccaccttgagcagacgctgctggcgaccggttttatccgcccgaatcatccgggacaggtgatgaacaagttgcgtcgcctgttcacccgcgcgcgtccggaaagccaggagctgaacatcctgcgcgggatgctggcgtctattgagcagcagaataaaggtaagtaa

SEQ ID NO: 89742 - DNA, 492 bp, Enterobacter aerogenes
atgagactgacatctaaagggcgttatgccgtgaccgcaatgcttgacgttgcgctcaactctgaaacgggtccggttccgttggcagatatttcagagcgtcagggaatttcgctttcctatctggaacagctgttctctcgcctgcgtaaaaatggtctggtatccagcgttcgtggaccaggcggcggttacctgttaggtaaagaagctggcagcatcgccgtaggcgaagtgatcagcgccgtagacgaatccgttgacgccacccgttgtcagggtaaaggcggctgccagggtggcgataagtgtctgacccacgcgctgtggcgcgatctgagcgaacgtttgaccggtttcctcaacaacatcaccttgggcgaactggtgaataaccaggaaatcctcgatgtttctggtcgtcagcacaatcatgaatctcagcgtactatgcgttctcaggacgccattgacgtaaaactgcgcgcctag

SEQ ID NO: 89743 - DNA, 1215 bp, Enterobacter aerogenes
atgaaattaccgatttacctcgattactccgcaacaacgccggtggacccgcgtgttgccgagaaaatgatgcagttcctgaccctggacgggacctttggtaacccggcctcacgttctcaccgtttcggttggcaggctgaagaggcggtagatatcgcccgtaatcagattgccgaactggtcggcgccgatccgcgcgaaatcgtctttacctccggcgcaacggaatccgataacctggcgattaaaggtgcagccaacttttatcagaaaaaaggcaagcacatcatcaccagcaaaactgagcataaagcggtgctggatacctgccgtcagctcgagcgcgaaggttttgaagtgacctaccttgctcctcagagcaacggtattatcgatctgaaagaactggaagcggcgatgcgtgacgacaccatcctggtttccattatgcacgtgaacaacgaaatcggcgtggtgcaggatatcgctaccatcggcgaaatgtgccgcgcccgcggtatcatttaccacgttgacgccacccagagcgtgggcaaactgcctatcgatctgagccagctgaaagttgacctgatgtccttctccggtcacaaaatttatggcccgaaaggtatcggcgcgctgtacgtacgccgtaagccgcgtatccgcatcgaagcgcagatgcacggcggcggtcacgagcgcggcatgcgttctggcaccctgcctgtccaccagatcgtcggtatgggcgaagcttaccgtatcgccaaagaagagatggaaagcgaaatggcgcgcctgcgcggcctgcgtgaccgtctgtggaacggcgtgaaagatatggaagaagtctatctgaatggcgaccttgagcagggcgcgccgaacattctcaacgtcagcttcaactatgttgaaggcgagtcgctgattatggcgctgaaagacctggcggtttcctccggttcagcctgtacttccgcgagccttgagccatcctacgtgctgcgcgcgttaggcatgactgatgaactggcgcacagttctattcgtttctctttaggtcgtttcactaccgaagaagagattgactacaccatcaagctggttcgtaactccatcggccgtctgcgcgacctttctccgctgtgggaaatgttcaagcagggcgtggatctgaacagcattgaatggtcacatcactaa

SEQ ID NO: 89744 - DNA, 387 bp, Enterobacter aerogenes
atggcatacagcgaaaaagtcatcgatcattacgaaaacccgcgcaacgtcggctccttcgacaacagcgacgacagcgtcggtagcggtatggttggcgcgccggcgtgcggcgacgtcatgaagttgcagattaaagtcaacaatgaaggtatcattgaagacgcgcgcttcaagacctatggctgcggttccgctatcgcttccagctccctggtcaccgagtgggtgaaaggtaaatctctggacgaagcgcaggctatcaagaacaccgatatcgccgaagaactggaactgccgccggtgaaaattcactgctctatcctggcggaagacgcgattaaagccgcgattgcggattacaaaagcaaacgtgaagcaaaataa

SEQ ID NO: 89745 - DNA, 324 bp, Enterobacter aerogenes
atgtcgattaccttaagcgacagtgcagcagcgcgagtcaattccttcctggcgaaccgcggtaaaggctttggcctgcgtctgggggtaagaacctccggctgttcaggtatggcttatgtactggaatttgttgacgagccggcggcagaagacaccgtgtttgaagacaaaggcgtgaaagtcgtgatcgacggtaagagcctgcaattcctcgacggcactcaactggacttcgtcaaagaaggccttaacgaagggttcaaatttactaacccgaacgtgaaagatgagtgcggttgcggcgaaagctttaacgtataa

SEQ ID NO: 89746 - DNA, 516 bp, Enterobacter aerogenes
atggactatttcaccctcttcgggttaccagccagctataccctctcgctcgaacaactggctgtccggtatcaggatctgcagcgccagtaccatccggataaattcgccagcgcgcccgctgcggaacagctggctgcggttcagcactccgccaccattaaccaggcctggcagactctgcgtcatccgctgacccgtgcggaatatctcctttcgctgcacggctttgacctcgccagcgagcagcacaccgtccgcgacaccgcgttcctgatggagcagctggaactgcgcgaagagctcgatgaaatcggccaggcgaaagacgaagcgcggctggaagcctttatcaaacgggtaaaagcgctgtttgatacccgccatcaactgatggttgaacaattgcaaaacgagacctgggatgcggcggctgatactgtacgcaagctccgttttctcgataaactgcgcagcagtgctgaagaactcgaagaaaaactgctcgatttttaa

SEQ ID NO: 89747 - DNA, 1851 bp, Enterobacter aerogenes
atggccctattacaaattagtgagcctggtctgagcgccgcgccgcatcagcgtcgattggcggcaggtatcgaccttggcaccaccaattctctggttgctaccgtgcgtagcggccaggccgaaactctgcccgatcatcaaggccgctacctgctgccgtcggtcgtgaactaccacgcctcggggctgaccgtcggctatgaagcccggctgaatgccgctcaggatccggtgaacaccatcagctcggtgaagcgaatgatggggcgttccctcgccgatattcaaacccgctatccgcatctgccgtatcagctgcaggccagcgaaaatggactgccgatgctccagaccgccggcggcttgctgaatccggtgcgggtctccgccgatatcctcaaagcgctggctgcccgggcgaccgaagcgttggcgggcgatctcgacggcgtggtcattaccgttccggcctatttcgatgatgctcagcgtcagggaaccaaagacgcggcgcgtctggcgggcctgcacgtgctgcgtctgctcaatgagccgaccgcggcggctatcgcctacggcctcgattccggccaggaaggggtgattgcggtttacgatctcggcggcggtacctttgatatctccattctgcgcttaagccgcggggtgtttgaagtgctggcgaccggcggcgattccgctctcggcggcgatgatttcgaccatctgctggccgactatctgcgcgagcaggcaggtctcagcgaccgtagcgataaccgcctgcagcgtgagctgctggatgccgccattgcggcgaaaatcgccttgagcgatgccgacgtggcgcacgttgaggtcggcggctggcagggcgatatcagccgtagccagtttaacgatctgattgccccactggtaaaacgtactctgatggcctgccgtcgcgcgctgaaagacgccggcgttgaagcgcaagaagtgctggaagtggtgatggttggcggctccacccgcgtgccgttggtgcgtgagcgcgttggcgaattctttggccgtaccccgctgacctctatcgacccggacaaagtcgtcgccattggcgcggcgattcaggcggatattctggtcggcaacaaaccggacagcgaactgctgctgcttgatgttatcccgctgtcgcttgggctggaaaccatgggcggcctggtagagaaagtgatcccgcgtaataccaccattccggtggcccgcgcgcaggagtttaccactttcaaagatggccaaacggcgatgtctattcacgtgatgcagggcgaacgtgagctggtgcaggattgccgctccctggcgcgttttgcgctgcgcggtatcccggcgctgccggcgggcggggcgcatattcgcgtgaccttccaggttgatgccgacggtctgctgagcgtcacggcgatggagaaatcgaccggcgtggaagcctcaatccaggtgaaaccgtcttacggcctgaccgacggcgaaatcgccaacatgattaaagattcgatgagctacgccgaacaggatattcaggcgcgtatgctggctgaacagaaagtcgaagccgctcgcgtactggagagcctggaaagcgcgctggccgccgacgccgcgctgttaagcgccgcagagcgtcaggttatcgatgccgccgcggagcaggttcgcaccgccgcggcaggcgaagatgccgacgcgattaaagaagccattaaaaatatcgacacacaaacccaggaattcgccgcacgccgcatggaccagtcggtccgcgctgcgctgaaaggccaatccgtggacgaggtttaa

SEQ ID NO: 89748 - DNA, 336 bp, Enterobacter aerogenes
atgccaaaaattgtttttctgccccaccaggacctgtgcccggatggcgtagttgtggaagctgagagcggtgaaaccattctggatgcggcgctgcgtagcggtatcgagattgaacacgcctgtgagaaatcctgtgcctgcaccacctgccactgcatcgtgcgtgaaggttttgactcgctggcggaaagtagcgaagatgaagacgacatgctggataaagcctgggggctggaacctgacagccgtctgagctgtcaggcgcgcgtcaccaacgaagatctggtcgttgagatcccgcgttacaccatcaaccacgcacgcgagcactaa

SEQ ID NO: 89749 - DNA, 201 bp, Enterobacter aerogenes
atggcactgaaatggaccgacagtcgcgaaatcggcgaagccttgtatgacgcttacccggatctcgacccgaaaaccgttcgcttcaccgatatgcatcagtggatttgcgacctggaagagttcgatgacgacccaaacgcatccaatgaaaaaattctggaggcgattctgctagtctggttagacgaagccgaataa

SEQ ID NO: 89750 - DNA, 1287 bp, Enterobacter aerogenes
atgaccgaagccatgaagattacgctttctactctgcctgccgatgcgcgctggggagaaaaagcgacctggagtatcaataacgacggtatcgccttacatctcaacggtaaagacgacctggggttaatccagcgcgcggcgcgcaaaattgacggcatgggtatcaagcacgtcgccctgagcggcgaaggctggaacaccgatcgcgcctgggccttttgggccggctataaagggtcgaaaggtcagcgccaggtcgaatggccaaccctggacgacgcgcagcgcagcgagctggataaccgtctgacgatcatcgattgggttcgcgacaccatcaacgcgccggcagaagagctggggccagaacagctggcgcagcgcgccgtcgatctgctgtgcggcgtggcgggcgaaaaggtcagctatcgcatcaccaaaggcgaagatctgcgcgagcagaactatcttggcctgcataccgttggccgcggctccgagcgcccgccggtcctgctggcgctggactacaacccgaccggcgataaagacgcgccggtatacgcctgtctggtcggcaaaggcatcaccttcgactccggcggctacagcatcaagcaaagcgcctttatggattcgatgaaatccgacatgggcggtgcggccaccgtgacgggcgcgctggctttcgccattacccgcggtctgaacaaacgtgtgaagctgttcctgtgctgcgcggataacctgattagcggcaacgctttcaagcttggcgatatcattcattaccgcaacggtaaaaccgttgaaatcatgaacaccgacgccgaaggtcgcctggtgctggcggatggcctgatcgacgcctcggcgcagaagccgcagctgatcatcgatgccgccaccctgaccggtgcggcgaaaacggcgttgggtaacgactaccacgcgctgtttagctttgacgacgcgctggcgaatcgtctgctggcgagcgcgcaggcggaaaatgaagccttctggcgtctgccgctggccgaattccaccgcaaccagctgccgtctaacttcgctgaactgaacaacaccggtagcgcggcgtatccggccggcgccagcaccgcggcgggattcctgtcccacttcgtggaaaactaccaccagggctggctgcatatcgactgctctgcgacttaccgtaaagctgcggttgaacagtggtcggcgggtgcgactggccttggcgtgcgcactatcgctaatctgctgacggctgagtaa

SEQ ID NO: 89751 - DNA, 777 bp, Enterobacter aerogenes
atgtctgatactaaaaatgaattagaaactctgctggagaaggcggcgaccgagcctgcccatcgtccggcatttttcaccgcgctgcttgaggccaccgtgtgggtgccgggcagcgcggctgacggcgagcagattgtcgaagatagcgccctcgatctacagcattgggaaaaagaagacggcacgtcggttattccgttctttacctcgctggaggcgctgcagcaggcggtagaagacgaacaggctttcgtgatgatgcccgcccgcacgctgatggcgatgacgctgggcgaatcgctgttcctcaacccgaagctgccgagcggcaaagaattcaccccgcgggaaatcagccatctgctgggtgaagagggcagcccgctcagtacccagacggtactggaaggcggcgaagcgctgctgctgtctgaagtcgccgaaccgccggcgcagatggtggattcgttgaccacgctgttcaaaacgctgaagaccgtcaagcgggcgtttctgtgctcgattaaagagagcgccgacgcgccgaccaacttgttgatcgggattgaagcggaaggagatattgaatccattatccaaaccaccggcagcgtggccaccgataccttgccaggagatgaacctatcgatatttgccaggtggtagaaggcgagaagggcatcagccactttatgattgcccatattacgccgttctatgagaaacgttggggcagcttcctgcgcgatttcaaacagaaccggattatttaa

SEQ ID NO: 89752 - DNA, 849 bp, Enterobacter aerogenes
atgtccacctcattctttgttgcggccgactggctggcggaacatattgatgacccgcagattcaaattctggatgcgcggatggcgccggcgggtcaggaagcgctgcgcgatatggcggcggaataccgcgacgggcatatccccggcgcggttttttttgatatcgaagcgctgtctgaccacaccagcccgctgccgcatatgatgccgcgtgcggaaaccttcgccgtggcgatgcgcgagcttggcgtcaacagcgataagcacctggtggtttatgatgaaggcaatctgttctcagcgccgcgcgcctggtggatgctacgtaccttcggcgtcgaaaaagtgtcaattgtcgccggcggcctcgaaggctggcgccgtgatgaattgccgctggagaaaggcgaacccgacctgccggaaggcgaatttgaggtgaacttcgatccggaggtgatcaaacgcttaaccgatgtgctgctggtcagccacgaaggatcggcgcagatcgttgatgcccgtccggcggcgcgttttaacgggctggcggatgagccgcgtccaggcttacgccgcgggcatatccccggcgcgcttaacgtcccgtggaccgagctggtgattaatggcgaactgaaaaccgttgatgagatgaacgatatctttaagcgtcagggcgttgattttgcccgaccgattatcgccagctgcggttccggggtaacggcggcagtggtggttctggcgttgaccaccctcggcgtcaacggcgtgtgcctgtacgatggctcgtggagcgaatggggcgcgagaacggatttgccgatcgagccggcgcagtaa

SEQ ID NO: 89753 - DNA, 4944 bp, Enterobacter aerogenes
atgaaaccatttcgtttagcggcgctatcgttagcgctccttaccgcgctctcattaagcggctgcgataacagcggcgaaccacaggccgtatcggcggccgataaaggcgccgccgatagcgcgaaaaagccggatagcgcgcagctggcgacgttaaaagaaaaaagccagggcaaggcgctgacgttgctcgacgcttctgaagtgcagctagatggcgcggcgacgctggtgctgaccttctccattccgctcaaaccggatcaagatttctcccacagcgtccatctggtcgataagaaaagcggcaaggttgacggtgcgtgggagctggcgccgaatctcaaagagctgcgtctgcgccacctcgagccaaagcgcgaattgatagtcaccgttgatccaacgctcattgccctcaatgacgccaccctcggcagcccttttgaaaaaaccatcgccactcgcgatatcgcgccgagtgtcggtttcgccagccgcggctcgctgctgccggggaaagtggtcgccgggctgccggtgatggcgctgaacgtcgacaatgtcgatgtcaatttcttccgtattaagccggaatcactctcagccttcgtcagtcagtgggaataccgtaactcgttaagtaattgggaatcagacgaactgttgaagatggccgacctggtttatagcggacgcttcgatctcaacccggcgcgtaatacccgtgaaaagctgctgctgccgcttaacgacatcaagccgctccagcagccaggcgtctatgtggcggtgatgaacccggccggtcattatagctacagtaacgcggcaacgctgttcaccctcagcgatatcggcgtctcggcgcatcgctaccacaaccggctcgatgtcttcacccagagcctcgaaaatggcgccgcgcagtcgggaattgaagtgcaattgctaaacgccaaagggcagacgctggcgcaggcgaaaagcgatagccagggtcatgttactctgcaaaccgataaagaggcggcgctgctgctggcgcgaaaagacgggcagactacgctgcttgaccttaaactgccggcgctggatctggcggaattctccatcgctggcgcccctggcttcagtaaacagttctttatgtttggcccgcgcgatctctatcgcccgggggaaacggttatccttaacgcgctgttgcgcgacggcgatggaaaaccgctggcggagcagccggtgaagctggaagtggtgcagccggatggccaggtgattcgctctgtgatgagcaaaccggtcaatggcctgtatcagtttacttatccgctcgacagcggcgccgccaccggtatgtggcacattcgcgccagcaccggcgataatcaaccccgcgagtgggatttccacgtcgaagactttatgcccgaacgcatggcgctgaatctgacgccgcaggccgcgcctatcgccccggatgccgacgtcgcctttagcgtcagcggcgcctatctttacggcgcgccggccagcggcaatcagctgcagggcaaactgttcctgcgtccgctacgcgacgccgtagctgcgctgccgggcttccagttcggcgatatcgcggaagaaaatctctcccgtagcctcgatgaagtgcagctgacgctggatgaaaaaggccatggagaagtgaccaccgcgagccagtggcaggatagccattcgccgctgcaggtcgtgttgcaggccagcctgctggaatcaggcggccgtccggtgacccgtaccgtacagcagccgatctggcctgccgaggcgctgccggggatccgcccgcaatttacgctgaaggacgtttacgactaccgcaccgataccacggtgaaacagccggtagtcgatgaaaacagtaacgccgcttttgacatcgtctatgccgatgccagaggcgagaaaaaagcggtctccgggctgcaggtgcggctgatccgcgagcggcgcgattactactggaactggtccgatagcgaaggctggcagtcgcagttcgatcaaaaagatctgcaggagggcgaaacgtcgctggatttgcaggccgggcagataggtaaagtgagtttcccggtagagtggggctcgtatcgtctggaggtgaaagggccggatgacgttgtcagcagcgtgcgcttctgggcgggctatagctggcaggataacagcgaaggcaccggcgcggcgcgtcctgatcgcgtaacgatgaagctcgacaaacctggctataaaccgggcgacaccatcaagctgcatattgccgccccggcggcgggtaaaggctacgcgatggtcgaatccagcgaagggccgctgtggtggcaggaaattgacgtcccggcggagggcatggatctgtctattccggtggataaagcctggaatcgccacgatctctacctcagcacgctggtggttcgccccggcgataaatcgcgatcggcgacgccgaaacgcgcggtcggcctgctgcatctgccgctgggcgatgaaaaccgccgtctgtctctggcgctggaagcgccggagaaaatgcgcccgaaccagccgctgacggtgaaagtgaaggccagcgtgaaagagggcgaggtgccgaaacaggttaacgttctgctctcggcggtggatagcggggtgctgaatattaccgattacgctacgccggatccgtggaacgcgttcttcggccagaaacgttacggcgcggatatttatgacatctacggtcaggtgatcgaagggcaagggcgattagccagtctgcgcttcggcggcgatggcgacgagttaaaacgcggcggcaaaccgccggttaatcacgtgacgatcgtcgctcagcaggcgcagccggtagtgttggacgatcggggtgaaggctcggtgacattacccatcggcgattttaacggcgagctgcgggtgatggcgcaggcgtggacggcagacgacttcggcagcagcgaagataaagtggtggtagccgccccggttatcgcggaactaaataccccacgtttcctcgccagcggcgacgccacgcgtctggcgctggatctcagcaatctgaccgacaaaccgcaaaccctgcaggtacatcttaccgccagcgggttggtcacgttgaccgagggccaactgccgccggtacagttggcgccgggcgcgcgcagcacgctgtttgtgccggtgaccgcgttagcggggttcggcgatggtcaggtcaacgccactatcagcggtctgagcctgccgggcgaaaccttcgcgtcgctgcaaaaacagtggaaaatcggcgtacgtccggcattcccggcacagaccgtcaatagcggcgcggtgctacaacctggcgaaagctggcaggcgccggcggcgcagagtcaggggtttgccccgcaaacgctgcagggccaactgctgctcagcggtaaaccgccgttgaatctcgcccgctatattcgcgagctgaaagcctatccttatggctgccttgagcagaccgccagcggcctgttcccttctctgtacaccagcgcggcgcagctaaaagcgctgggcatcagcggcgatagcgatgagaaacgccgcgcggcggtcgatgttggtatctcgcgcctgctgcagatgcagctggaaaatggcggctttgcgctatgggataaagccggcccggaagagtactggttgaccgcctacgccatggacttcctcgtccgcgcgggtgagcagggctatagcgtgccggtcaacgcgattaataagggcaacgagcgcctgctgcgctatctacaggaaccgggtttgatgaccgtgcgctacagcgacgatgcccaggccagccgttttgccgctcaggcatatgccgcgctggtgctggcgcgccagcaaaaagcgccgctcggcgccttgcgtgaaatctggagccgtcacgaacaggcgcgttctggattgccgctgctgcaactcggtattgcgctgaaaaccatgggggatgcgccgcgcggcgcagaggccatgaagttggcggttaccacgccgcgccaggatgagaatcgctggctgggcgattacggcagccaacttcgcgatgatgcgctgaagctggcgctgctggaagagaataagctgctgccggaggtgcaaaaccagctgttgagcagcttgtcggaagaggccttcggtcagcgctggctgtcgacgcaggaaaccaacgcgctgttccttgccgggcgtacgcttgccgacctgccgggcaactggcaggcgcaaacctcgctgcaggcggagccgcttgccagcgacaaagcgcaaacccgcaatctcgacggcgatcggctggcggcgctgcaggtgacgaataccggcaatcagccgctgtggctgcgcctcgatagcagcggttatccgcaaagcgcgccacagccgggcggcaacgtgttggggattgaacgtgctattttcgatacccacggtcagcagaaatcgctgacttcgctgcgcagcggcgaactggtgctggtcaagctggaggtgaccgccaaacgtaacgttcctgacgcgctggtggtcgatctgctgccggcgggacttgagctggaaaaccagaacctggctaatagcagcgccagcctgcaggagaatggcgaagcggtacaaaacctgcttaaccagatgcagcaggcggatattcagcatatcgagttccgcgatgaccgctttgtcgccgccgtcgccatcaatgaaggtcagccggtgacgctggtctatctggcgcgggcggtgacgccgggcacctatcaggttccgcaaccgcaggtggagtcgatgtatgtaccgcagtggcgggcgaccggaagggccagcggcccgcttaccgttacgccgtaa

SEQ ID NO: 89754 - DNA, 2325 bp, Enterobacter aerogenes
atgcgcgcattacctcgcataaaacgccgctggcgctggctggcggcgtttatttttctgctgtggttagcggtgctgctggccgatcgtctgtggccgctgccgctgcatgaagtcacccccgcccgcgtggtggtagcggaagacggcacgccgctctggcgctttgccgatgcgcagggcgtctggcgttatccggtcaccatcgccgacgtttcgccgcgctatctgcaggcgctcattcagtatgaagaccgctggttctggaaacatccgggggtcaatcccttcgcggtgctgcgtgccgcctggcaggatctcacttccgggcgggtgatttctggcggcagcacgctcaccatgcaggtcgcgcgtctgctcgaccctcatccgcgcaccttcggtggcaagctacgccagctatggcgggcgctgcagctggagtggcatctgtcaaaaagcgaaattcttaccctgtatctgaaccgcgcgccgtttggcggcaccctgcaggggatcggcgcggctagctgggcttatcttggtaaaccgcccgctcagcttagctacggcgaggcggcgctactggccgtgctgccgcaggcgccgagccgtttacgcccggaccgctggccgcagcgggcgcaggcggctcgcgataaggtgctggagaggatgctcagccagggcgtctggccgcaacgagcggtacaggaagcgatggaagagccggtgtggctttttccgcggcagatgccgcagctggcgccgctgtttgcgcgccgggtgctggcgacaagcggtgatgaaaaggtgacgacaacgctcgatgccgggctccagcggcagcttgaagatctggcgatgaactggaaatcacgtctgccgccgcgcagctcactggcgattatcgtcgtcgatcacaccgatatgaaagtccgcggctgggtgggatcggcggatatccgcgatgatagccgcttcggccacattgatatggtctcggcggtgcgctcgccggggtcggtgctgaaaccctttatctacgcgatggcgatggatgacgggctgattcacccggcatcgctattacaggatgtgccacggcgctttagcgattatcgtccaggtaatttcgacagcgggtttcatggcccggtgagcgccagcgaggctctggtgcgttcgttgaatctcccggcggtgcaggtgctcgaagcctatggaccaaaacgctttgcggctaatttacgcaatgccgggctccctctgatgctacccgccggcgccgaaccgaatctgtcgctgatcctcggcggcgccggagcgaggctggaagatattgtcgcggcatatggcgccttcgcccgccatggcaaggcggcgcggctgcgcatgaagcccgacgacccgctggtggaaagggcgctaatgtcgccaggcgcggcgtggatcacccggcggatattggcaggcgaagcccagccattacccgatgcgtcgctgccgcaggcggtgccgctggcgtggaaaaccggtaccagctacggttatcgcgatgcgtgggcggtaggcctcaacgcgcgttatttgattggcatctggaccggacggccagacggtacgccggtggtggggcagtttggttttgccagcgccgtgccgctgttaaaccaggtcaataatatgctgctggcgcgtccgttaatgagccgcggcgggctgccggtcgacccgcgtccgcagtcggtgagccgcggcactgtctgctggcccggcgggcaggatctgccggttggcgatagtaactgccgcaggcgtttagccagctggcttctggacgccagccagccgccgacgctgctgctaccgggtcaggagggcgtgcgcggtatccgcttcccggtctggcgtaacgcagcaggagaaagggtcgccgcggattgtccgggcgcgacagaaacttctgttgatgtctggccgctgccgctggaaccctggctgccggttagcgagcgccgccgggcgcggctgggtacggcatcgaaggcgtgtccgccgctgcagactcaggatgccgcgccgctggtgctttccggcatccgcgaaggcgcagtgataaaacgactgccgggcgaggcgcgggtgatgttacccgtacaaacgagcggtggggaagggcgacgctggtggtttattaacggcgaaccattagaggcaacaggcgcaagaacgacaattacgctagataaacccggcgagtggcaactggtggtaatggatgaggcagggcaaacggcggccgccaatttcaccctacaataa

SEQ ID NO: 89755 - DNA, 432 bp, Enterobacter aerogenes
atggctattgaacgtactttttccatcatcaaaccaaacgcggtggcaaaaaacgttattggcagcatcttttctcgctttgaagctgcagggttcaaaatcgtcggcaccaaaatgctgcatctgaccgttgagcaggctcgcggtttctatgctgagcacgaaggtcgtccgttcttcgacggtctggttgagttcatgacctccggcccgatcgtggtttccgtactggaaggcgaaaacgcggttcagcgtcaccgtgacctgctgggcgccaccaacccggataacgccctggccggtaccctgcgtgctgactacgctgacagcttcaccgagaacggcacccacggttccgactctgtagaatccgctgctcgcgaaatagcgttcttctttgctgaaggcgaggtttgcccgcgcactcgctaa

SEQ ID NO: 89756 - DNA, 1167 bp, Enterobacter aerogenes
atgtctgaacaaattgtcacacctgataccgccgctctgacggtgccgaataaagatgccaaaatcaacctgctggatttaaaccgtcagcagatgcgcgagtttttcaaaaacatgggcgagaagcctttccgcgccgatcaggtgatgaaatggatgtatcactactgctgcgatgactttgatgaaatgaccgacatcaacaaagtcctgcgcggcaaactgaaggaagtcgccgagatccgcgcgccggaagtcgttgaagagcagcgctccagcgacggcaccattaagtgggcgattgccgttggcgatcagcgcgttgaaacggtatacatcccggaagaagaccgcgccacgctgtgcgtctcttcacaggttggctgtgcgctggaatgtaaattctgctccaccgctcagcaaggcttcaaccgtaacctgcgcgtttccgaaattatcggccaggtctggcgcgcggcgaaaatcgtcggcgcggtgaagactaccggcgtgcgtccaattaccaacgtggtaatgatgggcatgggcgagccgctgctgaacctcaacaacgtcgttccggcgatggaaatcatgctggatgacttcggttttggtctctccaaacgccgcgtgaccttgtctacctccggcgtggtgccggcgctggataaactcggcgacatgatcgacgttgcgctggcgatttctctgcacgcgccgaacgacaccatccgcgacgaaattgtaccgattaacaaaaagtacaatattgagaccttcctgaactcggtgcgcggctatatttcgaagtccaacgccaaccagggtcgtgtgactatcgagtatgtcatgctggatcacgtcaacgacggtaccgagcacgcccatgaactggcggcgctgctgaaagatacgccgtgcaagatcaacctgatcccatggaacccgttcccgggcgcgccgtatggccgtagttctaacagccgtatcgatcgtttctccaaagtgctgatggaatatggtttcaccaccatcgtgcgtaaaacccgcggcgacgatatcgatgctgcctgcggccagctggcgggcgacgtaatcgaccgtaccaaacgtacgctgcgtaagcgtatgcagggcgaagcgatcgacgtgaaagccgtctga

SEQ ID NO: 89757 - DNA, 999 bp, Enterobacter aerogenes
atgaatactgaagccactcaagaccatcaagaagcaaactctacgggcgcgcgcctgcgtaacgcccgcgaacaactcggactcagccagcaagcggtggctgaacgcttatgcctgaaggtttccacggttcgtgatattgaagaagataaggcgccagccgatctcgcttcgaccttcctgcgtggctatatccgttcctacgctcgcctcgtacatattccggaagaagaactgctgccgatgatggcgaagcaagcgccgattcgcgccgccaaagtggcgccgatgcagagcttctcgctgggtaaacgtcgcaaaaaacgcgacggttggctgatgagctttacctggctgattttgtttgtggttatcggcctgagcggcgcatggtggtggcaagaccacaaagcgcagcaggaagagatcaccagcatggccgatcaatccaccagcgatctgaacagtagcgatagcggcagccagtcaattccgctggataccagctcggcgaataacgcgccggatacgacggcagccaatgccaatagcgcgcctgtcgatacctccaccgcacctgcgccaagcgcgccagcggctacccccgcgccggtggataacaacgccgtggtcgctccttcgcaggctaacgtcgataccgccgccgccgcgccggctgcgccagccccgacctccgcattgccgaccgatcaggcgaatgccgcgacgacggcttccgctcaggatctggtgatgaactttagcgccgattgctggctggaagtgagcgatgcgaccggtaagaaactgttcagcggcctgcagcgtaaaggcgggaacctgaacctgagcggtcaggcgccgtataagctgaaaatcggcgccccggctgcggtacaaatccagtatctgggcaaaccagtcgatttgagtcgttttatcagaactaaccaggttgcgcgtctgacccttaatgccgaacaatcaccggcgcagtaa

SEQ ID NO: 89758 - DNA, 1122 bp, Enterobacter aerogenes
atgcataaccaggctccaattcaacgtagaaagtccaaacgcatttacgttggtaatgtgccgattggcgatggggctcccatcgccgtacagtcgatgaccaatactcgcaccaccgatgtggccgcgacggtaaatcaaatcaaagcgctggagcgcgtaggcgcggacatcgtccgcgtttccgtcccgacgatggacgcagcggaagctttcaagctcatcaaacagcaggtcaacgttccgctggtcgccgatatccactttgactaccgtatcgcgctgaaagtcgcggaatatggcgttgattgcctgcgcatcaaccctggcaacattggtaacgaagagcgtatccgcatggttgtggactgcgcgcgcgacaaaaacattcctatccgcatcggcgtcaacgccggttcgctggaaaaagatctgcaggaaaaatacggcgagccgacgccgcaggcgctgttagagtccgccatgcgtcacgtcgatcatctcgatcgtttgaacttcgatcagttcaaagttagcgtaaaagcctcagatgtcttcctcgctgttgaatcctatcgtctgttggcgaagcagatcgatcaaccgctgcatctcgggatcaccgaagccggcggcgcgcgtagcggcgcggtaaaatccgcgatcggtttaggtctgctgctgtctgaagggatcggcgataccctgcgcgtgtcgctggccgccgacccggtggaagagatcaaagttggcttcgatatcctgaagtcgctgcgcatccgttctcgcggtattaactttatcgcttgcccgacctgctcgcgtcaggagtttgacgtcatcggtacggtgaacgcgctggagcagcgtctggaagatatcatcactccgatggatgtttcgatcatcggctgtgtggttaacggccctggcgaagcgctggtttccactctcggcgtcaccggcggcaacaagaaaagcggcctgtacgaagacggcgttcgcaaagaccgactggacaacaacgacatgatcgaccagctggaagcgcgtatccgtgcgaaagccaccatgctggatgaagcgcgtcgtattgaagttcagcaggttgaagcaaaataa

SEQ ID NO: 89759 - DNA, 1275 bp, Enterobacter aerogenes
gtggcaaagaacattcaagccatccgtggcatgaacgattatctgccgggcgaaaccgctctctggcagcgcattgaaggctcactgaagcaggtgctcggtagctacggttacagcgaaattcgtttgccgattgtagagcagaccccgttattcaaacgcgcgatcggcgaagtgaccgacgtggttgaaaaagagatgtataccttcgaagaccgcaatggcgatagcctgacgctgcgtccggaaggaacggcgggctgcgtacgtgccggcatcgaacatggtctgctgtacaatcaagaacagcgtctgtggtacgtggggccgatgttccgccacgaacgtccgcagaaagggcgctaccgtcagttccatcagattggcgcggaagtctttggcctgcagggcccggatatcgacgctgagcttatcatgttgaccgcgcgctggtggcgcgagctgggcatttccgatcacgtcagccttgagctgaactccatcggttcgctggaggcgcgtgccgcctatcgcgacgcgctggttgcctatctggaacaatttaaagataagcttgatgaagactgcaaacgccgcatgtataccaatccgctgcgcgtgctggactctaaaaatccggaagtgcaggcgctgctgaacgatgcgccggcgctgggcgattatctggacgacgagtccaaagaacacttcgccggtctgtgcgcgctgctcgacgctgctggaattcgctataccgtcaaccagcgcctggtgcgcgggctcgactattacaatcgcaccgtatttgagtgggtcacgaccagcctcggttcgcagggtaccgtctgcgccggcggccgttatgacggtctggtagagcagcttggcggacgcgcaacgccgggcgttggctttgcgatgggcctggaacgtcttgttttactggttcaggcagtcaatccggaatttaaagccgatcctgttgtcgatatatacctggtagcctccggtaccgatactcagtccgcagcaatgcgtctggctgagcaggttcgcgatgcgctgcccggcgttaagctgatgactaaccacggcggcggtaactttaagaagcagttcgcccgcgctgacaagtggggcgcgcgcgtcgcgctggtggtcggtgagtcagaaattgctgacggaaacgtggtagtgaaggatttacgctcaggtgagcaaactaccgtaacgcaggatagcgttgccgcgcatttgcgcacacttctgggttaa

SEQ ID NO: 89760 - DNA, 621 bp, Enterobacter aerogenes
gtggaaactttcaacaacgaaaacgagcaggtcgacgccctcaagcgtttctttgccgagaacggtaaagcgctggccgtcggggtgattttagggatcggcgcgctggttggctggcgctactggacttcccatcagctggattcggcccgggattcctctctggcctatgagaatgccatttccgcactgaagtcagattcgcctgaaaccctgaccgcagcggagaaattcgccgccgacagcaaaaacacctatggcgcgttcgcatcgctggagctcgcgcagcgtctggtcgataaaaacgatctgcagggcgcggagaagcagctgcaacaagggctggcggccgcctctgacgataacctgaaatcggttatcaatatgcgtctggcccgcgtacagctgcagcttaagcagccggatgcggcgctgaaaaccctggaaggcattaaaggcgaaggctggaccgctatcgttgccgatttgcgcggtgaaattctgctgagcaaaggcgacaagcagggtgcccgcgcggcctgggaatcaggcgtgaaaagcgatgcatcgccagcgctcagcgaaatgatgcgtatgaaaataaataatttgtccatctga

SEQ ID NO: 89761 - DNA, 1179 bp, Enterobacter aerogenes
atgcaattgcgtaaattacttttgccagggctgctttccgtcaccttactgagcggttgctcgctgtttaacagcgaagaagatgtggtgaaaatgtcaccgctgccgacggtggaaaaccagtttacgccgtccacgtcctggagcacttcagttggcgatggtatcggtgatttctattccaacctgcacccggcctttgccgacggcgttgtgtatgcggctgaccgtaaaggcaccgtgaaagcgctgcacgctgaagacggtaaagaagtctggtcggtgaacctggcggaaaaagacggctggttctcgcgcgctccggcgctgctctccggcgggctgaccgtttccggcggccacgtttatgttggtactgaaaaggcgcagctgttcgcgctgaataccagcgacggtaccgtcgcgtggcagagccgtgtggcgggtgaagcgatttctcgtccggtcgttagcgatggcatggtactggtgcataccagcaacggtcaactgcaggcgctgaacgaaaccgacggcgcggtaaaatggaccgtgaacctggacatgcctgcgctctccctgcgcggtgagtccgctccggccaccgcttatggcgcggcgattgttggtggcgacaacggtcgcgtcagcgccgtgctgatgcagcaggggcagatgatttggcagcagcgtatttctacggccaccggcccgactgaaatcgaccgtctgaacgacgttgacaccacgccggttatcgttaatggcgttgtttatacgttggcctataatggcaacctgaccgcgctggatctgcgcagcggccagattatctggaagcgcgaactgggttctgtgaacgatttcatcgttgacggcgaccgtatctatctggtcgatcagaatgaccgtctgctggcgctgaccaccgatggcggcgtaacgctgtggacccagagcgatctgctgcaccgtctgctgacttctccggcgctgtataacggcagcctggtggtaggcgacagcgaaggttacatgcactggattaatccggaagacggccactttgtggcgcagcagaaagtcgatagctccggtttcctgaccgacccggttatcgccgacggtcgcctgcttatccaggccaaagacggtacgctgtattcgatcacgcgttaa

SEQ ID NO: 89762 - DNA, 1479 bp, Enterobacter aerogenes
atgatacctgtggtcgcgcttgtcgggcgccctaacgttggaaaatccacgctcttcaaccgcttaacgcgcactcgtgacgcgttggtcgcggatttcccggggctgactcgcgaccgtaagtacggtcgtgctgaagtggaaggccgcgaattcatctgtattgataccggcggtatcgacggtacggaagaaggcgtggaaacccggatggcggaacagtctctgctggcgattgaagaggccgacgtggtgctgtttatggttgatgcgcgcgcgggcctgatgccggcggattccgcgatcgccaaacatctgcgttctcgcgaaaaaccgaccttcctggtggcgaacaaaaccgacggcatcgacgtcgatcaggcgatggccgacttctggtcgctggggctgggcgatatttatccgatcgccgcttcgcatggtcgcggcgttaccagcctgctggaacacgtgctgctaccgtgggtagatgaggttaatccgcaggaagaagtggatgaagacgccgcctactgggcgcagtttgaagccgagcaaaacggcgaagaagttgaagaaccggaagacgacttcaacccgcaagatctgccgattaagctggcgatcgtcggccgtccgaacgtcggtaagtcaacgctgactaaccgcattctcggcgaagatcgcgtggtggtttacgatatgccgggcacaacccgcgacagtatctacatcccgatgcagcgcgatgaacgcgaatatgtgctgatcgataccgccggcgtgcgtaagcgcggcaaaattaccgatgtcgtggagaaattctcagtcatcaagacgctgcaggcgattgaagacgccaacgtggtgatgctggtcattgatgcccgtgaaggtatctccgatcaggatctgtcgctgctgggctttatccttaacagcggtcgttccctggttatcgtggtcaacaaatgggatggcctgagccaggaagtgagagagcaggtgaaagaaaccctcgacttccgtctgggcttcatcgacttcgcccgcgtgcactttatctccgctctgcacggcagcggcgtcggcaacctgttcgaatcggtgcgcgaagcttacgacagcgccacccgtcgcgtgggtaccgccatgctgacccgcattatgaccatggcagcagaagaccatcagccgccgctggtacgcggtcgccgcgtgaagctgaagtatgcgcacgccggcggttataacccgccgatcgtggtgattcacggcaaccaggtgaaagacctgcctgattcctataagcgttacctgatgaactacttccgtaaatccctggatgtcatgggtacgccgatccgtattcagttcaaggaaggggaaaacccgtttgccaataaacgcaataccctgacgccgaaccagatgcgtaagcgtaagcgcttgattaagcatatcaagaaaagtaaataa

SEQ ID NO: 89763 - DNA, 216 bp, Enterobacter aerogenes
atggaactcaattgcccgatttgccatgcccggttggaaacgcaaggcaacggcgcgcattgcgcgcactgtgagaaagagtttgctgtagaggcccgctgcccggactgccatcagccgctggaagtactgaaggcctgcggcgcggtggattatttctgccagcacggccacggattgatttcgaaaaaacgcgtcgaatttgtgctcggttaa

SEQ ID NO: 89764 - DNA, 339 bp, Enterobacter aerogenes
atgaacgaggcagacctcagcgatgacgcgattattgagctggcccgcgaaggtggcgtcgcctggatcccgacgctgagcggcatgcgtaagattgtcgtggcgcagcttaacgagcaacaaaaacagcgcatcgccgcaatactgcaacagtcgttgccgctgggcaagccgccgggccagccggattctccgggtagcggcgaccagcgtttttttcgcatccagataatcagcgcccaacactatcacagcctgatcattctcatcccggaagagcgcgcgccgcaggcgctggttgaactctggcgaaatggtgaagactgcgttagcgattaa

SEQ ID NO: 89765 - DNA, 1029 bp, Enterobacter aerogenes
atgccagatactcgtcctcgtttcgtgattccaccctacattttacgccgcattgtcgatcatggctccgctcagcaacagcgctgcgcgcagcaaacgctgagccatgtacaaaccctgatggcgcatgtgccgggccgccccgctgccgcccatgtcgccatgccaggccagcttgagcgcggcatttacgatgccaggcagactcaggaacttccagggagccaggtgcgttttgaaggacagccttccaacggcgatgtcgccgtcgatgaggcctatgattatctcggcatcacccatgattttttctggaagagttatcatcgttattcgctggacaaccgcggattgaagctgaccggcagcgtccactatggtcacgaatatcaaaatgccttctggaacgggcaacaaatggtatttggcgacggtgatggcgagatctttaatcgttttactattgctattgatgtggtggcgcacgagttaagccatggcgttacggagagcgaagccgggcttatctatttcgaacaatccggggcgctcaatgaatcgctttccgatgtttttggctcgctggtcaaacaatatcagcgccagcaaacggcagacaaagcggactggataattggcgaggggctacttgcgaaaggtattcacggccaaggtctgcgttcgatgtcgcacccgggaaccgcctatgatgaccctattcttggcaaagacccacaacccgcccacatgaaagattttgtgcatacccagcaggataacggcggcgtgcatattaactccggcattcctaatcatgctttctatctcgccgccatcgcgctgggtggttttgcatgggaaaaagcgggatatgcctggtatgacgcggtttgtgataaatcactggcaaaagacgccgatttcccggcctttgccaaactgacgattcatcatggcgacaaacgttttggtaaagagaccgccgaggcgattcgaaaggcctgggaggatgttggagtcacatcatga

SEQ ID NO: 89766 - DNA, 1296 bp, Enterobacter aerogenes
atgggccaggtatggataagcggcgagatctctaacttcagccagccctcttccggccactggtacttcaccttaaaagacgataacgcccaggtgcgctgcgcgatgtttcgcaacagcaaccgtcgcgtcacgtttcgcccgcagcatggccagcaggtgctggttcgcgccaacattacgctttacgagcctcgcggcgactaccagatcattgtcgaaagcatgcagcccgccggtgagggcctgttgcagcaaaaatatgagcagctcaaggcgctcctgacggcagaagggttattcgatcaaagccacaagcaggcgctcccctctcccgcgcactgcgtcggcgtcgtcacctccaaaaccggcgccgcgctgcatgatatcttacatgtgttgaaacgccgcgatccctcgctgccggtgattatctacccgacggcggtgcaaggcgatgatgcgccggggcaaatcgtgcgcgcaatagcattagccaaccagcgccaggaatgcgatgtgctgatcgtcgggcgcggcggcggttcgctggaagatttatggagctttaacgacgaacgggtcgcgcgggcaattttcgccagccgcattccggtagtgagcgccgtcggccatgaaactgacgtcactatcgccgatttcgtcgccgacctgcgtgcgccgacgccctctgcggcggcagagatcgtcagccgcaatcagcaggaactgttgcgtcagctacagtccggccagcagcgcctggagatggcgatggattacttcctcgccaaccgccatcgccgctttacgcagttgtttcaccgtttacagcagcaacatcctcagctgcgcttagcgcgtcagcagaccgaactggagcgcctgcgtcagcggatgcgctttgcgctggaaagccagctcaaacgtgccgaccagcgtcagcagcgcgccgtgcagcggttgaatcagcaaaacccgcagccgcgcatccatcgcgcgcagtcgcgtattcagcaactggagtatcgtctggcggaaaatattcgcgcccgcctgagcgagcagcgcgagcgtttcggcaataccgtgacgcatctggaggccgtcagcccgctggcgacgctggctcgcggctacagcgtcacctcagccggcgatggcaaagtattgaaaaaaatcaaacaggtgcaggctggcgatgtcgtgactacccggctggaagatggttgggtcgagagcgaagtgacagccatcactccggtgaagaaaacgcgcgcccgcaaaaaagtctga

SEQ ID NO: 89767 - DNA, 1467 bp, Enterobacter aerogenes
atgctacgtatcgctaaagaagccctgacgtttgacgacgtcctccttgttcccgctcattctaccgttctgccgaataccgccgatctcagcacgcagctgacgaaaacgattcgtctgaatattcctatgctctccgcggcgatggataccgtaactgaagcgcgcctggcaattgccctggcccaggaaggcggcatcggctttattcataaaaacatgtcaatcgagcgccaggctgaagaagtccgccgcgtgaagaaacatgaatccggcgtggtaagcgatccacagaccgttctgccgactaccaccctgcgcgaagtgaaagaactgaccgaacgtaacggtttcgccggttatccggtagtgaccgaagacaacgaactggtcggcattatcaccggccgcgacgtgcgttttgttaccgacctgaatcagccggtcagcgtttatatgacgccgaaagagcgcctggtcaccgtgcgtgaaggtgaaagccgtgaagtggtcttcgcgaaaatgcacgaaaaacgcgtagaaaaagcgctggtagtggatgatagcttccacctgcgcggcatgatcaccgtaaaagatttccagaaagcggaacgtaaaccgaatgcgtgtaaagacgagcatggtcgtctgcgcgttggcgcggccgttggcgctggcgccggtaacgaagagcgcgttgacgcgctggttgccgcaggcgttgacgttctgctgatcgactcttctcacggtcactccgaaggcgttctgcagcgtattcgcgaaacgcgcgctaaatatcctgacctgcaaatcatcggcggtaacgtggcgaccggcgcgggtgctcgtgccctggcggaagctggcgtcagcgcggtgaaagtgggtatcggcccaggctccatctgtactacccgtatcgttaccggcgtaggcgttccgcagatcaccgccgtttccgacgcggttgaagcgctggaaggcaccggtattccggttatcgccgatggcggtatccgtttctccggcgatatcgcaaaagcgattgccgcaggcgccgccgcggtgatggttggctccatgctggccggtaccgaagaatccccgggtgaaatcgagctctatcagggccgttcttacaaatcctaccgcggtatgggttccctgggcgcgatgtccaaaggttcctctgaccgttacttccagagcgataacgccgctgacaaactggtgccggaaggtatcgaaggccgcgttgcctataaaggccgcctgaaagagatcattcaccagcagatgggcggcctgcgctcctgtatgggtctgaccggttgtggtactattgacgcactgcgtaccaaagcagagttcgtgcgtatcagcggcgcgggcatccaggagagccacgttcacgacgtgacgatcaccaaggaatccccgaactaccgcatgggctcctga

SEQ ID NO: 89768 - DNA, 1578 bp, Enterobacter aerogenes
atgacggataacattcataaacatcgcattcttatcctggacttcggttctcagtacacccagctggttgcgcgtcgcgtacgtgaattaggggtctattgcgagctctgggcttgggacgtgaccgaagctcaaatccgcgagttcaacccgaacggcattattctttccggcggcccggaaagcaccaccgaagacaacagcccgcgtgcgccgcagtacgtcttcgaagccggcgtaccggtattcggcgtatgctatggcatgcagaccatggccatgcagctgggcggccacgttgaagcttccaacgagcgcgagttcggttacgcgcaggtggaagtgcagaccgacagcgcgctgatcaagggcatcgaagatgcgctgagcgctgacggtaagccgctgctggacgtgtggatgagccatggtgataaagtcaccgctatcccttccgactttgtgaccgtcgccagcactgaaagctgcccgttcgccatcatggcgaatgaagaaaaacgcttctacggcgtacagttccacccggaagtcacccacacccgtcaggggctgcgtatgctggagcgcttcgtgcgcgacatctgccagtgtgaagcgctgtggacgccggcgaagatcatcgacgacgcggttgagcgtattcgtcagcaggtgggtgaagataaagtcatcctcggcctgtccggcggcgttgactcttccgttaccgcgatgctgctgcaccgcgccatcggcaaaaatctgacctgcgtattcgtggataacggcctgctgcgcctgaacgaagccgagcaggttatggatatgttcggcgaccgtttcggcctgaacatcgtacacgttgcggcggaagatcgcttcctgaccgcgctgaagggcgaaaacgatccggaagcgaagcgtaaaatcattggccgcgtcttcgttgaagtgtttgacgaagaagcgctgaagctggaagacgtgaaatggctggcgcagggcactatctaccctgacgtgatcgaatccgctgcttccgcgaccggtaaagcgcacgtcatcaagtctcaccacaacgtgggcggtctgccgaaagaaatgaagatgggcctcgttgagccgctgaaagagctgttcaaagacgaagtgcgtaagattggtctggagctgggcctgccgtacgacatgctgttccgccacccgttcccggggccgggcctcggcgttcgcgtacttggcgaagtgaagaaagagtactgcgacctgctgcgtcgcgcggacgctatcttcattgaagaactgcgcaaagccgacctgtatgacaaagtaagccaggcattcaccgtgttcctgccggttcgctccgtcggcgtgatgggcgatggtcgtaagtacgactgggtcgtctccctgcgtgcggtagaaaccatcgactttatgaccgcgcactgggcgcacctgccgtatgatttcctcggccgtgtttccaaccgcatcatcaacgaagttaacggtatttcccgcgtggtgtacgacatcagcggtaagccgccagcgactattgagtgggaataa

SEQ ID NO: 89769 - DNA, 234 bp, Enterobacter aerogenes
atgaaagtagagactatcagctacgttaaaaagaacgccgcaacgcttgatctgtcagaacctatcctggtcacacaaaacggtgtgcctgcttacgttatagagtcctatgatcagcagcaggaacgggaaaacgccattgctttgctgaaattgcttactctgtcagagaaagataaagcggaagggcgcgtgttctcgaaagaccagttgctggatggccttgcggattaa

SEQ ID NO: 89770 - DNA, 333 bp, Enterobacter aerogenes
atggaacagcaggtgacctttgagtacacgcttacggtgaagcactgcatcgacacaatagcgggttttctgaagcgtgttgatgttgagccgcgtccggttatcgcagatattctcacccagtttgagagcaccgtaggacagttccccttgggctgccagatttgccccgaattgctgaaaattggctgcgccaaatatcgggagtttaatcacgctgaaggctaccgggttttgtattccgtagacggaacgttagtaaccgcgcatgcgatcctggcacatcggcaggatgttcagcagctgctgtttaagcgtctgatcgtggcctga

SEQ ID NO: 89771 - DNA, 1209 bp, Enterobacter aerogenes
atgaaaacgtcaatcttgcctggcaccgcgcctctttcccttaccctcgcagccggcggcaaccagctcatcaactgggggatcgttttttatatgcccggtacctttgccggcgctattgctaatgatactggctggggcggaacagagatctttctcggtttgaccttcgccatgctgatgatggcggcgatctcgccttttatcgcccgcctgttggcctggtttggcggtcagcgggtggtgttcatcggttcattaaccatcgcggcaagctgcctggcaatgtcgcaggcagacagcctgatcttctggtacgtcgcatggctactggccggtgtcggtatgcggctggcgctatacgatgcgctgttcgccgcgctggttaacctgtatggtcaacgcgccagagtaactatttcacgggtgaccctggctggaggactggcctcagcgatattctggccgctgggcaccgcgctgctcgcgctaatgggctggcgtggagcgctggtaatctacagcctgtttggcctgcttagcgcactactgctgtggcggatgcctaatcaacgcttgcccgaccggagcgctcatcaggagaaagtgccgctttcccgccgcgaccagcacatgggcctgctgtacgcctcgcttatcgctttggtcacctttatttctaacggcacatccacccatctgcctgagtttatcgccagctacggtttgccggtaatgataggggtactatggggcatcggacagaccggcgcccgatttctggaggtgatttcaggagcgcgcctctccccacttcggttaacgctgttgaccacagcgctgttgccgctctgctttttactgggcctcaacgccgcctcgctaagctggaccgttggcggtttcgttttcgcctacggggccattaacggcctgacgacggtatttaaagcaacattaccgttgcagctattcgcggcggaagattacgcgcggcgtaccggacggctgttgatcccagcgcaactactggccgccgtctcgccatttgcctatgcctggctaaatcaacatctggggatagaaaggagccttgctatttcgggtctattatcgctggtcgtactggggctggcgctgagaatcggctggctgcagcggcggcaggttgtgcggataagtcatggacaaagtgaagagagggtatga

SEQ ID NO: 89772 - DNA, 894 bp, Enterobacter aerogenes
atgacgatgctgaatttggtaaatctgacaaccttccggctggtggcgcagcgcggcagtttttccgccgccgctgatgtactgggaatatcgcagccggcggtaagcctgcaggttcgccagcttgagcagttcctgcagacgcggttggttgagcgtaccgggcgagggatcaaggctactgccgccggattggcgctactggcccatagtgagattattgagcaggcggtgaatacggcggtgcagtcggtggctgagtttaaccataaagtgcacggcacgatgagcttcggtaccggggcgacggcctgtattcatttgctgccgccgctattgtgccatctacgcgagaagcatccgctgttaacggttggcgtcacgaccggtaatacgcttgacattgtacgtgcggtggaagagagccggcttgatctggggttggtgaccttacctgccagcggccgcagcctggcggtaacgccagtgctggaggaagagtttgtatttattactgccaacgatgatgaaccgctagtggggcaattgacgccttcactgctacaggcactttcgctaatagcatttgaagccggcagcgggacccgtgagctgatcgatggctggtttcgcgctgccggggtaaactcggcgccggtgatgcaactcggtagcattgaggctatcaagcgtatggtgcgtgctggtctgggatacagtatcgtaccgaagatggcggtggcggctgaagatgaccgaaccggaatacgtgtacagtcgctatcgccgcggctctatcgccaactgggcgtagtgttgcgtcaggataaagttatcaacaaagggatagcggagatgctgcgtctgctgcaccaactaaaaattttgccgtag

SEQ ID NO: 89773 - DNA, 192 bp, Enterobacter aerogenes
atgcgtaaacgacatcgatttaaccgtcgcatgacccgtatcgtactacttatcagttttctcttcttctttggacgctttgtctactcctctatcggtgcctggtaccatcatcaggacaaacaagagtcgcagcaatcgaccatcaccattgatgctcccgcgacaccaacgaccccagcccaggaataa

SEQ ID NO: 89774 - DNA, 2232 bp, Enterobacter aerogenes
atgagtattattaaactatacaaacgatatcaggataaatggtgggcactaccgctcatcctccctacgctgctgttgccgctggcgcgcgccgcgaatacatttgcaaatcttaacggtcacaccgtctttctgttttatcttccgctggcgttagtattgagcctgatgctgtttttcggctgggcggcgattccgggcattatagtcggcttgctgctgaccattacgcgcggaatgaccttcgagcaatctatcggcgtattgtttcattttttgatcccctcagtgctgtgctggggcggttatcgcattttcgttccacgccgtcagcagatttcacatggtaatgttgccctgatgccgcatcggctgttctggcaaatgctgctgccctcggtaatttttctcattatttcgcagattgctgagtatcttggcctgcatccgcgggcggcggaactggtggggtcaacgccatttagtttacgatcgttaatcacttttcaggcgctgatggtagggtgtctgaccggtgtgccgctgtgctattttttgctgcgtgttattcgtaatccgctacacttacgcggctttatatcccaggtgcgtttacaaatcgaccaaaaaataaaaccgctggaaattattgtctgggcaatagtattgttaataatactggctttattattcatgccgttaaatgccagcagcacgatatttagcacaaattatacattgtcattacttatgccggtcatgttgtggggggcgatgcgttttggctatcgttttatttccctggcgtggccgccgatattaattctggttatccattttcattacagctacctgccattttccccgatctacaataaccagctggcgattacctcctccagttacctggtgttctcttttattatcgcttatatggcaatgctggcgacgcagcagcggatgatccaccgtcgggttcgccggatggcctttctcgacccggtcgttcatatgccgaatttacgggccctgagccgagcgctaaaccactcgacctggtcggtgctgtgctttttacgcatgccagagctggagttgcttgggcggcactacggcgtgatgctacgcattcagtataagcagcagctgtcggaatacctgagtcacatactgcagccgaacgaaatggtctatcacctttcgggccatgacctggtgatacgcctgaatagcgacgaccatcaaaaacgcatcgtgatgctggatgagcggattaagcagttccgttttatctgggatggtattccgctacagccgcctgtcgggatcagctattgcaacgtacgttctcctgtcaagcatctgtatttactgctcggcgaactgaataatatagccgacatgtcattgaccagcggccacccggaaaacgtgcagcgccgcggcgccgttcacgttcagcaggggttaaaagaacgtgtgtcaatgatgaaccagatcctgcaggcgctggatcagaatcgttttcggctgatggcgcagcccattatcggcatgcgcggcgatagctatcatgaagtcctgttgcgtatggtgggcgagcagggggagctggttgcgccggataattttttgcctgcggcgcacgaatttggcctggcttcgcgcatcgacaactgggttatcgacaatacgctggcttttatgaacgataatcgccatacgttgccgggcatgcgtttggccatcaatctgtcgccagtttcggtcagccgcagccgtttcccggacgaagtcgaggaaatgctgcatcattataatattgagccctggcagcttatttttgagctgacggaaaatcactcgctcagtaatccggagcaggcgcaacaaacgctcgcgcggttgcaggagttgggatgccgggtggcgattgatgatttcggtaccggctatgccagctatgcgcggctgaaaacgcttaacgttgatatgctgaaaattgacggtagctttatccgtaatctggtcaccagcagtctggattatcaggttgtggcgtcgatttgccggttggcgcaaatcaaaaatatgcaggtagtagcggagtatgtggaatcgccggagatccgccaggcggtgatttcgctggggattgattatatgcagggctatgatattggtatgccggtcccgattgaacagctagcctgcgcggctgacgtcgcataa

SEQ ID NO: 89775 - DNA, 1527 bp, Enterobacter aerogenes
atgccaataaacgaaaaaacccctcggccgcaggagttcgctgcggtcgaccttggttcgaacagttttcatatggtgatcgcccgtgtcgtcgacggggcaatgcagatcatcggtcgcctgaagcagcgcgtccacctggccgatggcctggatgaaaactcggtgttgagcgaagaagcgattactcgtgggctgaactgcctgtcgctgtttgcggaacgtctgcagggattctccccttccagcgtttgtatcgtcgggacgcataccctgcgccaggcggctaacgcggcggattttctcaaacgagcggaaaaagttatcccttatcccatcgaaataatctccggtaacgaagaagcgcgtctgatttttatgggcgtcgaacatacgcaaccggagcgcggccgtaagctggttatcgacatcggcggcggttcgactgagctcgtcatcggcgaagatttcgagccccgcctggttgaaagccgacgtatgggctgcgtaagcttctcgcaggcctatttcgccggcggcgttatcaataaagaaaacttccagcgcgcgcgcctggcggcggtgcagaaactggaaaccctggcctggcagttccgtattcaggggtggaacgtggcgctgggcgcctctggcaccatcaaagccgcgcacgaagtgctggtcgccatgggggagaaagacggcttcattaccccggaacgtcttgaaatgctggtcagtgagcttctgaagaataaaaacttcgactcattaagcctgccgggattgtcggaggaccgcaaagcggtattcgccccgggtctggcgattttgtgcggggtattcgacgcgctggcgatcaaagaactgcgcctgtccgacggcgccctgcgcgaaggcgtgttgtacgagatggaaggtcgcttccgccaccaggatattcgcagccgtacggcccagagcctggcgaaccagtacaatatcgatcgcgaacaggcgcgccgggtactggagactaccactcagatgctggaacagtggcaggagcaaaacccgaaactggctaacccgcatctgtctgccctgctgaagtgggcggtaatgctacatgaagtggggctgaacattaaccacagcggcatgcatcgccactctgcctatatcctgcaaaatagcgatctgccgggctttaatcaggagcagcagacactgatggccacgctggtgcgctatcaccgcaaagctatcaagcttgatgatttgccgcgttttaccttgttcaagaaaaaacagttcttgccgctgatccaactactgcgtctgggcgtattactgaacaatcagcgtcaggcgaccactacgccgccaaaactgacattgaagacagaagccaaccactggacgttaattttcccgcatgactggtttagccagaatgcgttggtgctgctggatctggaaaaagagcaacagtactgggaaggcgtgccggaatggctgctgaaaattactgaggaagaggtataa

SEQ ID NO: 89776 - DNA, 2061 bp, Enterobacter aerogenes
atgggccaggaaaagctatacatcgaaaaagaactcagctggttgtcctttaacgagcgcgtacttcaggaagcggcggacaagagcaacccgcttatcgagcgcatgcgcttcttaggaatttactccaataaccttgatgagttttacaaagtgcgcttcgctgaacttaagcgacgcattcttatcagtgaagaacaaggtagtaccgcccattcgcgtcatctgttaggcaaaatccaggcccgcgtgctgaaggccgatcaggaatttgatggtctctataatgaactgctgctggaaatggcgcgtaatcagatcttcctgattaacgaacgccagctgtccgttaaccagcaatcctggttacgcaactacttcaaacagtatctgcgccagcatatttcgccgattctgatcaaccgcgagacggacctggttcaattcctgaaagatgattacacctatctggcggtggagattatccgcggcgataccattaactatgcgctgctggagattccatccgataaggtgccacgctttgtgaacctgccgccggagacgccgcgacgccgcaaaccgatgattctgctggataacattctgcgttactgcctggatgatatctttaagggcttctttgactacgatgccctgaatgcatactcgatgaaaatgacccgtgatgccgagtacgatctggtacacgaaatggaatcgagcctgatggagctgatgtcctccagcctgaagcagcgcttaaccgccgagccggtgcgttttgtctaccagcgcgatatgccggatgcgatggtcgaaatgctgcgcgataagctctccatctcgaactacgattcgatgctgccgggcggtcgttatcacaactttaaagactttatcggtttcccgaatgttggcaaggccaatctggtcaacaaaccgatgccgcgcctgcgtcacctgtggttcgataaattccgcaacggctttgacgccatccgcgaacgcgacgtactgctctactatccgtatcataccttcgagcacgtgcttgaactgctgcgtcaggcctcgttcgacccaagcgtgctggcaatcaaaatcaatatctaccgcgtcgctaaggattcacggattatcgattcgatgatccacgccgcccacaacggtaaaaaagtgaccgtggtggttgaactgcaggctcgcttcgacgaagaggccaatattcactgggccaaacgtctgacagaagccggcgtacacgttatcttctcggcgccggggctgaagatccacgccaaactcttcctcatttcgcgtaaagaaggcgatgaggtagtgcgttatgcgcatatcggcaccggcaacttcaacgagaaaaccgctcgtatctacaccgactattcgctcctcaccgccgacgcgcgcatcactaatgaagtccgtcgcgtgtttaattttatcgaaaacccttaccggccagtcagcttcgactacctgttggtatcgccgcagaactcgcgtcgtctgctgtatgaaatgatcgaccgcgaaatcgccaatgcgcaaaatgggcaaccgtccggaattacgcttaaattaaataacctggtcgataaagggctggtggacagactctatgccgcctccagtaccggcgtgccggttaacctgcttatccgcggcatgtgctcgctaatcccgggtcttgagggaattagtgaaaatattcgcgtgattagtatcgttgaccgtttccttgagcacgatagggtctattgttttgaaaacggtggtgataaacaggtgtggttatcctccgccgactggatgacgcgcaacatcgactatcgtatcgaagtcgccgtaccgctgctggacccgcgtctgaagcaacgcgtattggatattctcgatatcctgttcaacgataccgtaaaagcgcgctatcttgataaagaactgagtaatcgctacgtgccgcgcggcaatcgccgcaaagtacgcgcacagatagcgatttacgattatctcaaatcactcgaacaacccgattaa

SEQ ID NO: 89777 - DNA, 1659 bp, Enterobacter aerogenes
atgtgggaaacgcgggcgctggagctcaataatcaggacatctggcactggccgtcggcctgtcggttgattgaatacgcaattgagcatgattttaataccgtggtggtggggcagaccgagttatttggcaagctggtttcgccacaggggtatacgccttttgactataacgaccgattgtcgagccaacaacgagcgcgctgtatctatctcaaccggctggcgttacgctgccgtgagcaggggttgcgatgttatctgcaggcgaaagaacttagcttcccgaccgaactgttattagcgcatccggaactgctggataccccgcgcggggtgcgttttgatgtcgatttctggagccgctggttaaccgacaaaatccgcgccgtgtgtcaaagcgtaccggcgctcaccggtttgattatcgcgctctccagtactgatggattattaccgatctctcgtccgcagtgggacagacaacacgacgatccccgccagccagcgcaaagcttgatgctctaccgccgctgttttaacgccctgagtcaggcggtagccgcgcaaaataagcatctggtactgcgtgtcttccctgccagcaatgacgatctcagcgccgtgctggatgcgattgaaccgctgccgcctgcggtttcggtatcgataaaactcacgccggaacgtttctggcctgctttccctaacaatccggcgctgttggcggtgcagacgcgagatgtatggatcgatatcgatcttgccggcgaagaagtgggatggggagtcatgccgtttttacgtattgatgagctgcaggggcgactgttgtggtgtcagagtcgcaacccgcgcattaccggcgctatctgtaaaaccagttgggaaagtatcgataatcactggatccctgcgacgttaagcgaatgtaatctcttcgcctgtagtcagttgctgggcgaaggggcggcgaaaaatcagcagcagttactggtgcaatggctggcgcagcgttacggctggtgtccgccagccgatgtcgcgcagcagttccagtcgctgcttgagcaggcgacgcagacgctctatcagtcaatatatgtgcgagaccatgttttccatcgccatagccaattgcctgaaagctacggccaggcggtgtggggcctttacggacaactggcgcgcagtcactggttacccggttcggcgcaggatatccacttcacccgcgacgacccgcagaagtcgatggctaatctcacgcaaatcgcgcaagaaaaagatgaggtcgcagccagcgcgcagctgctggggaaagcagcgcaagcgttcgctctcacggcggattttcccgccgcgctggcgcttcggtggcgtgaggagtggcagggactggcgctctattgccagacgtttacccacgcgcaaaaggccttctttactctgcacttcgcccgagaggtggaaaacagctggagcatgcgggagatttgccatattaacgtgcaggcgttatatcgctgcgcatcggaaatggaaacgctttgtcagcagacaggcgaggcctcaccggcgttttacgtgatgttcgatcctgtacgagcacgtaatctggcggatagcctgagcaccgaactgacggcgctcagatag

SEQ ID NO: 89778 - DNA, 1098 bp, Enterobacter aerogenes
atgtcgcagaaaaacaaccgtcctgaattacaatcactcatcgaagcgctaatcggcaacttaaccgcgattaccgatgatagcggcgagtatttgcagcggctggcagatggccgggtggttgacaccaaaggttgggacggttgggagtggacgcatggcatcgccctgtttggcctgtttcgctaccagcaactgacaggatcgcttcgggctcgtgaacttatcgacggctggtttagcgcccgtttcgccgagggtacgccggagaaaaacatcaacaccgcttgtccgtttttaaccctggcgctgtgctatcaacagacgccgcgcagcgactggcgcgcctatctggaaagctggggagatgcgatatatcgccagataccgcgtaccgaagagggctgcctgcaacacgtcacctatgagaatccccatcatcaacaaatttgggacgatacgctcatgatggcggtactgccgctggcgatgctcggcaagatgtttgataaaccgcgctgggtagaagaggcgaaatttcagtttttgcagcacctgcactatttaagcgaccaccaaagcggcctgtggtttcacggctggcatttcgacggcagacaccatttcgccggcgcgctgtgggcccgcggcaatagctggataacgctggcgataccggaactgctggagatgcttgagctcgacgagcatgacgccttttaccgccagttgcaaaatactctgcaaattcaggtcagcgcccttgcccgctgccaggccgaaaacggcctatggccgacgctgcttaacgacccggatagttatctggaagcctctgcgacggcgggctttgccgcgggtattttcaaggcggtgcgcctcggctacctcgacgatgcgtttctgccggtcgccgggaaagcctgccggggcattatcgaacatatctcgccgcaaggagagttaacgcaggtgtcgtttggcacggcgatgggcaacgacctcgaccactatcgtaacatccccctgaccgccatgccctacggccaggcaatggcgatactgtgcctggttgaagcgctacgccgcacgctttaa

SEQ ID NO: 89779 - DNA, 1512 bp, Enterobacter aerogenes
atgacgaggacagtgaccccgcaacgagaagtcaaaacccgcaacatcctctgctgggggatgggcgatattttcggcagcggcgcgatgaccatcaccggcctgtggctgctctacttttatattgaagtcgccgggctctcgcccgccgctgcggcctctattttcgccatcgccaagatttgggacggcatcacggacccggtgatgggctacattaccgacaacattcgcacccgttgggggcggcgacggatcttctttattctcggcgcgccgttatcgctctgtttcgccctgatgtggataagtggttttggttatacctggtaccttggtacctatctactattcagcaccgtcttcaccctgctgatggtgccttacgatacgctgcctgcagagatgaccacccgctatgatttgcgctcgaaaatgtccggcgcgcgaatgctattcgctcaggcgacagcctttctcgcggcgctgatccccgggcaaatcatggcccacgtcgccgataaatcgcaggcgtttctctatatcggcattatcttcgccctgctttttgccttgccgtggatcttcgtctggcgcggtacctgggagcgcgagcatctcccaccaccgcagacgcagcaaggtttaggcaaaacgctacgttcgctgtatagggaaatggcctcgaccttccgtctgcggaccttccgtattcatatcatgatgtatgtcggcggcgcggtggcgttggatattttcggctcgctgtttatgcactatatgacctacgtgctacgtgtcggcacctcgctggcttcgcaggccatgagtctgatgacgctgtttcagttcttcgcgatccctttatttacctggctttgcatccgtgtcggcaacggcaacgcctataaggtcgccatcgcgctgatcctctgcgcactactgtggttcagccaattgaccgcttctttcagccatctttcctggctgctactcggcggcgcaatcgtgatgggcatcgcccgcggcggcacctatcttatcccatggaatgtctacaattttctgcccgatatcgatgaagcttataccggcgtgcggcgtgaagggatctacgcgggggtaatgatgctgacgcgcaaattctcccaggcgctggcgctgtttatcgtcggcctggcgctggaagcctttggattcaccaaaggcgccgaaacgcagaataccgccgcgctgaatggtatctggtgggtattcctcgttggccccggcctgctggccttactggcaatgtatggcgcgtttcgttttcgcttgagccagccgcgacatcaaatcctgattagcgaactggagcgtctgcgcgccggtggtcatccacaggatgccagcccgcagacccgcgaaactatcgagctactgaccggccatcctcatcgcaacgatcgctggcaacacgccgccgtttcttctcaaggaaatcactatgtcgcagaaaaacaaccgtcctga

SEQ ID NO: 89780 - DNA, 1341 bp, Enterobacter aerogenes
atgaacatttatctttcgcagcgccatccccatgcggatggcgtgacgcctgatactgaactctttcaacaggcgctggacgaactggcgcaggctggcggcggccggttggtggttgattgcggcaggtacgcgctcggcggtttacggataggctcgaacacctgtttgtggctgtcgccgggcgccgagcttatcgttagcgaaaactatgatgactttgctcaggcgacggcgctgagccgggcggaatcttcagatcgggcctttctgtatgctgtggatgcgcagaatattactatctgcggaggcggcgagatttacggcagcgctgatggctggttttcccgtggcgttgatgccatgggttaccgcacgccagccagggcgcgtccgcggatcattttgctggaaaattgccgtcgcgtccggctggagaatatcaccgtacggcatgccccgatgtggacaattcatctggtctcctgcatgggcgtggtggttgacggcgtcaccgtcgacaacgatttgacgatggctaataccgatgcgctggatatcgatagctgccagcaggtacatatcgccaatagctatttcagcgcggcggatgatgccatctgtctgaagaccaccgataaacctgagcggatccagcgaccgttgcgtcaggtaaccatcgttaactgcacgctgcgctcgaaaagctgcgcctttaaaatcggtactgaaacctggcaggatattgaagatgtgctggtgagtaactgcactatctttgactccaatcgcggcattggcctgatatcccgcgacggcgggcggctacggcggatgatttttagcagcattgcttttgattgcgtgagcgcgccggcctgtcattggggcgaggcggaccctgttttcctttccgcgcgccgtcgcgatccggcgattgaacccggcgaaatctcacagatccagttccgcgggctggttggcgagtgcgaaggcgcgataaacctgcatagtgaaacgccaggtcagatccggcgcattctgtttgacggcgtgcagctcacccagaagctgaacctggcagcggagcaggggctttatgatatccgcccgccgtgtaatccgatgtcgccgaccgggatggggattgataacgcctggtgtctgaatccgcaaagcggccgagtttggggtgtcgaaccttatcccggcggtttgccggtactgtacgccaacggcgtagcgggtctgacactgcgcgaatttgattatcagcgcccgataccattaccggcagcctggaaccctaacgcgctatgtctggaaaacggcgataattag

SEQ ID NO: 89781 - DNA, 642 bp, Enterobacter aerogenes
atgaaaaacattgtggtgctgatttccggtaacggcagtaatttacaggcgattattgatgcctgcgcccggaagcaaatcaacggcaccctgcgtgcggtattcagcaataaggccgaagcattcggccttgagcgcgcccgcgaggccggtattccggcctttgcgctctcgccgaaagcgtttgatagccgcgaagccttcgaccgcgagctgatgcagcaaatcgatgtcttccaacccgatctggtggtgctggcgggctacatgcgtatccttagcccagcgtttgttggccactatcaggggcgcttgctgaatatccatccttctctgctgccgaaatatccagggctgcatactcatcgccaggcgctggaaaatggtgatgaggaacatggcacctcggtgcatttcgtcaccgacgaactcgatggcgggccggtgatcttacaggctcgggtgccggtatttccggaagacagcgaagatgacgttaccgcccgcgttcaggcgcaggagcacgatatctatccgctggtggtgagctggtttgttgatggccgcctgcgtatggaagctaactctgcgtggctggataatcgcaagctgccgccgcagggctatgccgccgaagaataa

SEQ ID NO: 89782 - DNA, 1038 bp, Enterobacter aerogenes
gtgaccgataaaacctctctcagctataaagatgccggcgtggatattgatgcaggcaacgctctcgtcgaccgtattaagggcgtggtgaagaaaacccgtcgcccggaagtgatgggcggactgggcggattcggcgcgctgtgcgctctgccgcagaagtaccgcgaaccggtactggtctccggtaccgacggcgtcggcaccaagctgcgtctggcgatggaccttaaacgtcacgacactatcggtatcgatctggtcgctatgtgcgtcaatgacctcgtagttcagggcgccgagccgctgtttttcctcgactactacgcgaccggtaaactggacgtggatactgcggcaagcgtgatcagcggcatcgccgaaggctgcttacagtccggctgcgcgctggttggcggcgaaacggcagagatgccgggtatgtaccatggtgaagattacgacgtggccggtttctgcgtcggcgtggtagaaaaatcagaaatcatcgacggcagcaaagtggctgacggcgacgtcctggtcgcgcttgcctccagcggcccgcactctaacggctactcgctggtgcgtaagattatcgaagtcagcggcgttgatccgcagaccaccgacctcaacggcaaaccgctggccgaccacctgctggcgccgacccgcatctatgtcaaatcgattctgaatctgattgccaacgtcgacgtccacgccatcgcccacctgaccggcggcggcttctgggaaaatattccgcgcgtactgccggacaacacccaggcggtaatcgatgcgtcctcctggcagtggccggaagtcttcaactggctgcaaaccgccggtaatgtcagcagccacgaaatgtaccgcacctttaactgcggcgtcggcatgctggtcgcgctgccggcagccgaggcggataaagccatcaccctgctgaacgagcagggtgaaaacgcctggaaaatcggttacatcaaggcatccgatgccgaacaacgcgtggtcattgaatga
